United States Patent Application Publication US 2025/0074962 A1 - sequence listing, part 5

SEQ ID NO: 4243 - DNA, 8317 bp, Homo sapiens
  source 1..8317: mol_type = genomic DNA
gtgtgtggatgtgtgagtgagagggaacgagagtaagagaaagaaagaagtgaggggatgtaaactcgaataaatttcaaagtgcctccgagggatgcaacgggcaaaaactgaactgttcaggcttcagattgtaactgacgatctgaggaaaaatgaggtgctcgatgaattttcgtttgtattttttggcgaggcgggggaggtgttgagattttttttttttcccctcggggtgggtgcgagggggatgcatcctagcctgcccgacccggagcaagtcgcgtctccccgccggagcccccccacccatttctttgctgaacttgcaattccgtgcgcctcggcgtgtttccccctccccccttccctccgtcccctcccctccccggagaagagagttggtgttaagagtcagggatcttggctgtgtgtctgcggatctgtagtggcggcggcggcggcggcggcggggaggcagcaggcgcgggagcgggcgcaggagcaggcggcggcggtggcggcggcggttagacatgaacgccgcctcggcgccggcggtgcacggagagccccttctcgcgcgcgggcggtttgtgtgattttgctaaaatgcatcaccaacagcgaatggctgccttagggacggacaaagagctgagtgatttactggatttcagtgcgatgttttcacctcctgtgagcagtgggaaaaatggaccaacttctttggcaagtggacattttactggctcaaatgtagaagacagaagtagctcagggtcctgggggaatggaggacatccaagcccgtccaggaactatggagatgggactccctatgaccacatgaccagcagggaccttgggtcacatgacaatctctctccaccttttgtcaattccagaatacaaagtaaaacagaaaggggctcatactcatcttatgggagagaatcaaacttacagggttgccaccagcagagtctccttggaggtgacatggatatgggcaacccaggaaccctttcgcccaccaaacctggttcccagtactatcagtattctagcaataatccccgaaggaggcctcttcacagtagtgccatggaggtacagacaaagaaagttcgaaaagttcctccaggtttgccatcttcagtctatgctccatcagcaagcactgccgactacaatagggactcgccaggctatccttcctccaaaccagcaaccagcactttccctagctccttcttcatgcaagatggccatcacagcagtgacccttggagctcctccagtgggatgaatcagcctggctatgcaggaatgttgggcaactcttctcatattccacagtccagcagctactgtagcctgcatccacatgaacgtttgagctatccatcacactcctcagcagacatcaattccagtcttcctccgatgtccactttccatcgtagtggtacaaaccattacagcacctcttcctgtacgcctcctgccaacgggacagacagtataatggcaaatagaggaagcggggcagccggcagctcccagactggagatgctctggggaaagcacttgcttcgatctattctccagatcacactaacaacagcttttcatcaaacccttcaactcctgttggctctcctccatctctctcagcaggcacagctgtttggtctagaaatggaggacaggcctcatcgtctcctaattatgaaggacccttacactctttgcaaagccgaattgaagatcgtttagaaagactggatgatgctattcatgttctccggaaccatgcagtgggcccatccacagctatgcctggtggtcatggggacatgcatggaatcattggaccttctcataatggagccatgggtggtctgggctcagggtatggaaccggccttctttcagccaacagacattcactcatggtggggacccatcgtgaagatggcgtggccctgagaggcagccattctcttctgccaaaccaggttccggttccacagcttcctgtccagtctgcgacttcccctgacctgaacccaccccaggacccttacagaggcatgccaccaggactacaggggcagagtgtctcctctggcagctctgagatcaaatccgatgacgagggtgatgagaacctgcaagacacgaaatcttcggaggacaagaaattagatgacgacaagaaggatatcaaatcaattactagcaataatgacgatgaggacctgacaccagagcagaaggcagagcgtgagaaggagcggaggatggccaacaatgcccgagagcgtctgcgggtccgtgacatcaacgaggctttcaaagagctcggccgcatggtgcagctccacctcaagagtgacaagccccagaccaagctcctgatcctccaccaggcggtggccgtcatcctcagtctggagcagcaagtccgagaaaggaatctgaatccgaaagctgcgtgtctgaaaagaagggaggaagagaaggtgtcctcagagcctccccctctctccttggccggcccacaccctggaatgggagacgcatcgaatcacatgggacagatgtaaaagggtccaagttgccacattgcttcattaaaacaagagaccacttccttaacagctgtattatcttaaacccacataaacacttctccttaacccccatttttgtaatataagacaagtctgagtagttatgaatcgcagacgcaagaggtttcagcattcccaattatcaaaaaacagaaaaacaaaaaaaagaaagaaaaaagtgcaacttgagggacgactttctttaacatatcattcagaatgtgcaaagcagtatgtacaggctgagacacagcccagagactgaacggcaatctttccacactgtggaacaatgcatttgtgcctaaacttcttttggaaaaaaaaaatataattaatttgtaagtctgaaaaaaaaatatttaatttaaaaaaaattgtaaacttgcaataatgaaaaagtgtacttctgaagaaaactacatgaacgtttttgttggtattcaagtcagctagtgtttataattactggatattgaattaggggaagctcggctgccctagtaacaaaaccagcaaacgtcctgatgacaacgaagtgatgacattagccattccttagggtaggaggaacagatggatcttatagacctatgacaaatatatatataaatatatatataaatatatattaaaaatttagtgactatggtaagcttttgttcatttgtttcagacttttttctcctgtaaaaaaatagtactgattaacttttttaaaagaaagattttactgtaaatatggatttttttttttttggtcttatttctgtccctttccctggtttgttatcgtaacctgtagtgccaactctgcttccagaggggtagtgcaggatgaaatgctgaccctgatgttgcttctcattcataaataagtagaaagttgtttctccagtcttttgggaacacaggacttaaaagtcacatcatgtgtagatattacaagcagcattaccaagacatggcaaaaagagtttgtctgaattgtaatgttgcgtttgtgaacctattctgggattttcagaggtacaaggttagaatgctacaatgttaccactgtgccttccaatgtttatatcatcggaaacataacataatcaaagtggctgtgatttaacaaaatgattaaagtgttacctacctgtgtagccgaagtagtgtgcagtgaggcgtttctgaatacatggtcagatttttggaaaaaaacaaaaacaaaaaaaacaagtaaagttcaaaaaccgtcaaatgagaaaattgcaagtagtgtgacagagctgattgattttgttgctttcttgattttttttttcaaaatgggtttactaaaatgtagatgacttaactgcctcctccttcgtctgaaaaatgccaatattcaatcatcatgcagcattataacaagccttataagtcctaaagcattaagttgcacttttttgaggaggggtagtgcagtatttctctggccagtatgaatgaagtttatacttaccatatttgatagaaacatagatcaagctatggcacagcgactcatcagatagctagctttgacgtctgggcacaattgaaccaacttccatcgtgaatctttataatgattgactttggtgtatagtgcagtaaacaaatagtgctcctagttaagtatttgtcagcatccttttgtctctaacttgtttctatttttacagccacacaattcttggcatgtattaagaaaaaaaaaaatccctgttcaagtagtttttccacctatcagcactgagtaaatgccataaatccattgaaatggtctaaatgttccatctgttctcctgttttgccagttatatagtaatgaaatacatttgtaaattttatgcaacaaatggcaaacgtatcattattttgaaattgtgtatgtaaaagttatatttttacatgtagactcttgttattatgtgttttaatacattgtatcagtttttgtttttttttaaaaactgtggtttaaaaagaagtctcatttaaatgaaatagctacaagaatcagaattttatgttcatttctgaaaatgtaagaacaaataagatagttaccacgtggtcatcttttacaaacccataaacattttgattagctgtgtgtgtgttgaaaaactgtaaatatgttcagtagcgataaaactaaaataactttgatttgttgataagttcctaaaatgtggaggtggattaaaaccttaggagaatagcagaaatcaaacttcatgaaaagttattttggggctttcctgtgaaatgtatgaacaaagaggctcagagaaggacatggaagacaataatgtatactctctcctcctccctgaataatgaaaaccatgtgtatttgttccctccgtatgttaaagatttccttttagtggtacattctgcactcattttgtatagtctaccaaggcgggtatccctaggaacaatattatataggaagcaggtatactctgatcacattcaggataagtgtacagaagaaaatacggtgtttactctttagggaactggaaacactccctgcattgatgtacattttaagaatggcacttttgatacatgttatcataaaggtgcttaatagagctgaattaaagtttttcaaatctgtaaacaaagcaaaaaagtaaattgtagtcatttgattattttttaaattggtgctttatattttgttctcactcagagtaaaagctgcaatttattgttcaccagctttgatgtattcattactcagtaatgcaatacctctattgttgaattccctttggaaataagtgaaaattctaacggccactgaaagctgctcgctaggttttgcttggtggagaaacataatctgcacctatccatattaattgggttgtatccccattaaaaaagaaaaaaagggaatgtggcctttttagtgtgttttttattgttgttgttttgtaattatcaaacccaggtaagatattggtatcctgcactggattttcaaatgaagttcagcagaagacagttaagattaaagtactatacaaaaatttcaaaagggtccatactacgctatctgtatgacgacacttaggctggggatctctttcagaaactcggactttaaaagcaacttggagcagttgatccacctccacattcaagtaatttatgaatatgcagaatagggatctgttcatctagaaatttttaccatttgtcttctgtgtagctgcaaggaacactaatgtttatacaactgtcagtccacccagtggtgcaactggttctgattcagtcttccgattcctttttatttttcactttttcctatttctgaatttttttttttatttgtgatcttgattttgatgaggggttggggagtggggagggagtcgaaccaagacttggagttaagaggattttcatcttttgcatccaacaggcagaatatgatctgtgtccaaaagtgaacttgagtcaggaatgaatcaatttcagcataaacaagcacaaaaatttagtctgctggctgactggaagcaaaaaagtcaagatggaatatgatgaattccaacacaatggggcaccaaggcctttaggcctctctttttattttgctttggttttgtttgtttttctttagagacatgctctttctcatgggacttgaagtggactcatctttgtgcagtgctggttttgccatactcatttcaagtattatagacatatgtaatggtgaaaatatatgaactgtggcctttttcattcttgttacttgtgatgcaattaagtgaagataagaaaaaaaaaaaaaaagcagagatttaccatgtatcagtgcctggctttttgttataaagctttgtttgtctagtgctcttttgctataaaatagactgtagtacaccctagtaggaaaaaaaaaaaactaaatttaaaaataaaaaatatatttggcttatttttcgcaggagcaatccttttataccatgaatattacaaaaaaattgtcagattctgaatatttcttctttgtagatttttggaatcattatgagtaaaagtttgttactttattttactatttaaaagatgttattttaccatgtgttaccaagatgaaactgtatgggtagcttttttgtttgttttttgttttgtttttgtttttgtttttgtttttagttgtaggtcgcagcggggaaattttttgcgactgtacacatagctgcagcattaaaaacttaaaaaaattgttaaaaaaaaaaaaagggaaaacatttcaaaaaaaaaaaaaaagataaacagttacaccttgttttcaatgtgtggctgagtgcctcgattttttcatgtttttggtgtatttctgatttgtagaagtgtccaaacaggttgtgtgctggagttccttcaagacaaaaacaaacccagcttggtcaaggccattacctgtttcccatctgtagttattcgatgaagtcatgtacatgaccgttctgtagcaataaatgtgccatttttataaactgtttctgacacttgtttcatttcattttgcattgtccatatagctatgattctcttctgtaagtaaaacgcatctatatttcattttccaagtgttggaggtattgacagcttaacaaacaaaacatacaaaaaaaatcacaaaaacaaattgaaaagcaaagcacatgattgatcaaggaagagatgcccttaatgaaaatggaacgggatgcatgcaaaacaaaaagaaaactgtctagaggattaactaattgaaggaatataattaatgtgtgtgtaacactgaagctatgcatttgaagagctctgaactgcaccagtgttttcggttgtgctgcaggttgctaagtcaagtcagccttaaccttttgcaccagttggtcggctgtttggcagaacattctcagatcttttcagtcaaaaatctaagatgatttattttgtatcactttgttaaaagctgaatattgttaactacagttaatattaacactgtatttatactttctcaaactacatccgccccaccacttctggttgcctctgttgactattaatccagatgtaaacaaccagatgtttttttctaacttgtacaaactgacgtgtgtcaactatcatggaaggaaaaaaatgtacagattaaaattattcagtgttatgtactgtaagttaatatttttgtagaatggacatcaatctactttgcaaaatttggaggctatttcaacattgcactgtagaaatgtaaagtaatgtatgcaatgtaaaggaaagcccgcggtagctgagcgcttcataacagaatgttctaatcaagtacgtggtatttggggatgtctccaatattgctcttgtattctttctaattgggtttagtgactagttgaaggaaaatgttataacgccatttggttcacatgtgaagtgccctccatagccaaatgttgggatttttttttttttcgtttttggttggactgtttgcagatatttaaattttatgaaatttccaaagattttggttgataacccccttttaccttctaaatgatttgagatgttcttatgttcttactgtgtgttttaaatatatataaaagagccacaagca

SEQ ID NO: 4244 - DNA, 2478 bp, Homo sapiens
  source 1..2478: mol_type = genomic DNA
gtctacagtatcacctttcttgtagattggcacttatgcggccaaaggaacaacaccatgttttctaaaaggctggagaaaatagcacaggtgcctctcctctttcccttcatcttcatcattttgacaaattactcaaagatggagggtgcagttgaaagccagccatcattttttaaaacttctcaggacattgtaacatgcacttgggttgagaactgctactcgagcttctccaggaggcccttggagcaaatgttttgtaaacaccaatctaagaacattatctcttggacgggcatggtggctcacacctgtaatcccagcactttgggaggccaaggtttgtgtgattttgctaaaatgcatcaccaacagcgaatggctgccttagggacggacaaagagctgagtgatttactggatttcagtgcgatgttttcacctcctgtgagcagtgggaaaaatggaccaacttctttggcaagtggacattttactggctcaaatgtagaagacagaagtagctcagggtcctgggggaatggaggacatccaagcccgtccaggaactatggagatgggactccctatgaccacatgaccagcagggaccttgggtcacatgacaatctctctccaccttttgtcaattccagaatacaaagtaaaacagaaaggggctcatactcatcttatgggagagaatcaaacttacagggttgccaccagcagagtctccttggaggtgacatggatatgggcaacccaggaaccctttcgcccaccaaacctggttcccagtactatcagtattctagcaataatccccgaaggaggcctcttcacagtagtgccatggaggtacagacaaagaaagttcgaaaagttcctccaggtttgccatcttcagtctatgctccatcagcaagcactgccgactacaatagggactcgccaggctatccttcctccaaaccagcaaccagcactttccctagctccttcttcatgcaagatggccatcacagcagtgacccttggagctcctccagtgggatgaatcagcctggctatgcaggaatgttgggcaactcttctcatattccacagtccagcagctactgtagcctgcatccacatgaacgtttgagctatccatcacactcctcagcagacatcaattccagtcttcctccgatgtccactttccatcgtagtggtacaaaccattacagcacctcttcctgtacgcctcctgccaacgggacagacagtataatggcaaatagaggaagcggggcagccggcagctcccagactggagatgctctggggaaagcacttgcttcgatctattctccagatcacactaacaacagcttttcatcaaacccttcaactcctgttggctctcctccatctctctcagcaggcacagctgtttggtctagaaatggaggacaggcctcatcgtctcctaattatgaaggacccttacactctttgcaaagccgaattgaagatcgtttagaaagactggatgatgctattcatgttctccggaaccatgcagtgggcccatccacagctatgcctggtggtcatggggacatgcatggaatcattggaccttctcataatggagccatgggtggtctgggctcagggtatggaaccggccttctttcagccaacagacattcactcatggtggggacccatcgtgaagatggcgtggccctgagaggcagccattctcttctgccaaaccaggttccggttccacagcttcctgtccagtctgcgacttcccctgacctgaacccaccccaggacccttacagaggcatgccaccaggactacaggggcagagtgtctcctctggcagctctgagatcaaatccgatgacgagggtgatgagaacctgcaagacacgaaatcttcggaggacaagaaattagatgacgacaagaaggatatcaaatcaattactaggtcaagatctagcaataatgacgatgaggacctgacaccagagcagaaggcagagcgtgagaaggagcggaggatggccaacaatgcccgagagcgtctgcgggtccgtgacatcaacgaggctttcaaagagctcggccgcatggtgcagctccacctcaagagtgacaagccccagaccaagctcctgatcctccaccaggcggtggccgtcatcctcagtctggagcagcaagtccgagaaaggaatctgaatccgaaagctgcgtgtctgaaaagaagggaggaagagaaggtgtcctcagagcctccccctctctccttggccggcccacaccctggaatgggagacgcatcgaatcacatgggacagatgtaaaagggtccaagttgccacattgcttcattaaaacaagagaccacttccttaacagctgtattatcttaaacccacataaacacttctccttaaccccca

SEQ ID NO: 4245 - DNA, 7240 bp, Homo sapiens
  source 1..7240: mol_type = genomic DNA
atgtactgcgcatacacaatcccgggcatgggcggcaactctttgatgtactactataatgggaaagcggtctatgctccatcagcaagcactgccgactacaatagggactcgccaggctatccttcctccaaaccagcaaccagcactttccctagctccttcttcatgcaagatggccatcacagcagtgacccttggagctcctccagtgggatgaatcagcctggctatgcaggaatgttgggcaactcttctcatattccacagtccagcagctactgtagcctgcatccacatgaacgtttgagctatccatcacactcctcagcagacatcaattccagtcttcctccgatgtccactttccatcgtagtggtacaaaccattacagcacctcttcctgtacgcctcctgccaacgggacagacagtataatggcaaatagaggaagcggggcagccggcagctcccagactggagatgctctggggaaagcacttgcttcgatctattctccagatcacactaacaacagcttttcatcaaacccttcaactcctgttggctctcctccatctctctcagcaggcacagctgtttggtctagaaatggaggacaggcctcatcgtctcctaattatgaaggacccttacactctttgcaaagccgaattgaagatcgtttagaaagactggatgatgctattcatgttctccggaaccatgcagtgggcccatccacagctatgcctggtggtcatggggacatgcatggaatcattggaccttctcataatggagccatgggtggtctgggctcagggtatggaaccggccttctttcagccaacagacattcactcatggtggggacccatcgtgaagatggcgtggccctgagaggcagccattctcttctgccaaaccaggttccggttccacagcttcctgtccagtctgcgacttcccctgacctgaacccaccccaggacccttacagaggcatgccaccaggactacaggggcagagtgtctcctctggcagctctgagatcaaatccgatgacgagggtgatgagaacctgcaagacacgaaatcttcggaggacaagaaattagatgacgacaagaaggatatcaaatcaattactaggtcaagatctagcaataatgacgatgaggacctgacaccagagcagaaggcagagcgtgagaaggagcggaggatggccaacaatgcccgagagcgtctgcgggtccgtgacatcaacgaggctttcaaagagctcggccgcatggtgcagctccacctcaagagtgacaagccccagaccaagctcctgatcctccaccaggcggtggccgtcatcctcagtctggagcagcaagtccgagaaaggaatctgaatccgaaagctgcgtgtctgaaaagaagggaggaagagaaggtgtcctcagagcctccccctctctccttggccggcccacaccctggaatgggagacgcatcgaatcacatgggacagatgtaaaagggtccaagttgccacattgcttcattaaaacaagagaccacttccttaacagctgtattatcttaaacccacataaacacttctccttaacccccatttttgtaatataagacaagtctgagtagttatgaatcgcagacgcaagaggtttcagcattcccaattatcaaaaaacagaaaaacaaaaaaaagaaagaaaaaagtgcaacttgagggacgactttctttaacatatcattcagaatgtgcaaagcagtatgtacaggctgagacacagcccagagactgaacggcaatctttccacactgtggaacaatgcatttgtgcctaaacttcttttggaaaaaaaaaatataattaatttgtaagtctgaaaaaaaaatatttaatttaaaaaaaattgtaaacttgcaataatgaaaaagtgtacttctgaagaaaactacatgaacgtttttgttggtattcaagtcagctagtgtttataattactggatattgaattaggggaagctcggctgccctagtaacaaaaccagcaaacgtcctgatgacaacgaagtgatgacattagccattccttagggtaggaggaacagatggatcttatagacctatgacaaatatatatataaatatatatataaatatatattaaaaatttagtgactatggtaagcttttgttcatttgtttcagacttttttctcctgtaaaaaaatagtactgattaacttttttaaaagaaagattttactgtaaatatggatttttttttttttggtcttatttctgtccctttccctggtttgttatcgtaacctgtagtgccaactctgcttccagaggggtagtgcaggatgaaatgctgaccctgatgttgcttctcattcataaataagtagaaagttgtttctccagtcttttgggaacacaggacttaaaagtcacatcatgtgtagatattacaagcagcattaccaagacatggcaaaaagagtttgtctgaattgtaatgttgcgtttgtgaacctattctgggattttcagaggtacaaggttagaatgctacaatgttaccactgtgccttccaatgtttatatcatcggaaacataacataatcaaagtggctgtgatttaacaaaatgattaaagtgttacctacctgtgtagccgaagtagtgtgcagtgaggcgtttctgaatacatggtcagatttttggaaaaaaacaaaaacaaaaaaaacaagtaaagttcaaaaaccgtcaaatgagaaaattgcaagtagtgtgacagagctgattgattttgttgctttcttgattttttttttcaaaatgggtttactaaaatgtagatgacttaactgcctcctccttcgtctgaaaaatgccaatattcaatcatcatgcagcattataacaagccttataagtcctaaagcattaagttgcacttttttgaggaggggtagtgcagtatttctctggccagtatgaatgaagtttatacttaccatatttgatagaaacatagatcaagctatggcacagcgactcatcagatagctagctttgacgtctgggcacaattgaaccaacttccatcgtgaatctttataatgattgactttggtgtatagtgcagtaaacaaatagtgctcctagttaagtatttgtcagcatccttttgtctctaacttgtttctatttttacagccacacaattcttggcatgtattaagaaaaaaaaaaatccctgttcaagtagtttttccacctatcagcactgagtaaatgccataaatccattgaaatggtctaaatgttccatctgttctcctgttttgccagttatatagtaatgaaatacatttgtaaattttatgcaacaaatggcaaacgtatcattattttgaaattgtgtatgtaaaagttatatttttacatgtagactcttgttattatgtgttttaatacattgtatcagtttttgtttttttttaaaaactgtggtttaaaaagaagtctcatttaaatgaaatagctacaagaatcagaattttatgttcatttctgaaaatgtaagaacaaataagatagttaccacgtggtcatcttttacaaacccataaacattttgattagctgtgtgtgtgttgaaaaactgtaaatatgttcagtagcgataaaactaaaataactttgatttgttgataagttcctaaaatgtggaggtggattaaaaccttaggagaatagcagaaatcaaacttcatgaaaagttattttggggctttcctgtgaaatgtatgaacaaagaggctcagagaaggacatggaagacaataatgtatactctctcctcctccctgaataatgaaaaccatgtgtatttgttccctccgtatgttaaagatttccttttagtggtacattctgcactcattttgtatagtctaccaaggcgggtatccctaggaacaatattatataggaagcaggtatactctgatcacattcaggataagtgtacagaagaaaatacggtgtttactctttagggaactggaaacactccctgcattgatgtacattttaagaatggcacttttgatacatgttatcataaaggtgcttaatagagctgaattaaagtttttcaaatctgtaaacaaagcaaaaaagtaaattgtagtcatttgattattttttaaattggtgctttatattttgttctcactcagagtaaaagctgcaatttattgttcaccagctttgatgtattcattactcagtaatgcaatacctctattgttgaattccctttggaaataagtgaaaattctaacggccactgaaagctgctcgctaggttttgcttggtggagaaacataatctgcacctatccatattaattgggttgtatccccattaaaaaagaaaaaaagggaatgtggcctttttagtgtgttttttattgttgttgttttgtaattatcaaacccaggtaagatattggtatcctgcactggattttcaaatgaagttcagcagaagacagttaagattaaagtactatacaaaaatttcaaaagggtccatactacgctatctgtatgacgacacttaggctggggatctctttcagaaactcggactttaaaagcaacttggagcagttgatccacctccacattcaagtaatttatgaatatgcagaatagggatctgttcatctagaaatttttaccatttgtcttctgtgtagctgcaaggaacactaatgtttatacaactgtcagtccacccagtggtgcaactggttctgattcagtcttccgattcctttttatttttcactttttcctatttctgaatttttttttttatttgtgatcttgattttgatgaggggttggggagtggggagggagtcgaaccaagacttggagttaagaggattttcatcttttgcatccaacaggcagaatatgatctgtgtccaaaagtgaacttgagtcaggaatgaatcaatttcagcataaacaagcacaaaaatttagtctgctggctgactggaagcaaaaaagtcaagatggaatatgatgaattccaacacaatggggcaccaaggcctttaggcctctctttttattttgctttggttttgtttgtttttctttagagacatgctctttctcatgggacttgaagtggactcatctttgtgcagtgctggttttgccatactcatttcaagtattatagacatatgtaatggtgaaaatatatgaactgtggcctttttcattcttgttacttgtgatgcaattaagtgaagataagaaaaaaaaaaaaaaagcagagatttaccatgtatcagtgcctggctttttgttataaagctttgtttgtctagtgctcttttgctataaaatagactgtagtacaccctagtaggaaaaaaaaaaaactaaatttaaaaataaaaaatatatttggcttatttttcgcaggagcaatccttttataccatgaatattacaaaaaaattgtcagattctgaatatttcttctttgtagatttttggaatcattatgagtaaaagtttgttactttattttactatttaaaagatgttattttaccatgtgttaccaagatgaaactgtatgggtagcttttttgtttgttttttgttttgtttttgtttttgtttttgtttttagttgtaggtcgcagcggggaaattttttgcgactgtacacatagctgcagcattaaaaacttaaaaaaattgttaaaaaaaaaaaaagggaaaacatttcaaaaaaaaaaaaaaagataaacagttacaccttgttttcaatgtgtggctgagtgcctcgattttttcatgtttttggtgtatttctgatttgtagaagtgtccaaacaggttgtgtgctggagttccttcaagacaaaaacaaacccagcttggtcaaggccattacctgtttcccatctgtagttattcgatgaagtcatgtacatgaccgttctgtagcaataaatgtgccatttttataaactgtttctgacacttgtttcatttcattttgcattgtccatatagctatgattctcttctgtaagtaaaacgcatctatatttcattttccaagtgttggaggtattgacagcttaacaaacaaaacatacaaaaaaaatcacaaaaacaaattgaaaagcaaagcacatgattgatcaaggaagagatgcccttaatgaaaatggaacgggatgcatgcaaaacaaaaagaaaactgtctagaggattaactaattgaaggaatataattaatgtgtgtgtaacactgaagctatgcatttgaagagctctgaactgcaccagtgttttcggttgtgctgcaggttgctaagtcaagtcagccttaaccttttgcaccagttggtcggctgtttggcagaacattctcagatcttttcagtcaaaaatctaagatgatttattttgtatcactttgttaaaagctgaatattgttaactacagttaatattaacactgtatttatactttctcaaactacatccgccccaccacttctggttgcctctgttgactattaatccagatgtaaacaaccagatgtttttttctaacttgtacaaactgacgtgtgtcaactatcatggaaggaaaaaaatgtacagattaaaattattcagtgttatgtactgtaagttaatatttttgtagaatggacatcaatctactttgcaaaatttggaggctatttcaacattgcactgtagaaatgtaaagtaatgtatgcaatgtaaaggaaagcccgcggtagctgagcgcttcataacagaatgttctaatcaagtacgtggtatttggggatgtctccaatattgctcttgtattctttctaattgggtttagtgactagttgaaggaaaatgttataacgccatttggttcacatgtgaagtgccctccatagccaaatgttgggatttttttttttttcgtttttggttggactgtttgcagatatttaaattttatgaaatttccaaagattttggttgataacccccttttaccttctaaatgatttgagatgttcttatgttcttactgtgtgttttaaatatatataaaagagccacaagcattt

SEQ ID NO: 4246 - DNA, 2745 bp, Homo sapiens
  source 1..2745: mol_type = genomic DNA
cttctctttataagcccgcagttcccggatgtgaatggattacaatgtatctttcagggaaacctattattatcaatgtgactccacgggggagtccatggtgatgatgatgaggaggaggatgatgatgatgagacacctctaaacttggaacaagtttaagactttatgagagaagaaaaaaaatcaccaacaagaattgtttgaggaaaaattataactatcctgtgttcatttttttttttataaacaataagaaaaagttgttggatttttttttaatgatttcttttttgggggagggaattttgttgcagttttatggtggaaaatgcaaaaaccagagccaggtgcataatcttgtaatctgtggatatccctggagcaggactgagtaccagttaaaatactttttggggatacacatgtgagatactaagtacttgcagaagatttttgtctctctttttaaagtctctttccttggaatattgtgagaatatttgtggccatttaagatgttttcacctcctgtgagcagtgggaaaaatggaccaacttctttggcaagtggacattttactggctcaaatgtagaagacagaagtagctcagggtcctgggggaatggaggacatccaagcccgtccaggaactatggagatgggactccctatgaccacatgaccagcagggaccttgggtcacatgacaatctctctccaccttttgtcaattccagaatacaaagtaaaacagaaaggggctcatactcatcttatgggagagaatcaaacttacagggttgccaccagcagagtctccttggaggtgacatggatatgggcaacccaggaaccctttcgcccaccaaacctggttcccagtactatcagtattctagcaataatccccgaaggaggcctcttcacagtagtgccatggaggtacagacaaagaaagttcgaaaagttcctccaggtttgccatcttcagtctatgctccatcagcaagcactgccgactacaatagggactcgccaggctatccttcctccaaaccagcaaccagcactttccctagctccttcttcatgcaagatggccatcacagcagtgacccttggagctcctccagtgggatgaatcagcctggctatgcaggaatgttgggcaactcttctcatattccacagtccagcagctactgtagcctgcatccacatgaacgtttgagctatccatcacactcctcagcagacatcaattccagtcttcctccgatgtccactttccatcgtagtggtacaaaccattacagcacctcttcctgtacgcctcctgccaacgggacagacagtataatggcaaatagaggaagcggggcagccggcagctcccagactggagatgctctggggaaagcacttgcttcgatctattctccagatcacactaacaacagcttttcatcaaacccttcaactcctgttggctctcctccatctctctcagcaggcacagctgtttggtctagaaatggaggacaggcctcatcgtctcctaattatgaaggacccttacactctttgcaaagccgaattgaagatcgtttagaaagactggatgatgctattcatgttctccggaaccatgcagtgggcccatccacagctatgcctggtggtcatggggacatgcatggaatcattggaccttctcataatggagccatgggtggtctgggctcagggtatggaaccggccttctttcagccaacagacattcactcatggtggggacccatcgtgaagatggcgtggccctgagaggcagccattctcttctgccaaaccaggttccggttccacagcttcctgtccagtctgcgacttcccctgacctgaacccaccccaggacccttacagaggcatgccaccaggactacaggggcagagtgtctcctctggcagctctgagatcaaatccgatgacgagggtgatgagaacctgcaagacacgaaatcttcggaggacaagaaattagatgacgacaagaaggatatcaaatcaattactaggtcaagatctagcaataatgacgatgaggacctgacaccagagcagaaggcagagcgtgagaaggagcggaggatggccaacaatgcccgagagcgtctgcgggtccgtgacatcaacgaggctttcaaagagctcggccgcatggtgcagctccacctcaagagtgacaagccccagaccaagctcctgatcctccaccaggcggtggccgtcatcctcagtctggagcagcaagtccgagaaaggaatctgaatccgaaagctgcgtgtctgaaaagaagggaggaagagaaggtgtcctcagagcctccccctctctccttggccggcccacaccctggaatgggagacgcatcgaatcacatgggacagatgtaaaagggtccaagttgccacattgcttcattaaaacaagagaccacttccttaacagctgtattatcttaaacccacataaacacttctccttaacccccatttttgtaatataagacaagtctgagtagttatgaatcgcagacgcaagaggtttcagcattcccaattatcaaaaaacagaaaaacaaaaaaaagaaagaaaaaagtgcaacttgagggacgactttctttaacatatcattcagaatgtgcaaagcagtatgtacaggctgagacacagccc

SEQ ID NO: 4247 - DNA, 1914 bp, Homo sapiens
  source 1..1914: mol_type = genomic DNA
gtgtgagtctgtctgtgtatgtgcagaacacagaccctcctttctccgtttgtggggaatacttccctcgggtgaaactgaagttaatttttttttttttccaaacacaagagtctccttggaggtgacatggatatgggcaacccaggaaccctttcgcccaccaaacctggttcccagtactatcagtattctagcaataatccccgaaggaggcctcttcacagtagtgccatggaggtacagacaaagaaagttcgaaaagttcctccaggtttgccatcttcagtctatgctccatcagcaagcactgccgactacaatagggactcgccaggctatccttcctccaaaccagcaaccagcactttccctagctccttcttcatgcaagatggccatcacagcagtgacccttggagctcctccagtgggatgaatcagcctggctatgcaggaatgttgggcaactcttctcatattccacagtccagcagctactgtagcctgcatccacatgaacgtttgagctatccatcacactcctcagcagacatcaattccagtcttcctccgatgtccactttccatcgtagtggtacaaaccattacagcacctcttcctgtacgcctcctgccaacgggacagacagtataatggcaaatagaggaagcggggcagccggcagctcccagactggagatgctctggggaaagcacttgcttcgatctattctccagatcacactaacaacagcttttcatcaaacccttcaactcctgttggctctcctccatctctctcagcaggcacagctgtttggtctagaaatggaggacaggcctcatcgtctcctaattatgaaggacccttacactctttgcaaagccgaattgaagatcgtttagaaagactggatgatgctattcatgttctccggaaccatgcagtgggcccatccacagctatgcctggtggtcatggggacatgcatggaatcattggaccttctcataatggagccatgggtggtctgggctcagggtatggaaccggccttctttcagccaacagacattcactcatggtggggacccatcgtgaagatggcgtggccctgagaggcagccattctcttctgccaaaccaggttccggttccacagcttcctgtccagtctgcgacttcccctgacctgaacccaccccaggacccttacagaggcatgccaccaggactacaggggcagagtgtctcctctggcagctctgagatcaaatccgatgacgagggtgatgagaacctgcaagacacgaaatcttcggaggacaagaaattagatgacgacaagaaggatatcaaatcaattactagcaataatgacgatgaggacctgacaccagagcagaaggcagagcgtgagaaggagcggaggatggccaacaatgcccgagagcgtctgcgggtccgtgacatcaacgaggctttcaaagagctcggccgcatggtgcagctccacctcaagagtgacaagccccagaccaagctcctgatcctccaccaggcggtggccgtcatcctcagtctggagcagcaagtccgagaaaggaatctgaatccgaaagctgcgtgtctgaaaagaagggaggaagagaaggtgtcctcagagcctccccctctctccttggccggcccacaccctggaatgggagacgcatcgaatcacatgggacagatgtaaaagggtccaagttgccacattgcttcattaaaacaagagaccacttccttaacagctgtattatcttaaacccacataaacacttctccttaacccccatttttgtaatataagacaagtctgagtagttatgaatcgcagacgcaagaggtttcagcattcccaattatc

SEQ ID NO: 4248 - DNA, 2572 bp, Homo sapiens
  source 1..2572: mol_type = genomic DNA
cttttggagaaatggctttcggaagttttgccaggaaacgtagccctaggcaggcagctttgcagccccctttctgcttgttgcactttctccattcgttcctttgctttttgcaggctctgactcagggaaggtgtgcattatccactagatacgtcgaagaagagggaaaccaattagggtcgaaataaatgctggagagagagggagtgaaagagagagtgagagtgagagagagagagagtcttgcttcaaattgctctcctgttagagacgaaatgagaatttagtgcagatgttttcacctcctgtgagcagtgggaaaaatggaccaacttctttggcaagtggacattttactggctcaaatgtagaagacagaagtagctcagggtcctgggggaatggaggacatccaagcccgtccaggaactatggagatgggactccctatgaccacatgaccagcagggaccttgggtcacatgacaatctctctccaccttttgtcaattccagaatacaaagtaaaacagaaaggggctcatactcatcttatgggagagaatcaaacttacagggttgccaccagcagagtctccttggaggtgacatggatatgggcaacccaggaaccctttcgcccaccaaacctggttcccagtactatcagtattctagcaataatccccgaaggaggcctcttcacagtagtgccatggaggtacagacaaagaaagttcgaaaagttcctccaggtttgccatcttcagtctatgctccatcagcaagcactgccgactacaatagggactcgccaggctatccttcctccaaaccagcaaccagcactttccctagctccttcttcatgcaagatggccatcacagcagtgacccttggagctcctccagtgggatgaatcagcctggctatgcaggaatgttgggcaactcttctcatattccacagtccagcagctactgtagcctgcatccacatgaacgtttgagctatccatcacactcctcagcagacatcaattccagtcttcctccgatgtccactttccatcgtagtggtacaaaccattacagcacctcttcctgtacgcctcctgccaacgggacagacagtataatggcaaatagaggaagcggggcagccggcagctcccagactggagatgctctggggaaagcacttgcttcgatctattctccagatcacactaacaacagcttttcatcaaacccttcaactcctgttggctctcctccatctctctcagcaggcacagctgtttggtctagaaatggaggacaggcctcatcgtctcctaattatgaaggacccttacactctttgcaaagccgaattgaagatcgtttagaaagactggatgatgctattcatgttctccggaaccatgcagtgggcccatccacagctatgcctggtggtcatggggacatgcatggaatcattggaccttctcataatggagccatgggtggtctgggctcagggtatggaaccggccttctttcagccaacagacattcactcatggtggggacccatcgtgaagatggcgtggccctgagaggcagccattctcttctgccaaaccaggttccggttccacagcttcctgtccagtctgcgacttcccctgacctgaacccaccccaggacccttacagaggcatgccaccaggactacaggggcagagtgtctcctctggcagctctgagatcaaatccgatgacgagggtgatgagaacctgcaagacacgaaatcttcggaggacaagaaattagatgacgacaagaaggatatcaaatcaattactagcaataatgacgatgaggacctgacaccagagcagaaggcagagcgtgagaaggagcggaggatggccaacaatgcccgagagcgtctgcgggtccgtgacatcaacgaggctttcaaagagctcggccgcatggtgcagctccacctcaagagtgacaagccccagaccaagctcctgatcctccaccaggcggtggccgtcatcctcagtctggagcagcaagtccgagaaaggaatctgaatccgaaagctgcgtgtctgaaaagaagggaggaagagaaggtgtcctcagagcctccccctctctccttggccggcccacaccctggaatgggagacgcatcgaatcacatgggacagatgtaaaagggtccaagttgccacattgcttcattaaaacaagagaccacttccttaacagctgtattatcttaaacccacataaacacttctccttaacccccatttttgtaatataagacaagtctgagtagttatgaatcgcagacgcaagaggtttcagcattcccaattatcaaaaaacagaaaaacaaaaaaaagaaagaaaaaagtgcaacttgagggacgactttctttaacatatcattcagaatgtgcaaagcagtatgtacaggctgagacacagcccagagactgaacggcaatctttccacactgtggaacaatgcatttgtgcctaaacttcttttg

SEQ ID NO: 4249 - DNA, 2396 bp, Homo sapiens
  source 1..2396: mol_type = genomic DNA
attaactcatgttctgtttccatggagcacaggagagtaacaaggaaggccccttaaaagaaaggccttttaaagtggaggtctcagttcacaaactttaaaagtttacgaagtagtattttagaattttaatcaccagatatattgggggaatttattacttcctattcatatggaagaggacagcagagatgtagaagacagaagtagctcagggtcctgggggaatggaggacatccaagcccgtccaggaactatggagatgggactccctatgaccacatgaccagcagggaccttgggtcacatgacaatctctctccaccttttgtcaattccagaatacaaagtaaaacagaaaggggctcatactcatcttatgggagagaatcaaacttacagggttgccaccagcagagtctccttggaggtgacatggatatgggcaacccaggaaccctttcgcccaccaaacctggttcccagtactatcagtattctagcaataatccccgaaggaggcctcttcacagtagtgccatggaggtacagacaaagaaagttcgaaaagttcctccaggtttgccatcttcagtctatgctccatcagcaagcactgccgactacaatagggactcgccaggctatccttcctccaaaccagcaaccagcactttccctagctccttcttcatgcaagatggccatcacagcagtgacccttggagctcctccagtgggatgaatcagcctggctatgcaggaatgttgggcaactcttctcatattccacagtccagcagctactgtagcctgcatccacatgaacgtttgagctatccatcacactcctcagcagacatcaattccagtcttcctccgatgtccactttccatcgtagtggtacaaaccattacagcacctcttcctgtacgcctcctgccaacgggacagacagtataatggcaaatagaggaagcggggcagccggcagctcccagactggagatgctctggggaaagcacttgcttcgatctattctccagatcacactaacaacagcttttcatcaaacccttcaactcctgttggctctcctccatctctctcagcaggcacagctgtttggtctagaaatggaggacaggcctcatcgtctcctaattatgaaggacccttacactctttgcaaagccgaattgaagatcgtttagaaagactggatgatgctattcatgttctccggaaccatgcagtgggcccatccacagctatgcctggtggtcatggggacatgcatggaatcattggaccttctcataatggagccatgggtggtctgggctcagggtatggaaccggccttctttcagccaacagacattcactcatggtggggacccatcgtgaagatggcgtggccctgagaggcagccattctcttctgccaaaccaggttccggttccacagcttcctgtccagtctgcgacttcccctgacctgaacccaccccaggacccttacagaggcatgccaccaggactacaggggcagagtgtctcctctggcagctctgagatcaaatccgatgacgagggtgatgagaacctgcaagacacgaaatcttcggaggacaagaaattagatgacgacaagaaggatatcaaatcaattactagcaataatgacgatgaggacctgacaccagagcagaaggcagagcgtgagaaggagcggaggatggccaacaatgcccgagagcgtctgcgggtccgtgacatcaacgaggctttcaaagagctcggccgcatggtgcagctccacctcaagagtgacaagccccagaccaagctcctgatcctccaccaggcggtggccgtcatcctcagtctggagcagcaagtccgagaaaggaatctgaatccgaaagctgcgtgtctgaaaagaagggaggaagagaaggtgtcctcagagcctccccctctctccttggccggcccacaccctggaatgggagacgcatcgaatcacatgggacagatgtaaaagggtccaagttgccacattgcttcattaaaacaagagaccacttccttaacagctgtattatcttaaacccacataaacacttctccttaacccccatttttgtaatataagacaagtctgagtagttatgaatcgcagacgcaagaggtttcagcattcccaattatcaaaaaacagaaaaacaaaaaaaagaaagaaaaaagtgcaacttgagggacgactttctttaacatatcattcagaatgtgcaaagcagtatgtacaggctgagacacagcccagagactgaacggcaatctttccacactgtggaacaatgcatttgtgcctaaacttcttttgg

SEQ ID NO: 4250 - DNA, 2255 bp, Homo sapiens
  source 1..2255: mol_type = genomic DNA
gactcagaattttgaatagtttctttgctaaattcaccatctggagagcctgtgattgattagttttggcctcactattaagtgtcaatataatcaatgggaattactaggctagggtcattacatagataatttgcctgctgtgtaaataaaaatgaaattgtttaaattttgtgcaagagaaagtgaaaataaggagttacgatttgtttgttagagaaagtggaggccattggaatgacagtttttggaagtgtggagcagtttggctaagaataggaatgaaggatatttttttccagtttatcatagccagagtgaggaagtgttattccctctcttgcttgcatacattgccagtagtgcctactttacgtaaaacagaaaggggctcatactcatcttatgggagagaatcaaacttacagggttgccaccagagtctccttggaggtgacatggatatgggcaacccaggaaccctttcgcccaccaaacctggttcccagtactatcagtattctagcaataatccccgaaggaggcctcttcacagtagtgccatggaggtacagacaaagaaagttcgaaaagttcctccaggtttgccatcttcagtctatgctccatcagcaagcactgccgactacaatagggactcgccaggctatccttcctccaaaccagcaaccagcactttccctagctccttcttcatgcaagatggccatcacagcagtgacccttggagctcctccagtgggatgaatcagcctggctatgcaggaatgttgggcaactcttctcatattccacagtccagcagctactgtagcctgcatccacatgaacgtttgagctatccatcacactcctcagcagacatcaattccagtcttcctccgatgtccactttccatcgtagtggtacaaaccattacagcacctcttcctgtacgcctcctgccaacgggacagacagtataatggcaaatagaggaagcggggcagccggcagctcccagactggagatgctctggggaaagcacttgcttcgatctattctccagatcacactaacaacagcttttcatcaaacccttcaactcctgttggctctcctccatctctctcagcaggcacagctgtttggtctagaaatggaggacaggcctcatcgtctcctaattatgaaggacccttacactctttgcaaagccgaattgaagatcgtttagaaagactggatgatgctattcatgttctccggaaccatgcagtgggcccatccacagctatgcctggtggtcatggggacatgcatggaatcattggaccttctcataatggagccatgggtggtctgggctcagggtatggaaccggccttctttcagccaacagacattcactcatggtggggacccatcgtgaagatggcgtggccctgagaggcagccattctcttctgccaaaccaggttccggttccacagcttcctgtccagtctgcgacttcccctgacctgaacccaccccaggacccttacagaggcatgccaccaggactacaggggcagagtgtctcctctggcagctctgagatcaaatccgatgacgagggtgatgagaacctgcaagacacgaaatcttcggaggacaagaaattagatgacgacaagaaggatatcaaatcaattactaggtcaagatctagcaataatgacgatgaggacctgacaccagagcagaaggcagagcgtgagaaggagcggaggatggccaacaatgcccgagagcgtctgcgggtccgtgacatcaacgaggctttcaaagagctcggccgcatggtgcagctccacctcaagagtgacaagccccagaccaagctcctgatcctccaccaggcggtggccgtcatcctcagtctggagcagcaagtccgagaaaggaatctgaatccgaaagctgcgtgtctgaaaagaagggaggaagagaaggtgtcctcagagcctccccctctctccttggccggcccacaccctggaatgggagacgcatcgaatcacatgggacagatgtaaaagggtccaagttgccacattgcttcattaaaacaagagaccacttccttaacagctgtattatcttaaacccacataaacacttctccttaacccccatttttgtaatataagacaagtctgagtagttatgaatcgcagacgcaagaggtttcagcattcccaattatc

SEQ ID NO: 4251 - DNA, 2367 bp, Homo sapiens
  source 1..2367: mol_type = genomic DNA
cgtcccggcgccactcggcccagggcagggaccccgccacggccgggaccgcccggcccggccccagcccgcgcctctccgcgccgccccgcgctccgcaccgcgccctctccgcgtccccgcccgcgcggccggaccgggcagccagaaaaatcatttttcttctctgggaaggtgaacatttgtagcattgatttcccggatctggtaacatggcaaaagatgccggtctaattgaagccaacggagaactcaaggtcttcatagaccagaaccttagtcccgggaaaggcgtggtgtccctcgtggccgttcacccctccaccgtcaacccgctcgggaagcagctcttgccaaaaacctttggacagtccaatgtcaacattgcccagcaagtggtaattggtacgcctcagagaccggcagcgtcaaacaccctggtggtaggaagcccacacacccccagcactcactttgcctctcagaaccagccttccgactcctcaccttggtctgccgggaagcgcaacaggaaaggagagaagaatggcaagggcctacggcatttctccatgaaggtctgcgagaaggtgcagaggaaagggaccacttcctacaacgaagtggcagacgagctggttgcggagttcagtgctgccgacaaccacatcttaccaaacgagtcagcttatgaccagaaaaacataagacggcgcgtctacgatgccttaaacgtgctaatggccatgaacatcatctccaaggagaagaaggagatcaagtggattggtctgcccaccaactcggctcaggaatgtcagaacttagaggtggaaagacagaggagacttgaaagaataaaacagaaacagtctcaacttcaagaacttattctacagcaaattgccttcaagaacctggtgcagagaaaccggcatgcggagcagcaggccagccggccaccgccacccaactcagtcatccacctgcccttcatcatcgtcaacaccagcaagaagacggtcatcgactgcagcatctccaatgacaaatttgagtatctgtttaattttgacaacacatttgaaatccacgatgacatagaagtgctgaagcggatgggcatggcttgcgggctggagtcggggagctgctctgccgaagaccttaaaatggccagaagtctggtccccaaggctctggagccatacgtgacagaaatggctcagggaactgttggaggcgtgttcatcacgacggcaggttccacgtctaacggcacaaggttctctgccagtgacctgaccaacggtgcagatgggatgctggccacaagctccaatgggtctcagtacagcggctccagggtggagactccggtgtcctacgtcggggaggacgacgaggaggacgatgacttcaacgagaatgacgaggacgactgacgtcctccccacttcagattcggcttcaggaaaacgtttagcgaaaagaaactttttttttaatgtgggttttctgtttccttttggcctactcccaagaagatattggtaagctattgaatttagatatgcacctctgataagcaaggattgtttcccgtaggattaggacgtgctgtggatgtgtgttttgataccagtgtgctgatgcagagcgtttatttacttgttaggattttgtgttttcatttgctatttttctttaagtgcagagttcatttttgcccctgaaaagtttttgctgagtttgctgaagaaattgtatttcaaccacatccatgaaaataaaacacctcctgttgtggatggtgagcccctgatgccgcttatttgccgtgagtttggacggcacccctgctggcggatagcaagactctgtggagtttgttcagtggtacggtgtccaagcaaacagcagaatgcaactttctaaacagccccaagcaaacagcagaattcaactttttaaacaataaacaccatcaaccttattgactttattgtcccttaaattatattgactgttgtgattccatcaagtttgtacactcttttctctccctgttttgcagcaacaaattgcgaagtgcttttgtttgtttgttttcgtttggttaaagcttattgccatgctggtgcggctatggagactgtctggaaggcttggaatggtttattgcttatggtaaaatttgcctgatttcttacaggcagcgtttggaaaccttttattatatagttgtttacatacttataagtctatcatttaaagacatgtactgaaacaaatgtatttgtttcataagcatcttcctgtaatctattataaaattgaaattaaatatagagaatgttttaacaa

SEQ ID NO: 4252 - DNA, 866 bp, Homo sapiens
  source 1..866: mol_type = genomic DNA
gtcagagttaccggtcagccgggcgggcgccgccggggtctggggtggacgccgcgagcctgcacgttgcgccgggaccccggggctgtgcccagaaaaatcatttttcttctctgggaaggtgaacatttgtagcattgatttcccggatctggtaacatggcaaaagatgccggtctaattgaagccaacggagaactcaaggtcttcatagaccagaaccttagtcccgggaaaggcgtggtgtccctcgtggccgttcacccctccaccgtcaacccgctcgggaagcagctcttgccaaaaacctttggacagtccaatgtcaacattgcccagcaagtggtaattggtacgcctcagagaccggcagcgtcaaacaccctggtggtaggaagcccacacacccccagcactcactttgcctctcagaaccagccttccgactcctcaccttggtctgccgggaagcgcaacaggaaaggagagaagaatggcaagggcctacggcatttctccatgaaggtctgcgagaaggtgcagaggaaagggaccacttcctacaacgaagtggcagacgagctggttgcggagttcagtgctgccgacaaccacatcttaccaaacgagtcagcttatgaccagaaaaacataagacggcgcgtctacgatgccttaaacgtgctaatggccatgaacatcatctccaaggagaagaaggagatcaagtggattggtctgcccaccaactcggctcaggaatgtcagaacttagaggtggaaagacagaggagacttgaaagaataaaacagaaacagtctcaacttcaagaacttattctacagcaaattgccttcaagaacct

SEQ ID NO: 4253 - DNA, 792 bp, Homo sapiens
  source 1..792: mol_type = genomic DNA
aggtgggtggtggggcacccccctgcagcggcgggagggaggcgctgcgccctggctcctggggctcggccccaccctcggccgctgggcgggccgtcggggacctgggggtagtggtggtgaccctgcgggcccgcgggccacttttccgcagggggcatttccgtctggcgaggcgactgaaaatcctgagtgtgggagtcggtttggccagctccgctctcaggatggagggtgcctttgggaaggaagaaaaatcatttttcttctctgggaaggtgaacatttgtagcattgatttcccggatctggtaacatggcaaaagatgccggtctaattgaagccaacggagaactcaaggtcttcatagaccagaaccttagtcccgggaaaggcgtggtgtccctcgtggccgttcacccctccaccgtcaacccgctcgggaagcagctcttgccaaaaacctttggacagtccaatgtcaacattgcccagcaagtggtaattggtacgcctcagagaccggcagcgtcaaacaccctggtggtaggaagcccacacacccccagcactcactttgcctctcagaaccagccttccgactcctcaccttggtctgccgggaagcgcaacaggaaaggagagaagaatggcaagggcctacggcatttctccatgaaggtctgcgagaaggtgcagaggaaagggaccacttcctacaacgaagtggcagacgagctggttgcggagttcagtgctgccgacaaccacatcttaccaaacgagtcagt

SEQ ID NO: 4254 - DNA, 1327 bp, Homo sapiens
  source 1..1327: mol_type = genomic DNA
gcgcacgtcacgccggcccgacgctcggccaggaaaaatcatttttcttctctgggaaggtgaacatttgtagcattgatttcccggatctggtaacatggcaaaagatgccggtctaattgaagccaacggagaactcaaggtcttcatagaccagaaccttagtcccgggaaaggcgtggtgtccctcgtggccgttcacccctccaccgtcaacccgctcgggaagcagctcttgccaaaaacctttggacagtccaatgtcaacattgcccagcaagtggaagcgcaacaggaaaggagagaagaatggcaagggcctacggcatttctccatgaaggtctgcgagaaggtgcagaggaaagggaccacttcctacaacgaagtggcagacgagctggttgcggagttcagtgctgccgacaaccacatcttaccaaacgagtcagcttatgaccagaaaaacataagacggcgcgtctacgatgccttaaacgtgctaatggccatgaacatcatctccaaggagaagaaggagatcaagtggattggtctgcccaccaactcggctcaggaatgtcagaacttagaggtggaaagacagaggagacttgaaagaataaaacagaaacagtctcaacttcaagaacttattctacagcaaattgccttcaagaacctggtgcagagaaaccggcatgcggagcagcaggccagccggccaccgccacccaactcagtcatccacctgcccttcatcatcgtcaacaccagcaagaagacggtcatcgactgcagcatctccaatgacaaatttgagtatctgtttaattttgacaacacatttgaaatccacgatgacatagaagtgctgaagcggatgggcatggcttgcgggctggagtcggggagctgctctgccgaagaccttaaaatggccagaagtctggtccccaaggctctggagccatacgtgacagaaatggctcagggaactgttggaggcgtgttcatcacgacggcaggttccacgtctaacggcacaagtgacctgaccaacggtgcagatgggatgctggccacaagctccaatgggtctcagtacagcggctccagggtggagactccggtgtcctacgtcggggaggacgacgaggaggacgatgacttcaacgagaatgacgaggacgactgacgtcctccccacttcagattcggcttcaggaaaacgtttagcgaaaagaaactttttttttaatgtgggttttctgtttccttttggcctactcccaagaagatattggtaagctattgaatttagatatg

SEQ ID NO: 4255 - DNA, 1571 bp, Homo sapiens
  source 1..1571: mol_type = genomic DNA
gtgcggaggcggcccgaggcctagtgacaggcgcgcggcgcggaccccggaagcccacctgtcagagttaccggtcagccgggcgggcgccgccggggtctggggtggacgccgcgagcctgcacgttgcgccgggaccccggggctgtgcccagaaaaatcatttttcttctctgggaaggtgaacatttgtagcattgatttcccggatctggtaacatggcaaaagatgccggtctaattgaagccaacggagaactcaaggtcttcatagaccagaaccttagtcccgggaaaggcgtggtgtccctcgtggccgttcacccctccaccgtcaacccgctcgggaagcagctcttgccaaaaacctttggacagtccaatgtcaacattgcccagcaagtggaagcgcaacaggaaaggagagaagaatggcaagggcctacggcatttctccatgaaggtctgcgagaaggtgcagaggaaagggaccacttcctacaacgaagtggcagacgagctggttgcggagttcagtgctgccgacaaccacatcttaccaaacgagtcagcttatgaccagaaaaacataagacggcgcgtctacgatgccttaaacgtgctaatggccatgaacatcatctccaaggagaagaaggagatcaagtggattggtctgcccaccaactcggctcaggaatgtcagaacttagaggtggaaagacagaggagacttgaaagaataaaacagaaacagtctcaacttcaagaacttattctacagcaaattgccttcaagaacctggtgcagagaaaccggcatgcggagcagcaggccagccggccaccgccacccaactcagtcatccacctgcccttcatcatcgtcaacaccagcaagaagacggtcatcgactgcagcatctccaatgacaaatttgagtatctgtttaattttgacaacacatttgaaatccacgatgacatagaagtgctgaagcggatgggcatggcttgcgggctggagtcggggagctgctctgccgaagaccttaaaatggccagaagtctggtccccaaggctctggagccatacgtgacagagaagacaggcttatgtgactgcacagcgggatgtcctgctccgtggcgcagtgtggaaaatactggacaagcgaaggatatccggaagcttctacagccgtctgtcctgtggaactgcgcgtcattttgttggttgcctgtgcgtcttgtgttgtttctgtttcatgaccattcgcttattttctttcccttttcagaaatggctcagggaactgttggaggcgtgttcatcacgacggcaggttccacgtctaacggcacaaggttctctgccagtgacctgaccaacggtgcagatgggatgctggccacaagctccaatgggtctcagtacagcggctccagggtggagactccggtgtcctacgtcggggaggacgacgaggaggacgatgacttcaacgagaatgacgaggacgactgacgtcctccccacttcagattcggcttcaggaaaacgtttagcg

SEQ ID NO: 4256 - DNA, 1276 bp, Homo sapiens
  source 1..1276: mol_type = genomic DNA
catttgttgcatttccagtttccaataccaactcacctacaaagattttaccaaaaaccttaggaccaataaatgtgaatgttggaccccaaatgattataagcacaccacagagactaaccagttcaggaagtgttctgattgggagtccatatacccctgcaccagcaatggttactcagacacacatagcagaagctactggctgggtccctggtgatagaaaacgggctagaaaatttatagactctgatttttcagaaagtaaacgaagcaaaaaaggagataaaaatgggaaaggcttgagacacttttcaatgaaagtgtgtgagaaagttcaacgaaaaggtacaacatcgtacaatgaagtcgctgatgagctggtgtcagagttcaccaattcaaataaccatttggctgctgattcgcaggcttatgatcagaagaacattaggcgaagagtttatgatgctttaaatgtgctaatggcaatgaacataatttcaaaggaaaaaaaagaaatcaagtggattggcctgcctaccaattctgctcaggaatgtcagaatctggagatagagaagcagaggcggatagaacggataaagcagaagcgggcccagctgcaagaacttctcctacagcaaatcgctttcaaaaacctggtacagagaaatcgacaaaatgagcagcaaaaccagggcccgccggctctgaactctaccattcagctgccattcataatcatcaatacaagcagaaaaacagtcatagattgcagcatctccagtgacaagtttgagtatcttttcaattttgacaacacctttgagatccatgatgacatagaagtactaaagcggatgggaatgtcgtttggcctggagtcaggcaaatgctctctggaggatctgaaacttgcgaaatccctggtgccaaaggctttagaaggttatatcacagatatctccacaggaccttcttggttaaatcagggactacttctgaactctacccaatcagtttcaaatttagacctgaccactggtgccaccttaccccagtcaagtgtaaaccaagggttatgcttggatgcagaagtggccttagcaactgggcagttcctggccccaaacagtcaccagtccagcagtgcggcctctcactgctccgagtcccgaggcgagaccccctgttcgttcaatgatgaagatgaggaagatgatgaggaggattcctcctccccagaataaagacaagagaaagcctacgtttc

SEQ ID NO: 4257 - DNA, 1732 bp, Homo sapiens
  source 1..1732: mol_type = genomic DNA
gcgatctcggctgcggcgctgccgcagctgcccggcccgcggggcgcgccctgacccttcatctttgggcaggctcgagggcgcgcgcacggttggcgttctggggcctcaaactcctgggccttgaccgggcaggccgcgtctccccgggtgtgagtccaccgggacccggccgccgcctaagcgcgggcgccacagaagcggcggcgcccgaagacgcgctcctggctcggcccgacagcctcgcttggccgccagttcttctgcagccgaaggcggttgttcttttaaagaattattgaagacgaaggtttttttctttttatttttttaatggctttacagaatcttaaatagaatacagtttgacatgacggcaaaaaatgttggtttgacttccacaaatgcagaagtaagaggatttatagatcagaatctcagtccaacaaaaggtaaatacctagaagtggaattgctgggtcatatggcaacatttcatttgttgcatttccagtttccaataccaactcacctacaaagattttaccaaaaaccttaggaccaataaatgtgaatgttggaccccaaatgattataagcacaccacagagactaaccagttcaggaagtgttctgattgggagtccatatacccctgcaccagcaatggttactcagacacacatagcagaagctactggctgggtccctggtaaacgaagcaaaaaaggagataaaaatgggaaaggcttgagacacttttcaatgaaagtgtgtgagaaagttcaacgaaaaggtacaacatcgtacaatgaagtcgctgatgagctggtgtcagagttcaccaattcaaataaccatttggctgctgattcgcaggcttatgatcagaagaacattaggcgaagagtttatgatgctttaaatgtgctaatggcaatgaacataatttcaaaggaaaaaaaagaaatcaagtggattggcctgcctaccaattctgctcaggaatgtcagaatctggagatagagaagcagaggcggatagaacggataaagcagaagcgggcccagctgcaagaacttctcctacagcaaatcgctttcaaaaacctggtacagagaaatcgacaaaatgagcagcaaaaccagggcccgccggctctgaactctaccattcagctgccattcataatcatcaatacaagcagaaaaacagtcatagattgcagcatctccagtgacaagtttgagtatcttttcaattttgacaacacctttgagatccatgatgacatagaagtactaaagcggatgggaatgtcgtttggcctggagtcaggcaaatgctctctggaggatctgaaacttgcgaaatccctggtgccaaaggctttagaaggttatatcacagatatctccacaggaccttcttggttaaatcagggactacttctgaactctacccaatcagtttcaaatttagacctgaccactggtgccaccttaccccagtcaagtgtaaaccaagggttatgcttggatgcagaagtggccttagcaactgggcagttcctggccccaaacagtcaccagtccagcagtgcggcctctcactgctccgagtcccgaggcgagaccccctgttcgttcaatgatgaagatgaggaagatgatgaggaggattcctcctccccagaataaagacaagagaaagcctacgtttcaatatgtg

SEQ ID NO: 4258 - DNA, 1267 bp, Homo sapiens
  source 1..1267: mol_type = genomic DNA
atgcaaccagaaggcatcatctttgaagcagagaataaaccctcaccaggcactgaatctgccggcactttcattttggacctctcagcaacctccagaacaattataagcacaccacagagactaaccagttcaggaagtgttctgattgggagtccatatacccctgcaccagcaatggttactcagacacacatagcagaagctactggctgggtccctggtgatagaaaacgggctagaaaatttatagactctgatttttcagaaagtaaacgaagcaaaaaaggagataaaaatgggaaaggcttgagacacttttcaatgaaagtgtgtgagaaagttcaacgaaaaggtacaacatcgtacaatgaagtcgctgatgagctggtgtcagagttcaccaattcaaataaccatttggctgctgattcggcttatgatcagaagaacattaggcgaagagtttatgatgctttaaatgtgctaatggcaatgaacataatttcaaaggaaaaaaaagaaatcaagtggattggcctgcctaccaattctgctcaggaatgtcagaatctggagatagagaagcagaggcggatagaacggataaagcagaagcgggcccagctgcaagaacttctcctacagcaaatcgctttcaaaaacctggtacagagaaatcgacaaaatgagcagcaaaaccagggcccgccggctctgaactctaccattcagctgccattcataatcatcaatacaagcagaaaaacagtcatagattgcagcatctccagtgacaagtttgagtatcttttcaattttgacaacacctttgagatccatgatgacatagaagtactaaagcggatgggaatgtcgtttggcctggagtcaggcaaatgctctctggaggatctgaaacttgcgaaatccctggtgccaaaggctttagaaggttatatcacagatatctccacaggaccttcttggttaaatcagggactacttctgaactctacccaatcagtttcaaatttagacctgaccactggtgccaccttaccccagtcaagtgtaaaccaagggttatgcttggatgcagaagtggccttagcaactgggcagttcctggccccaaacagtcaccagtccagcagtgcggcctctcactgctccgagtcccgaggcgagaccccctgttcgttcaatgatgaagatgaggaagatgatgaggaggattcctcctccccagaataaagacaagaga

SEQ ID NO: 4259 - DNA, 1853 bp, Homo sapiens
  source 1..1853: mol_type = genomic DNA
gctccgccgccaaagctcgcgcgggggaagcggggctgtagctgggcagggagagggcggacgaaatcggtagcgatctcggctgcggcgctgccgcagctgcccggcccgcggggcgcgccctgacccttcatctttgggcaggctcgagggcgcgcgcacggttggcgttctggggcctcaaactcctgggccttgaccgggcaggccgcgtctccccgggtgtgagtccaccgggacccggccgccgcctaagcgcgggcgccacagaagcggcggcgcccgaagacgcgctcctggctcggcccgacagcctcgcttggccgccagttcttctgcagccgaaggcggttgttcttttaaagaattattgaagacgaaggtttttttctttttatttttttaatggctttacagaatcttaaatagaatacagtttgacatgacggcaaaaaatgttggtttgacttccacaaatgcagaagtaagaggatttatagatcagaatctcagtccaacaaaaggtaaatacctagaagtggaattgctgggtcatatggcaacatttcatttgttgcatttccagtttccaataccaactcacctacaaagattttaccaaaaaccttaggaccaataaatgtgaatgttggaccccaaatgattataagcacaccacagagactaaccagttcaggaagtgttctgattgggagtccatatacccctgcaccagcaatggttactcagacacacatagcagaagctactggctgggtccctggtgatagaaaacgggctagaaaatttatagactctgatttttcagaaagtaaacgaagcaaaaaaggagataaaaatgggaaaggcttgagacacttttcaatgaaagtgtgtgagaaagttcaacgaaaaggtacaacatcgtacaatgaagtcgctgatgagctggtgtcagagttcaccaattcaaataaccatttggctgctgattcgcaggcttatgatcagaagaacattaggcgaagagtttatgatgctttaaatgtgctaatggcaatgaacataatttcaaaggaaaaaaaagaaatcaagtggattggcctgcctaccaattctgctcaggaatgtcagaatctggagatagagaagcagaggcggatagaacggataaagcagaagcgggcccagctgcaagaacttctcctacagcaaatcgctttcaaaaacctggtacagagaaatcgacaaaatgagcagcaaaaccagggcccgccggctctgaactctaccattcagctgccattcataatcatcaatacaagcagaaaaacagtcatagattgcagcatctccagtgacaagtttgagtatcttttcaattttgacaacacctttgagatccatgatgacatagaagtactaaagcggatgggaatgtcgtttggcctggagtcaggcaaatgctctctggaggatctgaaacttgcgaaatccctggtgccaaaggctttagaaggttatatcacagatatctccacaggaccttcttggttaaatcagggactacttctgaactctacccaatcagtttcaaatttagacctgaccactggtgccaccttaccccagtcaagtgtaaaccaagggttatgcttggatgcagaagtggccttagcaactgggcagttcctggccccaaacagtcaccagtccagcagtgcggcctctcactgctccgagtcccgaggcgagaccccctgttcgttcaatgatgaagatgaggaagatgatgaggaggattcctcctccccagaataaagacaagagaaagcctacgtttcaatatgtga

SEQ ID NO: 4260 - DNA, 571 bp, Homo sapiens
  source 1..571: mol_type = genomic DNA
ttctggcttttaaaaaaactgtgttgtttctgtaataaaatctgggaatgtgtagtcccagctactcgggaggctgaggcaggagaatcgcttgaatccgggaggcggaggttgcagtgagccaagatcgtgccacttcactccagcctggtgacagagagagactacatctcaaaaaaaaaaaaaaaagaaaagaaaaaaattctgggaaccccatgactggttgttcttttaaagaattattgaagacgaaggtttttttctttttatttttttaatggctttacagaatcttaaatagaatacagtttgacatgacggcaaaaaatgttggtttgacttccacaaatgcagaagtaagaggatttatagatcagaatctcagtccaacaaaaggcaacatttcatttgttgcatttccagtttccaataccaactcacctacaaagattttaccaaaaaccttaggaccaataaatgtgaatgttggaccccaaatgattataagcacaccacagagactaaccagttcaggaagtgttctgattgggagtccatatacccctgcacc

SEQ ID NO: 4261 - DNA, 578 bp, Homo sapiens
  source 1..578: mol_type = genomic DNA
aaagctcgcgcgggggaagcggggctgtagctgggcagggagagggcggacgaaatcggtagcgatctcggctgcggcgctgccgcagctgcccggcccgcggggcgcgccctgacccttcatctttgggcaggctcgagggcgcgcgcacggttggcgttctggggcctcaaactcctgggccttgaccgggcaggccgcgtctccccgggtgtgagtccaccgggacccggccgccgcctaagcgcgggcgccacagaagcggcggcgcccgaagacgcgctcctggctcggcccgacagcctcgcttggccgccagttcttctgcagccgaaggcggcaacatttcatttgttgcatttccagtttccaataccaactcacctacaaagattttaccaaaaaccttaggaccaataaatgtgaatgttggaccccaaatgattataagcacaccacagagactaaccagttcaggaagtgttctgattgggagtccatatacccctgcaccagcaatggttactcagacacacatagcagaagctactggctgggtccctggtgatagaaaacgg

SEQ ID NO: 4262 - DNA, 1201 bp, Homo sapiens
  source 1..1201: mol_type = genomic DNA
caataaatgtgaatgttggaccccaaatgattataagcacaccacagagactaaccagttcaggaagtgttctgattgggagtccatatacccctgcaccagcaatggttactcagacacacatagcagaagctactggctgggtccctggtgatagaaaacgggctagaaaatttatagactctgatttttcagaaagtaaacgaagcaaaaaaggagataaaaatgggaaaggcttgagacacttttcaatgaaagtgtgtgagaaagttcaacgaaaaggtacaacatcgtacaatgaagtcgctgatgagctggtgtcagagttcaccaattcaaataaccatttggctgctgattcggcttatgatcagaagaacattaggcgaagagtttatgatgctttaaatgtgctaatggcaatgaacataatttcaaaggaaaaaaaagaaatcaagtggattggcctgcctaccaattctgctcaggaatgtcagaatctggagatagagaagcagaggcggatagaacggataaagcagaagcgggcccagctgcaagaacttctcctacagcaaatcgctttcaaaaacctggtacagagaaatcgacaaaatgagcagcaaaaccagggcccgccggctctgaactctaccattcagctgccattcataatcatcaatacaagcagaaaaacagtcatagattgcagcatctccagtgacaagtttgagtatcttttcaattttgacaacacctttgagatccatgatgacatagaagtactaaagcggatgggaatgtcgtttggcctggagtcaggcaaatgctctctggaggatctgaaacttgcgaaatccctggtgccaaaggctttagaaggttatatcacagatatctccacaggaccttcttggttaaatcagggactacttctgaactctacccaatcagtttcaaatttagacctgaccactggtgccaccttaccccagtcaagtgtaaaccaagggttatgcttggatgcagaagtggccttagcaactgggcagttcctggccccaaacagtcaccagtccagcagtgcggcctctcactgctccgagtcccgaggcgagaccccctgttcgttcaatgatgaagatgaggaagatgatgaggaggattcctcctccccagaataaagacaagagaaagccta

SEQ ID NO: 4263 - DNA, 416 bp, Homo sapiens
  source 1..416: mol_type = genomic DNA
ctgtaatcccagcactttggggggccaaggtgggcggatcacctgaggcaacatttcatttgttgcatttccagtttccaataccaactcacctacaaagattttaccaaaaaccttaggaccaataaatgtgaatgttggaccccaaatgattataagcacaccacagagactaaccagttcaggaagtgttctgattgggagtccatatacccctgcaccagcaatggttactcagacacacatagcagaagctactggctgggtccctggtgatagaaaacgggctagaaaatttatagactctgatttttcagaaagtaaacgaagcaaaaaaggagataaaaatgggaaaggcttgagacacttttcaatgaaagtgtgtgagaaagttcaacgaaaaggtacaacatcgt

SEQ ID NO: 4264 - DNA, 3138 bp, Homo sapiens
  source 1..3138: mol_type = genomic DNA
aaagctcgcgcgggggaagcggggctgtagctgggcagggagagggcggacgaaatcggtagcgatctcggctgcggcgctgccgcagctgcccggcccgcggggcgcgccctgacccttcatctttgggcaggctcgagggcgcgcgcacggttggcgttctggggcctcaaactcctgggccttgaccgggcaggccgcgtctccccgggtgtgagtccaccgggacccggccgccgcctaagcgcgggcgccacagaagcggcggcgcccgaagacgcgctcctggctcggcccgacagcctcgcttggccgccagttcttctgcagccgaaggcggttgttcttttaaagaattattgaagacgaaggtttttttctttttatttttttaatggctttacagaatcttaaatagaatacagtttgacatgacggcaaaaaatgttggtttgacttccacaaatgcagaagtaagaggatttatagatcagaatctcagtccaacaaaaggcaacatttcatttgttgcatttccagtttccaataccaactcacctacaaagattttaccaaaaaccttaggaccaataaatgtgaatgttggaccccaaatgattataagcacaccacagagactaaccagttcaggaagtgttctgattgggagtccatatacccctgcaccagcaatggttactcagacacacatagcagaagctactggctgggtccctggtgatagaaaacgggctagaaaatttatagactctgatttttcagaaagtaaacgaagcaaaaaaggagataaaaatgggaaaggcttgagacacttttcaatgaaagtgtgtgagaaagttcaacgaaaaggtacaacatcgtacaatgaagtcgctgatgagctggtgtcagagttcaccaattcaaataaccatttggctgctgattcggcttatgatcagaagaacattaggcgaagagtttatgatgctttaaatgtgctaatggcaatgaacataatttcaaaggaaaaaaaagaaatcaagtggattggcctgcctaccaattctgctcaggaatgtcagaatctggagatagagaagcagaggcggatagaacggataaagcagaagcgggcccagctgcaagaacttctcctacagcaaatcgctttcaaaaacctggtacagagaaatcgacaaaatgagcagcaaaaccagggcccgccggctctgaactctaccattcagctgccattcataatcatcaatacaagcagaaaaacagtcatagattgcagcatctccagtgacaagtttgagtatcttttcaattttgacaacacctttgagatccatgatgacatagaagtactaaagcggatgggaatgtcgtttggcctggagtcaggcaaatgctctctggaggatctgaaacttgcgaaatccctggtgccaaaggctttagaaggttatatcacagatatctccacaggaccttcttggttaaatcagggactacttctgaactctacccaatcagtttcaaatttagacctgaccactggtgccaccttaccccagtcaagtgtaaaccaagggttatgcttggatgcagaagtggccttagcaactgggcagttcctggccccaaacagtcaccagtccagcagtgcggcctctcactgctccgagtcccgaggcgagaccccctgttcgttcaatgatgaagatgaggaagatgatgaggaggattcctcctccccagaataaagacaagagaaagcctacgtttcaatatgtgatgctcatgtgtgtttgtagtgtgagctcttgtttttgaaatgattgcttcagtctttgcctttgtttgcactgtgtgttcagtgaaaactagagaaacacaataagcaaatcacatgaaggctgagatgattgagatgaaagttaacatagtgtgaatgaaagtctggccaacagagcagtagatgatataacaaagaaagcatgctttctgaggagatagtggggataatccctgaagagttggcagtgtgagtgcaactcatttatcttctgtgaggtgggatttttgtgttcctcacacccatgtaattattcttagaattgagattgctacacggagcagtccttgacgatcgtgtttctgacgtttctcttccttgcctggactgcctttgacaaggcagaaatgaacatgaaaagtccccaggagaggggagctgtgtagtgagggatactgagggcagtcctgtggctgaggggcacagattgaactgctgaactagttggaggtctagatgaggtgctttacgcatcagctgccttagacagcttctagaaaggagcgagcgctacttcttaagtacttaagtgacatttagataatttatagtaaaactgaaattattattagccaatgcattggtgcatagaatttactagggctacttctggaagccaaaatagaatagcatttccatgtgcattaaatactttgccagcactgcctttgccagcatcctaaatctggagttttacaaagaaggaaactgtatctttaggttaatcaaagctatgcatttcatatagctttttcatttaaaacaagacaaagaaacaaattcctatgaccaaattgcttgcctacagttccctgcagtaattgtatgatctcacccagtgtgcaatttgtgaaaatgaaccaaatgtcattacttttgtcttaaagaaaagtctatttcaagaatatgaacagcagtgtttccttgtacatgtcaccttttttcacattttcattaatcagaatgaccttattgagcctactcctggggtcaattgcatttcaaactaatccaatatttagtgtttcacagaaacactagaaaacgttgaacactcctactgcctggatatatggtagtgcagttatgttgtttatggctcaagatgtcattagaaatactgcagtggtgtattcacagctgctccttctctgaatgaaagagtgtagggacacctgccaccatggccagaccctgactgaatttcacattaaggctttggaaaggagcaaataataatgggagaattaactccaaaactttgacctgaatca

SEQ ID NO: 4265 - DNA, 578 bp, Homo sapiens
  source 1..578: mol_type = genomic DNA
gaaatcggtagcgatctcggctgcggcgctgccgcagctgcccggcccgcggggcgcgccctgacccttcatctttgggcaggctcgagggcgcgcgcacggttggcgttctggggcctcaaactcctgggccttgaccgggcaggccgcgtctccccgggtgtgagtccaccgggacccggccgccgcctaagcgcgggcgccacagaagcggcggcgcccgaagacgcgctcctggctcggcccgacagcctcgcttggccgccagttcttctgcagccgaaggcggttgttcttttaaagaattattgaagacgaaggtttttttctttttatttttttaatggctttacagaatcttaaatagaatacagtttgacatgacggcaaaaaatgcaacatttcatttgttgcatttccagtttccaataccaactcacctacaaagattttaccaaaaaccttaggaccaataaatgtgaatgttggaccccaaatgattataagcacaccacagagactaaccagttcaggaagtgttctgattgggagtccatatacccctgcaccagcaatgg

SEQ ID NO: 4266 - DNA, 1442 bp, Homo sapiens
  source 1..1442: mol_type = genomic DNA
actgaatggtaacaaagactgtagaatgttgttggtactgcagtgagaggcatgcttccttagaccaggcaacatttcatttgttgcatttccagtttccaataccaactcacctacaaagattttaccaaaaaccttaggaccaataaatgtgaatgttggaccccaaatgtgatagaaaacgggctagaaaatttatagactctgatttttcagaaagtaaacgaagcaaaaaaggagataaaaatgggaaaggcttgagacacttttcaatgaaagtgtgtgagaaagttcaacgaaaaggtacaacatcgtacaatgaagtcgctgatgagctggtgtcagagttcaccaattcaaataaccatttggctgctgattcggcttatgatcagaagaacattaggcgaagagtttatgatgctttaaatgtgctaatggcaatgaacataatttcaaaggaaaaaaaagaaatcaagtggattggcctgcctaccaattctgctcaggaatgtcagaatctggagatagagaagcagaggcggatagaacggataaagcagaagcgggcccagctgcaagaacttctcctacagcaaatcgctttcaaaaacctggtacagagaaatcgacaaaatgagcagcaaaaccagggcccgccggctctgaactctaccattcagctgccattcataatcatcaatacaagcagaaaaacagtcatagattgcagcatctccagtgacaagtttgagtatcttttcaattttgacaacacctttgagatccatgatgacatagaagtactaaagcggatgggaatgtcgtttggcctggagtcaggcaaatgctctctggaggatctgaaacttgcgaaatccctggtgccaaaggctttagaaggttatatcacagatatctccacaggaccttcttggttaaatcagggactacttctgaactctacccaatcagtttcaaatttagacctgaccactggtgccaccttaccccagtcaagtgtaaaccaagggttatgcttggatgcagaagtggccttagcaactgggcagttcctggccccaaacagtcaccagtccagcagtgcggcctctcactgctccgagtcccgaggcgagaccccctgttcgttcaatgatgaagatgaggaagatgatgaggaggattcctcctccccagaataaagacaagagaaagcctacgtttcaatatgtgatgctcatgtgtgtttgtagtgtgagctcttgtttttgaaatgattgcttcagtctttgcctttgtttgcactgtgtgttcagtgaaaactagagaaacacaataagcaaatcacatgaaggctgagatgattgagatgaaagttaacatagtgtgaatgaaagtctggccaacagagcagtagatgatataacaaagaaagcatg

SEQ ID NO: 4267 - DNA, 878 bp, Homo sapiens
  source 1..878: mol_type = genomic DNA
gaaactcgtggtgcttttgctctgctttcaagatgcattaagtctcctgctttgtgactgctttggagccagcagatactctgatatgtataattcaaattatgcaggtttcacgagcaacatttcatttgttgcatttccagtttccaataccaactcacctacaaagattttaccaaaaaccttaggaccaataaatgtgaatgttggaccccaaatgattataagcacaccacagagactaaccagttcaggaagtgttctgattgggagtccatatacccctgcaccagcaatggttactcagacacacatagcagaagctactggctgggtccctggtgatagaaaacgggctagaaaatttatagactctgatttttcagaaagtaaacgaagcaaaaaaggagataaaaatgggaaaggcttgagacacttttcaatgaaagtgtgtgagaaagttcaacgaaaaggtacaacatcgtacaatgaagtcgctgatgagctggtgtcagagttcaccaattcaaataaccatttggctgctgattcggcttatgatcagaagaacattaggcgaagagtttatgatgctttaaatgtgctaatggcaatgaacataatttcaaaggaaaaaaaagaaatcaagtggattggcctgcctaccaattctgctcaggaatgtcagaatctggagatagagaagcagaggcggatagaacggataaagcagaagcgggcccagctgcaagaacttctcctacagcaaatcgctttcaaaaacctggtacagagaaatcgacaaaatgagcagcaaaaccagggcccgccggctctgaactctaccattcagctgccattcataatcatcaatacaa

SEQ ID NO: 4268 - DNA, 9911 bp, Homo sapiens
  source 1..9911: mol_type = genomic DNA
gcgcactgtgctgctccgccgccaaagctcgcgcgggggaagcggggctgtagctgggcagggagagggcggacgaaatcggtagcgatctcggctgcggcgctgccgcagctgcccggcccgcggggcgcgccctgacccttcatctttgggcaggctcgagggcgcgcgcacggttggcgttctggggcctcaaactcctgggccttgaccgggcaggccgcgtctccccgggtgtgagtccaccgggacccggccgccgcctaagcgcgggcgccacagaagcggcggcgcccgaagacgcgctcctggctcggcccgacagcctcgcttggccgccagttcttctgcagccgaaggcggttgttcttttaaagaattattgaagacgaaggtttttttctttttatttttttaatggctttacagaatcttaaatagaatacagtttgacatgacggcaaaaaatgttggtttgacttccacaaatgcagaagtaagaggatttatagatcagaatctcagtccaacaaaaggtaaggattattgaataaaatttttctgaattaaggcaacatttcatttgttgcatttccagtttccaataccaactcacctacaaagattttaccaaaaaccttaggaccaataaatgtgaatgttggaccccaaatgattataagcacaccacagagactaaccagttcaggaagtgttctgattgggagtccatatacccctgcaccagcaatggttactcagacacacatagcagaagctactggctgggtccctggtgatagaaaacgggctagaaaatttatagactctgatttttcagaaagtaaacgaagcaaaaaaggagataaaaatgggaaaggcttgagacacttttcaatgaaagtgtgtgagaaagttcaacgaaaaggtacaacatcgtacaatgaagtcgctgatgagctggtgtcagagttcaccaattcaaataaccatttggctgctgattcgcaggcttatgatcagaagaacattaggcgaagagtttatgatgctttaaatgtgctaatggcaatgaacataatttcaaaggaaaaaaaagaaatcaagtggattggcctgcctaccaattctgctcaggaatgtcagaatctggagatagagaagcagaggcggatagaacggataaagcagaagcgggcccagctgcaagaacttctcctacagcaaatcgctttcaaaaacctggtacagagaaatcgacaaaatgagcagcaaaaccagggcccgccggctctgaactctaccattcagctgccattcataatcatcaatacaagcagaaaaacagtcatagattgcagcatctccagtgacaagtttgagtatcttttcaattttgacaacacctttgagatccatgatgacatagaagtactaaagcggatgggaatgtcgtttggcctggagtcaggcaaatgctctctggaggatctgaaacttgcgaaatccctggtgccaaaggctttagaaggttatatcacagatatctccacaggaccttcttggttaaatcagggactacttctgaactctacccaatcagtttcaaatttagacctgaccactggtgccaccttaccccagtcaagtgtaaaccaagggttatgcttggatgcagaagtggccttagcaactgggcagttcctggccccaaacagtcaccagtccagcagtgcggcctctcactgctccgagtcccgaggcgagaccccctgttcgttcaatgatgaagatgaggaagatgatgaggaggattcctcctccccagaataaagacaagagaaagcctacgtttcaatatgtgatgctcatgtgtgtttgtagtgtgagctcttgtttttgaaatgattgcttcagtctttgcctttgtttgcactgtgtgttcagtgaaaactagagaaacacaataagcaaatcacatgaaggctgagatgattgagatgaaagttaacatagtgtgaatgaaagtctggccaacagagcagtagatgatataacaaagaaagcatgctttctgaggagatagtggggataatccctgaagagttggcagtgtgagtgcaactcatttatcttctgtgaggtgggatttttgtgttcctcacacccatgtaattattcttagaattgagattgctacacggagcagtccttgacgatcgtgtttctgacgtttctcttccttgcctggactgcctttgacaaggcagaaatgaacatgaaaagtccccaggagaggggagctgtgtagtgagggatactgagggcagtcctgtggctgaggggcacagattgaactgctgaactagttggaggtctagatgaggtgctttacgcatcagctgccttagacagcttctagaaaggagcgagcgctacttcttaagtacttaagtgacatttagataatttatagtaaaactgaaattattattagccaatgcattggtgcatagaatttactagggctacttctggaagccaaaatagaatagcatttccatgtgcattaaatactttgccagcactgcctttgccagcatcctaaatctggagttttacaaagaaggaaactgtatctttaggttaatcaaagctatgcatttcatatagctttttcatttaaaacaagacaaagaaacaaattcctatgaccaaattgcttgcctacagttccctgcagtaattgtatgatctcacccagtgtgcaatttgtgaaaatgaaccaaatgtcattacttttgtcttaaagaaaagtctatttcaagaatatgaacagcagtgtttccttgtacatgtcaccttttttcacattttcattaatcagaatgaccttattgagcctactcctggggtcaattgcatttcaaactaatccaatatttagtgtttcacagaaacactagaaaacgttgaacactcctactgcctggatatatggtagtgcagttatgttgtttatggctcaagatgtcattagaaatactgcagtggtgtattcacagctgctccttctctgaatgaaagagtgtagggacacctgccaccatggccagaccctgactgaatttcacattaaggctttggaaaggagcaaataataatgggagaattaactccaaaactttgacctgaatcatgtggatttgtcccaagattatgctagatgcaccaagcatggcccaaattggttcttttttaaatcccatgggggaagtgcaggctccttcctgtggtgcctctttatagcctcaccaccatgctaacactgagcatggtgaggaggaggaagctttggctagctaaacatgtttaataaggccataaaaactgagaaagaaaaacattcaactttagctgaagctcctttgatacaaaagtttcattctgtcagaaataagccatagtacagactcagagatagaggcagtttctagagaactcggtcttatcgtgggttctggagcacacctctcagaccagtcaggaacactggggaggtgacagcaggtccccaggggcctgcagggaatctttcagctgcacggattgggatttccctccaaaccaaactgtcctttaaggggcagcctcctcttttactaactccaccctttctcatctctgggacccagcagggacctggagaggccaacagccactgctacctttgtagtcttcaaaatattgaactgcaggtcccaagatgcatttcaggatttaagacaggtgcactaatgataaccattccttcaccaagtagcaacattcttgccagagttcttgggaaacctgtttttttctctactctccatctctgctgctctcatgctttaaattgataaaatatgggctcaaaaaaagaaagccgccaaagactcttatccttattggtgccccatcattggccaccccagccataggtgtgtgctgttggtgggaaatggtctccttcctcagcgttgtgtttgggttactggtgaggccagctcacagagtgacatcatggtcaccagtacatgtcgctggagtaaaatcttgcctttagaaactaggttgagctgttcagaaaggtcaattctcttctgtattccccctcaacatttatctgggtctaaagctcagcactgagtcacaatttcacacaagatcaaagtgaggcagtgttaggaaaccatgggctgggtgcagtgcctctcgcctgtaatcgtagcactttgggaggccgaggcgggcacattgcttgagctcaggagttcaagaccagcctgggcaacatgacaaaaccctgtctctacaaaaatacaaaaattagctgggtgtggtggggcatgcctgtagtcctggctactcaagaggctgaggtgggaggattgcttgagcgcaggaggcggaggttgtagagccaagatcacaccactgcactccagcctgggtgacagagcaagaccctgtctcaaaaaaaaaaaaaaaaaaaatggaagttgtggtcacaatgcccaggcttctttgttatagtggcacgctgggttacttgccacacacagatcactcctcccagggctgctggcacacactgattgtggggagttcaagaggccttttccccttgagggtgtggctgtccccctttcaggcgtgtggcgtcattcatggaggaagtgctggctctacttagcacacgcacagtggcactaggacctgcgtgcctggccctcagtgggtagggcggtgctgcctaggcacacagcagcgcttacgggccccaggtgcctactaggctgccttcctcttccccgctgtcagtctgtgtcctccacgtgcttatttcctgtggtgagagcagttgtggtgtttgtataccttgtgccttatgatcaaggtgggccttggaggagggcgggaaaggagcgaccaacatggcggtcctccacccctcagcgacacccaccgcccgagaaactacagacaatggccacaagtttggcgtccttcaatttaattctttaaagaagtgctgggaagaaaaagctatgtggtttctaccattttagcaggataaagaggataactccttccattagcaaattttacagttgttaacagtactctgccatatttgaaaaataatgccagagtcagtccttgaaaacaaggtagctcctatcagaattcaaatggaaattttttttttttttttttttttttttgagactgagtctcgctctgttgcccaggctggagtgcagtggtgatctcggctcactgcaagctccgcctcccgggttcacgccattctcctgcctcagctgggaccatgcctggctaattttttttgtatttttagtagagacggggtttcaccgtgttagccaggatggtctcgatctcctgaccttatgatccacccctctcggcctcccaaagtgctgggattacaggcgtgagccaccgcacccggcctcaaatggaaatatttcacagaggagtggttcagtttagccctgcaagacatctataacttgactgtttgctaaaccacaactctttttggctacttgggtcatagagacagcagagttgctccaagtataaatgtgacttaggctccctccagcacacagtgtgtatgttggagggagtgtggattagcagagaatgagaactacctcagctattcctgccataaccacactgagagaggggggcacggtggggagcctatttagcttttttttttttttgagacggagtcttgctctgtcgccaggctggagtgtagtggcgcaatcccggctcactgcaacctctgcctcccgggttcaagcgattctcctgcctcagcctcccaagtagctgggattataggcgcatgccgccacacccgactaattttttgtatttttagtagagtcagggtttcaccgtgttgcccaggctggtgtcgaactcctgacctcaggtgatctgcccacctcagcctcccgaagtgctgggattacaggtgtgagccaccgcacccggctctatttagctttttaaaaattatttcctttcaagggccctttaatatctatcaagctccctcccctaacaaaatgggctgtccctgcccaacaagtctgaaatagaccttaaaactgtgctgccttagtggtaagtaaggggtgggggttggacagtgaatcttaagatttcatccttcattcagtaagcatttgagtacctactgtgagcaggcattggggcggagcagcgagagccctgccgatgttgggttctcctcctattggggaaacttgatcacagatggaacacgtgcagattgattgatgagtgctgtggagaaagcagcagcgtagcgggaccgtttgggaaaggctactttggctgggggtggctgggaaaggcccctctgggaaagagacagttttactgagtcagatggtggaaagacagatgtctctatactttcttaacaagccactctgtcccataacatgcacttggaatctctcctaagttccagaggccccactgttccagtttcaagccttcattttggagtctgtttgggaacttttaagacttcaaagcaaagttagctaccagcaatttctgtaaaccaagagaagattgtcacaaagattcactactttccaactgaatctatgcagtagaaaaatcattagaaaatacaaaaattagccgggcgtggtggcacatgcctgtagtcccagctactcgggaggctgaggcaggagaatcacttgaacccaggaggcggaggttgcagtgagccaagatcccgccactgcactccagcccaggtgacagagcaggactctgtctcaaaaaaagaaaaaagaaagaaagaaaaatgattagaaattgagaactattttacgtgtttctaagttgttggctacatcaaagagatcatctgtattctgcatatgggctggctttggtgaagctgatgactggacttctaagaaccgttttcccaaatgggttcccatattcatgcacccaaagcaatggtccccaagcactgatgaaaactaatatgcatttcccaaagacccacactatgtatcaggagcctgcaccatgccatttgaatgaccctcagcaatgtgcctccctgccctcaaattcccagttgataacagtgtttgattaaatttccactcaagccaaacatggttactaagaagagaaaaacctgatgtttgcataatattttttttcccctcgagatggagtcttgctctgttgcccaggctggagtgcagtggcatgatctcagccactgcaacctctgcctcccgggttcaagcgattcttctgcctcagcctcccaagtagttgggattacagacatgtgccaccacgcctggctaatttttgtatttttagtagagacagggtttcaccatgttgaccacactggtcttgaacttctaaccatgtgatctgcctgcctcggcctcccaaagtgctgggattacaggcttgagccaccacgcccagcctaagattttatgattaaaaaaaattcaagctcaatacccacataaattataacgtttctcaggaagtagtcccttaaccaaaacgtctctgagaagtgatgcttaggtaatctctgggatccgattttcccacatgtctcactccacagtatgctaaagaagaaaaagtgagtgggcacaacactttgaccctctggctaagccctgggagtccctgacaggtccagaaacttctctgacacccattcaccagggtgctgagataggagaaagtgctcatttataatgtgtattctgtgcagctgttctcagacaagaccggatcttgtcatcttaccttttgctttacaaaaaaggcctgttgaagtcaatgctgtcttgccccttgctgtttcagcaggttagactttggtcttcactgcttatagctgcattggaggccaacgtagctgatgctcagggtcaggcctcgccccttcgccgcaggtctcaggatcggggataacatcgctcccaccctgctcatttagagatgggaaacaagcaagagcttgacttgcctcccatccctcagcctgtctgtggcagagcctgcaccaaaacccagagcttcttccctccgtgagggccacgctgtcaccacagtcctcccagatgggttttggattagcatcagtcctgtgtcaccaagtgccaaacagctgaggggtagaagtgggactcctttcccgagccccagcatgaggctgtggtgtcaggtttaggcctctctcaagtcagaaaaccccgggctgagacctccacagacaagggctccccatgctggccattggcaggggcccaagaagttcagtgaccaactggtccttccacaccacaccagctggtgctgcccatgtctgtcgaatcataacggaaaattccccagatcacgtttggatttaaaaactcatcccttgtcgtgcttcaatgcatgccatttgtcacttaccatacttcaccatggccgagcttcatgtcacatggcctggcgattgtgcttgttcacactggggccaggattttcatactaaaacgtcactgacaatggggctacttttctcctgaatagctcctctgggcttgttgcagttctagttttcccagtagttccatggcaggttcaacctctcagtgtcctgaaaaatggaaccacccactaaccatatgcactggctgcccaggtggctgcactccggggatcacgtttcagtactgagttccttcacgcacttggttcaccaccatcactcttgagttttggacaaaagaggtgggtatgccaggcacagtggctcacgcctgtgatcccagcactttgggaggccgaggcgggcggatcacctgaggtcgggagttcgaaaccagcctgaccaacatggagaaaccctgtctctactaaaaatataaaattagccgggtgtggtggcgcatgcctgtaatcccagctactcgggaggctgaggcaggagaatctcttgaacccaggaggcaaaagttgcaatgagctgagatcgtgccatttgcactccagcctgggcaacaagagcgaaattccatctcaaaaaaaaaaggtgggtaaagggccatgagcccaaaccactaggttgttcaccttttcatctgaaaatgctttactctgactatgtgctattgggttttatttccagaaaatatagttctccttttttctgcatgaaggatacatcgtggtgccacatgctttaagcaatttaaacaagagagataagaggaaaatgcaaccaccacatctgacttgcccaatgtagactttcctttattagattgaagtacacaacctaatatgatatattattttgtagtatctcagactttgtaaataaatgccattatttttatatggaaattttatagaagagctatttctgtatacgtaattactcctgattttctgaaattgcttctggtagataacagacaagtcctaagcagtgttccactaagggtggttccaggcctgcctgccgtggagttgactgggggaattttacagttttgcgatcctaggatgcgtcccagacgctcagtcagaagtgctggaggtggggcctgggaagctgtatttgtaatgaactctggtgttttttgtccattaaagtgtatctttgtccatcctataagattaaaggaaagaaaaagcatctcaaatgagtgtaagttgttcttgagaaaaaaatgtatcagacttttatgatttgaatgaaatgtattatagaaaaaaataaacacttt

SEQ ID NO: 4269 - DNA, 1403 bp, Homo sapiens
  source 1..1403: mol_type = genomic DNA
gtagaatgttgttggtactgcagtgagaggcatgcttccttagaccagtaaacgaagcaaaaaaggagataaaaatgggaaaggcttgagacacttttcaatgaaagtgtgtgagaaagttcaacgaaaaggtacaacatcgtacaatgaagtcgctgatgagctggtgtcagagttcaccaattcaaataaccatttggctgctgattcggcttatgatcagaagaacattaggcgaagagtttatgatgctttaaatgtgctaatggcaatgaacataatttcaaaggaaaaaaaagaaatcaagtggattggcctgcctaccaattctgctcaggaatgtcagaatctggagatagagaagcagaggcggatagaacggataaagcagaagcgggcccagctgcaagaacttctcctacagcaaatcgctttcaaaaacctggtacagagaaatcgacaaaatgagcagcaaaaccagggcccgccggctctgaactctaccattcagctgccattcataatcatcaatacaagcagaaaaacagtcatagattgcagcatctccagtgacaagtttgagtatcttttcaattttgacaacacctttgagatccatgatgacatagaagtactaaagcggatgggaatgtcgtttggcctggagtcaggcaaatgctctctggaggatctgaaacttgcgaaatccctggtgccaaaggctttagaaggttatatcacagatatctccacaggaccttcttggttaaatcagggactacttctgaactctacccaatcagtttcaaatttagacctgaccactggtgccaccttaccccagtcaagtgtaaaccaagggttatgcttggatgcagaagtggccttagcaactgggcagttcctggccccaaacagtcaccagtccagcagtgcggcctctcactgctccgagtcccgaggcgagaccccctgttcgttcaatgatgaagatgaggaagatgatgaggaggattcctcctccccagaataaagacaagagaaagcctacgtttcaatatgtgatgctcatgtgtgtttgtagtgtgagctcttgtttttgaaatgattgcttcagtctttgcctttgtttgcactgtgtgttcagtgaaaactagagaaacacaataagcaaatcacatgaaggctgagatgattgagatgaaagttaacatagtgtgaatgaaagtctggccaacagagcagtagatgatataacaaagaaagcatgctttctgaggagatagtggggataatccctgaagagttggcagtgtgagtgcaactcatttatcttctgtgaggtgggatttttgtgttcctcacacccatgtaattattcttagaattgagattgctacacg

SEQ ID NO: 4270 - DNA, 1773 bp, Homo sapiens
  source 1..1773: mol_type = genomic DNA
ggggccggatccccggatgccctgctctctgacctggagactaccacctcgcacatgccaaggtcaggggctcccaaagagcgccctgcggagcctctcacccctcccccatcctatggccaccagccacagacagggtctggggagtcttcaggagcctcgggggacaaggaccacctgtacagcacggtatgcaagcctcggtccccaaagcctgcagccccggcggcccctccattctcctcttccagcggtgtcttgggtaccgggctctgtgagctagatcggttgcttcaggaacttaatgccactcagttcaacatcacagatgaaatcatgtctcagttcccatctagcaaggtggcttcaggagagcagaaggaggaccagtctgaagataagaaaagacccagcctcccttccagcccgtctcctggcctcccaaaggcttctgccacctcagccactctggagctggatagactgatggcctcactctctgacttccgcgttcaaaaccatcttccagcctctgggccaactcagccaccggtggtgagctccacaaatgagggctccccatccccaccagagccgactggcaagggcagcctagacaccatgctggggctgctgcagtccgacctcagccgccggggtgttcccacccaggccaaaggcctctgtggctcctgcaataaacctattgctgggcaagtggtgacggctctgggccgcgcctggcaccccgagcacttcgtttgcggaggctgttccaccgccctgggaggcagcagcttcttcgagaaggatggagcccccttctgccccgagtgctactttgagcgcttctcgccaagatgtggcttctgcaaccagcccatccgacacaagatggtgaccgccttgggcactcactggcacccagagcatttctgctgcgtcagttgcggggagcccttcggagatgagggtttccacgagcgcgagggccgcccctactgccgccgggacttcctgcagctgttcgccccgcgctgccagggctgccagggccccatcctggataactacatctcggcgctcagcgcgctctggcacccggactgtttcgtctgcagggaatgcttcgcgcccttctcgggaggcagctttttcgagcacgagggccgcccgttgtgcgagaaccacttccacgcacgacgcggctcgctgtgcgccacgtgtggcctccctgtgaccggccgctgcgtgtcggccctgggtcgccgcttccacccggaccacttcacatgcaccttctgcctgcgcccgctcaccaaggggtccttccaggagcgcgccggcaagccctactgccagccctgcttcctgaagctcttcggctgacagcccgctcggctcgccctctcccccggaggccgcgccctcccggaaaagccgggtcctccagaccccgaggccttgctctcagagcgggaggccccacccactggagagccccgcccctaaggtactatgagtcctcaggggtcaagttcagaaacggcccagccagacctaaacccacacgcccacaaagtggattgcacacagacaagaactcccgtgcgggcctccactctattcccacccttgagggagcccccttactgggggagggtccttgcaattccagcgaatcggaggccaggccaggacgtccttgctccctgcaccctcactgttctgtgcactttttctacctacataaacacacgcattccacctctc

SEQ ID NO: 4271 - DNA, 1803 bp, Homo sapiens
  source 1..1803: mol_type = genomic DNA
ggagaataaaataatcaggaggctgggtttgtgcttggctccaagcatgccctgctctctgacctggagactaccacctcgcacatgccaaggtcaggggctcccaaagagcgccctgcggagcctctcacccctcccccatcctatggccaccagccacagacagggtctggggagtcttcaggagcctcgggggacaaggaccacctgtacagcacggtatgcaagcctcggtccccaaagcctgcagccccggcggcccctccattctcctcttccagcggtgtcttgggtaccgggctctgtgagctagatcggttgcttcaggaacttaatgccactcagttcaacatcacagatgaaatcatgtctcagttcccatctagcaaggtggcttcaggagagcagaaggaggaccagtctgaagataagaaaagacccagcctcccttccagcccgtctcctggcctcccaaaggcttctgccacctcagccactctggagctggatagactgatggcctcactctctgacttccgcgttcaaaaccatcttccagcctctgggccaactcagccaccggtggtgagctccacaaatgagggctccccatccccaccagagccgactggcaagggcagcctagacaccatgctggggctgctgcagtccgacctcagccgccggggtgttcccacccaggccaaaggcctctgtggctcctgcaataaacctattgctgggcaagtggtgacggctctgggccgcgcctggcaccccgagcacttcgtttgcggaggctgttccaccgccctgggaggcagcagcttcttcgagaaggatggagcccccttctgccccgagtgctactttgagcgcttctcgccaagatgtggcttctgcaaccagcccatccgacacaagatggtgaccgccttgggcactcactggcacccagagcatttctgctgcgtcagttgcggggagcccttcggagatgagggtttccacgagcgcgagggccgcccctactgccgccgggacttcctgcagctgttcgccccgcgctgccagggctgccagggccccatcctggataactacatctcggcgctcagcgcgctctggcacccggactgtttcgtctgcagggaatgcttcgcgcccttctcgggaggcagctttttcgagcacgagggccgcccgttgtgcgagaaccacttccacgcacgacgcggctcgctgtgcgccacgtgtggcctccctgtgaccggccgctgcgtgtcggccctgggtcgccgcttccacccggaccacttcacatgcaccttctgcctgcgcccgctcaccaaggggtccttccaggagcgcgccggcaagccctactgccagccctgcttcctgaagctcttcggctgacagcccgctcggctcgccctctcccccggaggccgcgccctcccggaaaagccgggtcctccagaccccgaggccttgctctcagagcgggaggccccacccactggagagccccgcccctaaggtactatgagtcctcaggggtcaagttcagaaacggcccagccagacctaaacccacacgcccacaaagtggattgcacacagacaagaactcccgtgcgggcctccactctattcccacccttgagggagcccccttactgggggagggtccttgcaattccagcgaatcggaggccaggccaggacgtccttgctccctgcaccctcactgttctgtgcactttttctacctacataaacacacgcattccacctctc

SEQ ID NO: 4272 - DNA, 1886 bp, Homo sapiens
  source 1..1886: mol_type = genomic DNA
cggcttccttacatggtcacggccgggcttccagctcccggacgtcccccgccccccgcccccaccggacacggcccccgccctgttcgccccgcgccaccggcccgcgccccgccatggaggacctggatgccctgctctctgacctggagactaccacctcgcacatgccaaggtcaggggctcccaaagagcgccctgcggagcctctcacccctcccccatcctatggccaccagccacagacagggtctggggagtcttcaggagcctcgggggacaaggaccacctgtacagcacggtatgcaagcctcggtccccaaagcctgcagccccggcggcccctccattctcctcttccagcggtgtcttgggtaccgggctctgtgagctagatcggttgcttcaggaacttaatgccactcagttcaacatcacagatgaaatcatgtctcagttcccatctagcaaggtggcttcaggagagcagaaggaggaccagtctgaagataagaaaagacccagcctcccttccagcccgtctcctggcctcccaaaggcttctgccacctcagccactctggagctggatagactgatggcctcactctctgacttccgcgttcaaaaccatcttccagcctctgggccaactcagccaccggtggtgagctccacaaatgagggctccccatccccaccagagccgactggcaagggcagcctagacaccatgctggggctgctgcagtccgacctcagccgccggggtgttcccacccaggccaaaggcctctgtggctcctgcaataaacctattgctgggcaagtggtgacggctctgggccgcgcctggcaccccgagcacttcgtttgcggaggctgttccaccgccctgggaggcagcagcttcttcgagaaggatggagcccccttctgccccgagtgctactttgagcgcttctcgccaagatgtggcttctgcaaccagcccatccgacacaagatggtgaccgccttgggcactcactggcacccagagcatttctgctgcgtcagttgcggggagcccttcggagatgagggtttccacgagcgcgagggccgcccctactgccgccgggacttcctgcagctgttcgccccgcgctgccagggctgccagggccccatcctggataactacatctcggcgctcagcgcgctctggcacccggactgtttcgtctgcagggaatgcttcgcgcccttctcgggaggcagctttttcgagcacgagggccgcccgttgtgcgagaaccacttccacgcacgacgcggctcgctgtgcgccacgtgtggcctccctgtgaccggccgctgcgtgtcggccctgggtcgccgcttccacccggaccacttcacatgcaccttctgcctgcgcccgctcaccaaggggtccttccaggagcgcgccggcaagccctactgccagccctgcttcctgaagctcttcggctgacagcccgctcggctcgccctctcccccggaggccgcgccctcccggaaaagccgggtcctccagaccccgaggccttgctctcagagcgggaggccccacccactggagagccccgcccctaaggtactatgagtcctcaggggtcaagttcagaaacggcccagccagacctaaacccacacgcccacaaagtggattgcacacagacaagaactcccgtgcgggcctccactctattcccacccttgagggagcccccttactgggggagggtccttgcaattccagcgaatcggaggccaggccaggacgtccttgctccctgcaccctcactgttctgtgcactttttctacctacataaacacacgcattccacctctc

SEQ ID NO: 4273 - DNA, 1483 bp, Homo sapiens
  source 1..1483: mol_type = genomic DNA
gccgggagcccgttcggttgcgggtgtctctggccctgcggtcagccctgggaacgtcccggagagctagattcctagaggcccgattccgctagcccggaacagacaaagccagcgctcccgcccgctccccgacttaggatccgatgccggcagcgtcctggggcccccgtagcggggctggaccatgagcctgctggacggcctcgcttcctcgccgcgggctccgctgcagtccagcaaggccaggatgaaaaagctcccgaagaagagccagaatgagaagtaccggctgaagtacctgcggctgcgcaaagcggccaaggccacggtgtttgaaaatgctgctatttgtgatgaaattgctcgtcttgaggaaaaatttcttaaagcaaaagaagaaagaaggtacttgctaaagaagctcctccagcttcaggctctaactgaaggggaagtacaggctgcagctccttcccacagttccagtttgcccctgacttatggtgtggccagctctgtgggaactatacagggagctgggcctatttcagggcccagcactggggctgaggaaccatttgggaagaaaactaagaaggagaaaaaagaaaaaggcaaagagaacaacaaactggaagatcatcaccgaccgacctggctttcatgatgagagtgccatctaccccgtgggctattgcagtactcgaatatatgccagcatgaagtgcccagaccagaagtgtctatatacctgtcagatcaaggatggtggtgtgcagcctcagtttgaaattgttcctgaagatgacccccagaatgccattgtcagctcttctgcagatgcttgtcatgcagaactgctcaggactataagcactactatggggaaactaatgcctaacctgcttccagctggagctgacttttttggattttctcatccagccatccacaacctgatccagagctgtccaggagctcgaaaatgcatcaattaccagtgggtgaaatttgatgtgtgcaaacctggagatgggcagctacctgaggggctgccggagaatgatgcagctatgagctttgaagcctttcagagacagatctttgatgaagatcagaatgatccccttctgccaggatccttggacctcccagagcttcagcctgcagcctttgtgtcttcttaccagcccatgtacctgacacatgaacccttggtagatactcacctgcagcacttgaagtctccatcacagggtagcccaattcagtcttcagattgaacaagaagggatcagatgccacatcgtttttgtcgtgattaatttaacttaaactaaaattttgggtatatgaaagaaggcagcaattcagaagtaaagaagatactaacgtatttcatcatggaaggtcctgtggtgatggttttccctgggaaaaccttcagctgctttatttttagtaataaatttctcttgtc

SEQ ID NO: 4274 - DNA, 4004 bp, Homo sapiens
  source 1..4004: mol_type = genomic DNA
cggaagtgctgggaggcgccgggagcccgttcggttgcgggtgtctctggccctgcggtcagccctgggaacgtcccggagagctagattcctagaggcccgattccgctagcccggaacagacaaagccagcgctcccgcccgctccccgacttaggatccgatgccggcagcgtcctggggcccccgtagcggggctggaccatgagcctgctggacggcctcgcttcctcgccgcgggctccgctgcagtccagcaaggccaggatgaaaaagctcccgaagaagagccagaatgagaagtaccggctgaagtacctgcggctgcgcaaagcggccaaggccacggtgtttgaaaatgctgctatttgtgatgaaattgctcgtcttgaggaaaaatttcttaaagcaaaagaagaaagaaggtacttgctaaagaagctcctccagcttcaggctctaactgaaggggaagtacaggctgcagctccttcccacagttccagtttgcccctgacttatggtgtggccagctctgtgggaactatacagggagctgggcctatttcagggcccagcactggggctgaggaaccatttgggaagaaaactaagaaggagaaaaaagaaaaaggcaaagagaacaacaaactggaagttctgaagaaaacatgcaagaaaaagaaaatggcgggaggtgctcgcaagctggttcagcccattgccctggatccctcaggacggcctgtgttccccatcggactagggggtctaacagtatatagcctgggggagatcatcaccgaccgacctggctttcatgatgagagtgccatctaccccgtgggctattgcagtactcgaatatatgccagcatgaagtgcccagaccagaagtgtctatatacctgtcagatcaaggatggtggtgtgcagcctcagtttgaaattgttcctgaagatgacccccagaatgccattgtcagctcttctgcagatgcttgtcatgcagaactgctcaggactataagcactactatggggaaactaatgcctaacctgcttccagctggagctgacttttttggattttctcatccagccatccacaacctgatccagagctgtccaggagctcgaaaatgcatcaattaccagtgggtgaaatttgatgtgtgcaaacctggagatgggcagctacctgaggggctgccggagaatgatgcagctatgagctttgaagcctttcagagacagatctttgatgaagatcagaatgatccccttctgccaggatccttggacctcccagagcttcagcctgcagcctttgtgtcttcttaccagcccatgtacctgacacatgaacccttggtagatactcacctgcagcacttgaagtctccatcacagggtagcccaattcagtcttcagattgaacaagaagggatcagatgccacatcgtttttgtcgtgattaatttaacttaaactaaaattttgggtatatgaaagaaggcagcaattcagaagtaaagaagatactaacgtatttcatcatggaaggtcctgtggtgatggttttccctgggaaaaccttcagctgctttatttttagtaataaatttctcttgtcaattctgtttactttcatcttgtaatcgggatgtaatcttttttgcttagctctgcctgaggtaaagtaaacttcagcctcttataaacaagagtgatagagagctgcaggctgctacaacaaataccatagacaggttggtttataaataacatgaatttatttctcacagttctggatgctgggaagtccaagttcaaggagcgcagattcaatgtctggtgagggcccacttcctagttcttagacagctgtcttcctgcagtgtcctcacgtggtagaagaggaaggcagctctccggggtcccttttataagatcactaagccggttcatgagaggtctgctctcatgacctaatcacctcccaaaggccccacctcccaataccatcacattaggggttaggatttaacatgaattttggggacatataaacattaagtctgtagtagcagcagctgactaacgagggagatagggagattctgacaaacttctactcttgattgtgatcctaattcaaggaatatcaagtcccagcccctgcaacccaggctgctgcttaattttcatgtcagtatcatcaaaatccaatgttctgcttaaactcaagatggaaagtccagtccaaggtacactgttcatctttttcttcacattttgcacatccttcaaggggatctttaacctctttaacctttgtattgcacctcagataatgtgctttttagctcagtacactgaaaccatatgataacacaaattcacatataattgggggttagtcccatactctataacagacttagtcctgtcttttcattagccatgtaataatataactccatgttccatgcaactggatttttggaccctgttaatagcattaaggtagaggtttactctatcacctaacacctcaacactacctgtgggatgccttagttacccagcagcaggttaccaagggctgtctggaaagggagggacaaaaggacccagaagtagaagaatggggatggagtggtgagaattgaatggttaatgcactgccattcataattgccaattgaggacaacacaaatgggattggtactttatagtaataaatctgaccagcagagggagggatcaggcagcagtgtttagagcacaccacactggccactgtaaactgagaagctaagttaactggtattttatgattttgagtatagtctttttataagttgtatacactttacaatgtaaaagaaacaaactttgtataatagcaaatcgggaaggggactgcttaaaatgttaatgcagtgtttttctttttttctctgcataaatggcttgagcatactggcatttacacagaaatgatatatgctgcttttatcatataacaaatattttcccactattacagcctgagtaatacccgtattaaaagagcctcattttagaaagacatttaaaatttttggaacataccacatgtagaaaggttgaactggtttttcagctataatgcatatacaactatagtgtgtacgtataccacatatacatatacttgtatgaagatatgtgtaaaatgtttttactatggatcatggatttaagaaacttgaaaagctgggcacggtggctcacgcctgtaatcccagcactttgggaggctgaggcgggtggatcaagaggtcaggagatcgagaccatcctggctaagtcggtctctaataaaaatacaaaaaattagccaggcgtggtggcacgcgcctgtagtcccagctactcgggaggctgaggcaggaagaatcgcttgaacccgggaggcagaggttgcagtgagccgagaccgcgccactgcactccagcctgggcaacagagcaaaactccaactcaaaaacaaaaacaaaaacaccttgaaaaacactgccttagtatacttaaactatcttttcatctatcagattgttaaggattttttttaaatttgacaacatccagtgtcaatgagggtgagggcaaaaaaaggactaccttggtgagaatgtaagttgtttaatcctttgggagggttaagctgtagatatctaaattttaaatatatatttatcctcttccatgttaagaaccctaagaaataactggacgagtgtggtatgatgtttgcatgtgatattcattacagtattattttaatagtagaaaattgttaaaaatctatatgtccattaataggaaattggttaaataaaatgaggcttccacaaactgaaacactctaaatctatattctattatttacataagaaaattattttggtaaagtaagtaagtcaaaaacacagattacaaaataatatgta

SEQ ID NO: 4275 - DNA, 5720 bp, Homo sapiens
  source 1..5720: mol_type = genomic DNA
gcggcggctagggaggtggggcgaggcgaggtttgctggggtgaggcagcggcgcggccgggccgggccgggccacaggcggtggcggcgggaccatggaggcggcggtcgctgctccgcgtccccggctgctcctcctcgtgctggcggcggcggcggcggcggcggcggcgctgctcccgggggcgacggcgttacagtgtttctgccacctctgtacaaaagacaattttacttgtgtgacagatgggctctgctttgtctctgtcacagagaccacagacaaagttatacacaacagcatgtgtatagctgaaattgacttaattcctcgagataggccgtttgtatgtgcaccctcttcaaaaactgggtctgtgactacaacatattgctgcaatcaggaccattgcaataaaatagaacttccaactactggtttaccattgcttgttcagagaacaattgcgagaactattgtgttacaagaaagcattggcaaaggtcgatttggagaagtttggagaggaaagtggcggggagaagaagttgctgttaagatattctcctctagagaagaacgttcgtggttccgtgaggcagagatttatcaaactgtaatgttacgtcatgaaaacatcctgggatttatagcagcagacaataaagacaatggtacttggactcagctctggttggtgtcagattatcatgagcatggatccctttttgattacttaaacagatacacagttactgtggaaggaatgataaaacttgctctgtccacggcgagcggtcttgcccatcttcacatggagattgttggtacccaaggaaagccagccattgctcatagagatttgaaatcaaagaatatcttggtaaagaagaatggaacttgctgtattgcagacttaggactggcagtaagacatgattcagccacagataccattgatattgctccaaaccacagagtgggaacaaaaaggtacatggcccctgaagttctcgatgattccataaatatgaaacattttgaatccttcaaacgtgctgacatctatgcaatgggcttagtattctgggaaattgctcgacgatgttccattggtggaattcatgaagattaccaactgccttattatgatcttgtaccttctgacccatcagttgaagaaatgagaaaagttgtttgtgaacagaagttaaggccaaatatcccaaacagatggcagagctgtgaagccttgagagtaatggctaaaattatgagagaatgttggtatgccaatggagcagctaggcttacagcattgcggattaagaaaacattatcgcaactcagtcaacaggaaggcatcaaaatgtaattctacagctttgcctgaactctccttttttcttcagatctgctcctgggttttaatttgggaggtcaattgttctacctcactgagagggaacagaaggatattgcttccttttgcagcagtgtaataaagtcaattaaaaacttcccaggatttctttggacccaggaaacagccatgtgggtcctttctgtgcactatgaacgcttctttcccaggacagaaaatgtgtagtctacctttattttttattaacaaaacttgttttttaaaaagatgattgctggtcttaactttaggtaactctgctgtgctggagatcatctttaagggcaaaggagttggattgctgaattacaatgaaacatgtcttattactaaagaaagtgatttactcctggttagtacattctcagaggattctgaaccactagagtttccttgattcagactttgaatgtactgttctatagtttttcaggatcttaaaactaacacttataaaactcttatcttgagtctaaaaatgacctcatatagtagtgaggaacataattcatgcaattgtattttgtatactattattgttctttcacttattcagaacattacatgccttcaaaatgggattgtactataccagtaagtgccacttctgtgtctttctaatggaaatgagtagaattgctgaaagtctctatgttaaaacctatagtgtttgaattcaaaaagcttatttatctgggtaacccaaactttttctgttttgtttttggaagggtttttgtggtatgtcatttggtattctattctgaaaatgcctttctcctaccaaaatgtgcttaagccactaaagaaatgaagtggcattaattagtaaattattagcatggtcatgtttgaatattctcacatcaagcttttgcattttaattgtgttgtctaagtatacttttaaaaaatcaagtggcactctagatgcttatagtactttaatatttgtagcatacagactaatttttctaaaagggaaagtctgtctagctgcttgtgaaaagttatgtggtattctgtaagccatttttttctttatctgttcaaagacttattttttaagacatgaattacatttaaaattagaatatggttaatattaaataataggcctttttctaggaaggcgaaggtagttaataatttgaatagataacagatgtgcaagaaagtcacatttgttatgtatgtaggagtaaacgttcggtggatcctctgtctttgtaactgaggttagagctagtgtggttttgaggtctcactacactttgaggaaggcagcttttaattcagtgtttccttatgtgtgcgtacattgcaactgcttacatgtaatttatgtaatgcattcagtgcacccttgttacttgggagaggtggtagctaaagaacattctgagtataggtttttctccatttacagatgtctttggtcaaatattgaaagcaaacttgtcatggtcttcttacattaagttgaaactagcttataataactggtttttacttccaatgctatgaagtctctgcagggcttttacagttttcgaagtccttttatcactgtgatcttattctgaggggagaaaaaactatcatagctctgaggcaagacttcgactttatagtgctatcagttccccgatacagggtcagagtaacccatacagtattttggtcaggaagagaaagtggccatttacactgaatgagttgcattctgataatgtcttatctcttatacgtagaataaatttgaaagactatttgatcttaaaaccaaagtaattttagaatgagtgacatattacataggaatttagtgtcaatttcatgtgtttaaaaacatcatgggaaaaatgcttagaggttactattttgactacaaagttgagtttttttctgtagttaccataatttcattgaagcaaatgaatgagtttgagaggtttgtttttatagttgtgttgtattacttgtttaataataatctctaattctgtgatcaggtactttttttgtgggggttttttttttgtttttttttttttgttgttgtttttgggccatttctaagcctaccagatctgctttatgaaatccaggggaccaatgcattttatcactaaaactatttttatataattttaagaatataccaaaagttgtctgatttaaagttgtaatacatgatttctcactttcatgtaaggttatccacttttgctgaagatattttttattgaatcaaagattgagttacaattatacttttcttacctaagtggataaaatgtacttttgatgaatcagggaatttttttaaagttggagtttagttctaaattgactttacgtattactgcagttaattccttttttggctagggatggtttgataaaccacaattggctgatattgaaaatgaaagaaacttaaaaggtgggatggatcatgattactgtcgataactgcagataaatttgattagagtaataattttgtcatttaaaaacacagttgtttatactgcccatcctaggatgctcaccttccaagattcaacgtggctaaaacatcttctggtaaattgtgcgtccatattcattttgtcagtagccaggagaaatggggatgggggaaatacgacttagtgaggcatagacatccctggtccatcctttctgtctccagctgtttcttggaacctgctctcctgcttgctggtccctgacgcagagaccgttgcctcccccacagccgtttgactgaaggctgctctggagacctagagtaaaacggctgatggaagttgtgggacccacttccatttccttcagtcattagaggtggaagggaggggtctccaagtttggagattgagcagatgaggcttgggatgcccctgctttgacttcagccatggatgaggagtgggatggcagcaaggtggctcctgtggcagtggagttgtgccagaaacagtggccagttgtatcgcctataagacagggtaaggtctgaagagctgagcctgtaattctgctgtaataatgatagtgctcaagaagtgccttgagttggtgtacagtgccatggccatcaagaatcccagatttcaggttttattacaaaatgtaagtggtcacttggcgattttgtagtacatgcatgagttaccttttttctctatgtctgagaactgtcagattaaaacaagatggcaaagagatcgttagagtgcacaacaaaatcactatcccattagacacatcatcaaaagcttatttttattcttgcactggaagaatcgtaagtcaactgtttcttgaccatggcagtgttctggctccaaatggtagtgattccaaataatggttctgttaacactttggcagaaaatgccagctcagatattttgagatactaaggattatctttggacatgtactgcagcttcttgtctctgttttggattactggaatacccatgggccctctcaagagtgctggacttctaggacattaagatgattgtcagtacattaaacttttcaatcccattatgcaatcttgtttgtaaatgtaaacttctaaaaatatggttaataacattcaacctgtttattacaacttaaaaggaacttcagtgaatttgtttttattttttaacaagatttgtgaactgaatatcatgaaccatgttttgatacccctttttcacgttgtgccaacggaatagggtgtttgatatttcttcatatgttaaggagatgcttcaaaatgtcaattgctttaaacttaaattacctctcaagagaccaaggtacatttacctcattgtgtatataatgtttaatatttgtcagagcattctccaggtttgcagttttatttctataaagtatgggtattatgttgctcagttactcaaatggtactgtattgtttatatttgtaccccaaataacatcgtctgtactttctgttttctgtattgtatttgtgcaggattctttaggctttatcagtgtaatctctgccttttaagatatgtacagaaaatgtccatataaatttccattgaagtcgaatgatactgagaagcctgtaaagaggagaaaaaaacataagctgtgtttccccataagtttttttaaattgtatattgtatttgtagtaatattccaaaagaatgtaaataggaaatagaagagtgatgcttatgttaagtcctaacactacagtagaagaatggaagcagtgcaaataaattacatttttcccaa

SEQ ID NO: 4276 - DNA, 6516 bp, Homo sapiens
  source 1..6516: mol_type = genomic DNA
aaagggccggagcgaggccgccgcggcggctagggaggtggggcgaggcgaggtttgctggggtgaggcagcggcgcggccgggccgggccgggccacaggcggtggcggcgggaccatggaggcggcggtcgctgctccgcgtccccggctgctcctcctcgtgctggcggcggcggcggcggcggcggcggcgctgctcccgggggcgacggcgttacagtgtttctgccacctctgtacaaaagacaattttacttgtgtgacagatgggctctgctttgtctctgtcacagagaccacagacaaagttatacacaacagcatgtgtatagctgaaattgacttaattcctcgagataggccgtttgtatgtgcaccctcttcaaaaactgggtctgtgactacaacatattgctgcaatcaggaccattgcaataaaatagaacttccaactactgtaaagtcatcacctggccttggtcctgtggaactggcagctgtcattgctggaccagtgtgcttcgtctgcatctcactcatgttgatggtctatatctgccacaaccgcactgtcattcaccatcgagtgccaaatgaagaggacccttcattagatcgcccttttatttcagagggtactacgttgaaagacttaatttatgatatgacaacgtcaggttctggctcaggtttaccattgcttgttcagagaacaattgcgagaactattgtgttacaagaaagcattggcaaaggtcgatttggagaagtttggagaggaaagtggcggggagaagaagttgctgttaagatattctcctctagagaagaacgttcgtggttccgtgaggcagagatttatcaaactgtaatgttacgtcatgaaaacatcctgggatttatagcagcagacaataaagacaatggtacttggactcagctctggttggtgtcagattatcatgagcatggatccctttttgattacttaaacagatacacagttactgtggaaggaatgataaaacttgctctgtccacggcgagcggtcttgcccatcttcacatggagattgttggtacccaaggaaagccagccattgctcatagagatttgaaatcaaagaatatcttggtaaagaagaatggaacttgctgtattgcagacttaggactggcagtaagacatgattcagccacagataccattgatattgctccaaaccacagagtgggaacaaaaaggtacatggcccctgaagttctcgatgattccataaatatgaaacattttgaatccttcaaacgtgctgacatctatgcaatgggcttagtattctgggaaattgctcgacgatgttccattggtggaattcatgaagattaccaactgccttattatgatcttgtaccttctgacccatcagttgaagaaatgagaaaagttgtttgtgaacagaagttaaggccaaatatcccaaacagatggcagagctgtgaagccttgagagtaatggctaaaattatgagagaatgttggtatgccaatggagcagctaggcttacagcattgcggattaagaaaacattatcgcaactcagtcaacaggaaggcatcaaaatgtaattctacagctttgcctgaactctccttttttcttcagatctgctcctgggttttaatttgggaggtcaattgttctacctcactgagagggaacagaaggatattgcttccttttgcagcagtgtaataaagtcaattaaaaacttcccaggatttctttggacccaggaaacagccatgtgggtcctttctgtgcactatgaacgcttctttcccaggacagaaaatgtgtagtctacctttattttttattaacaaaacttgttttttaaaaagatgattgctggtcttaactttaggtaactctgctgtgctggagatcatctttaagggcaaaggagttggattgctgaattacaatgaaacatgtcttattactaaagaaagtgatttactcctggttagtacattctcagaggattctgaaccactagagtttccttgattcagactttgaatgtactgttctatagtttttcaggatcttaaaactaacacttataaaactcttatcttgagtctaaaaatgacctcatatagtagtgaggaacataattcatgcaattgtattttgtatactattattgttctttcacttattcagaacattacatgccttcaaaatgggattgtactataccagtaagtgccacttctgtgtctttctaatggaaatgagtagaattgctgaaagtctctatgttaaaacctatagtgtttgaattcaaaaagcttatttatctgggtaacccaaactttttctgttttgtttttggaagggtttttgtggtatgtcatttggtattctattctgaaaatgcctttctcctaccaaaatgtgcttaagccactaaagaaatgaagtggcattaattagtaaattattagcatggtcatgtttgaatattctcacatcaagcttttgcattttaattgtgttgtctaagtatacttttaaaaaatcaagtggcactctagatgcttatagtactttaatatttgtagcatacagactaatttttctaaaagggaaagtctgtctagctgcttgtgaaaagttatgtggtattctgtaagccatttttttctttatctgttcaaagacttattttttaagacatgaattacatttaaaattagaatatggttaatattaaataataggcctttttctaggaaggcgaaggtagttaataatttgaatagataacagatgtgcaagaaagtcacatttgttatgtatgtaggagtaaacgttcggtggatcctctgtctttgtaactgaggttagagctagtgtggttttgaggtctcactacactttgaggaaggcagcttttaattcagtgtttccttatgtgtgcgtacattgcaactgcttacatgtaatttatgtaatgcattcagtgcacccttgttacttgggagaggtggtagctaaagaacattctgagtataggtttttctccatttacagatgtctttggtcaaatattgaaagcaaacttgtcatggtcttcttacattaagttgaaactagcttataataactggtttttacttccaatgctatgaagtctctgcagggcttttacagttttcgaagtccttttatcactgtgatcttattctgaggggagaaaaaactatcatagctctgaggcaagacttcgactttatagtgctatcagttccccgatacagggtcagagtaacccatacagtattttggtcaggaagagaaagtggccatttacactgaatgagttgcattctgataatgtcttatctcttatacgtagaataaatttgaaagactatttgatcttaaaaccaaagtaattttagaatgagtgacatattacataggaatttagtgtcaatttcatgtgtttaaaaacatcatgggaaaaatgcttagaggttactattttgactacaaagttgagtttttttctgtagttaccataatttcattgaagcaaatgaatgagtttgagaggtttgtttttatagttgtgttgtattacttgtttaataataatctctaattctgtgatcaggtactttttttgtgggggttttttttttgtttttttttttttgttgttgtttttgggccatttctaagcctaccagatctgctttatgaaatccaggggaccaatgcattttatcactaaaactatttttatataattttaagaatataccaaaagttgtctgatttaaagttgtaatacatgatttctcactttcatgtaaggttatccacttttgctgaagatattttttattgaatcaaagattgagttacaattatacttttcttacctaagtggataaaatgtacttttgatgaatcagggaatttttttaaagttggagtttagttctaaattgactttacgtattactgcagttaattccttttttggctagggatggtttgataaaccacaattggctgatattgaaaatgaaagaaacttaaaaggtgggatggatcatgattactgtcgataactgcagataaatttgattagagtaataattttgtcatttaaaaacacagttgtttatactgcccatcctaggatgctcaccttccaagattcaacgtggctaaaacatcttctggtaaattgtgcgtccatattcattttgtcagtagccaggagaaatggggatgggggaaatacgacttagtgaggcatagacatccctggtccatcctttctgtctccagctgtttcttggaacctgctctcctgcttgctggtccctgacgcagagaccgttgcctcccccacagccgtttgactgaaggctgctctggagacctagagtaaaacggctgatggaagttgtgggacccacttccatttccttcagtcattagaggtggaagggaggggtctccaagtttggagattgagcagatgaggcttgggatgcccctgctttgacttcagccatggatgaggagtgggatggcagcaaggtggctcctgtggcagtggagttgtgccagaaacagtggccagttgtatcgcctataagacagggtaaggtctgaagagctgagcctgtaattctgctgtaataatgatagtgctcaagaagtgccttgagttggtgtacagtgccatggccatcaagaatcccagatttcaggttttattacaaaatgtaagtggtcacttggcgattttgtagtacatgcatgagttaccttttttctctatgtctgagaactgtcagattaaaacaagatggcaaagagatcgttagagtgcacaacaaaatcactatcccattagacacatcatcaaaagcttatttttattcttgcactggaagaatcgtaagtcaactgtttcttgaccatggcagtgttctggctccaaatggtagtgattccaaataatggttctgttaacactttggcagaaaatgccagctcagatattttgagatactaaggattatctttggacatgtactgcagcttcttgtctctgttttggattactggaatacccatgggccctctcaagagtgctggacttctaggacattaagatgattgtcagtacattaaacttttcaatcccattatgcaatcttgtttgtaaatgtaaacttctaaaaatatggttaataacattcaacctgtttattacaacttaaaaggaacttcagtgaatttgtttttattttttaacaagatttgtgaactgaatatcatgaaccatgttttgatacccctttttcacgttgtgccaacggaatagggtgtttgatatttcttcatatgttaaggagatgcttcaaaatgtcaattgctttaaacttaaattacctctcaagagaccaaggtacatttacctcattgtgtatataatgtttaatatttgtcagagcattctccaggtttgcagttttatttctataaagtatgggtattatgttgctcagttactcaaatggtactgtattgtttatatttgtaccccaaataacatcgtctgtactttctgttttctgtattgtatttgtgcaggattctttaggctttatcagtgtaatctctgccttttaagatatgtacagaaaatgtccatataaatttccattgaagtcgaatgatactgagaagcctgtaaagaggagaaaaaaacataagctgtgtttccccataagtttttttaaattgtatattgtatttgtagtaatattccaaaagaatgtaaataggaaatagaagagtgatgcttatgttaagtcctaacactacagtagaagaatggaagcagtgcaaataaattacatttttcccaagtgccagtggcatattttaaaataaagtgtatacgttggaatgagtcatgccatatgtagttgctgtagatggcaactagaacctttgagttacaagagtctttagaagttttctaaccctgcctagtgcaagttacaatattatagcgtgttcggggagtgccctcctgtctgcaggtgtgtctctgtgcctgggggcttttctccacatgcttaggggtgtgggtcttccattggggcatgatggacctgtctacaggtgatctctgttgcctttgggtcagcacatttgttagtctcctgggggtgaaaacttggcttacaagagaactggaaaaatgatgagatgtggtccccaaacccttgattgactctggggaggggctttgtgaataggattgctctcacattaaagatagttacttcaatttgaaggctggatttagggatttttttttttccttataacaaagacatcaccaggatatgaagcttttgttgaaagttggaaaaaaagtgaaattaaagacattcccagacaaa

SEQ ID NO: 4277 - DNA, 1653 bp, Homo sapiens
  source 1..1653: mol_type = genomic DNA
aaagggccggagcgaggccgccgcggcggctagggaggtggggcgaggcgaggtttgctggggtgaggcagcggcgcggccgggccgggccgggccacaggcggtggcggcgggaccatggaggcggcggtcgctgctccgcgtccccggctgctcctcctcgtgctggcggcggcggcggcggcggcggcggcgctgctcccgggggcgacggcgttacagtgtttctgccacctctgtacaaaagacaattttacttgtgtgacagatgggctctgctttgtctctgtcacagagaccacagacaaagttatacacaacagcatgtgtatagctgaaattgacttaattcctcgagataggccgtttgtatgtgcaccctcttcaaaaactgggtctgtgactacaacatattgctgcaatcaggaccattgcaataaaatagaacttccaactactgtaaagtcatcacctggccttggtcctgtggaactggcagctgtcattgctggaccagtgtgcttcgtctgcatctcactcatgttgatggtctatatctgccacaaccgcactgtcattcaccatcgagtgccaaatgaagaggacccttcattagatcgcccttttatttcagagggtactacgttgaaagacttaatttatgatatgacaacgtcaggttctggctcaggtttaccattgcttgttcagagaacaattgcgagaactattgtgttacaagaaagcattggcaaaggtcgatttggagaagtttggagaggaaagtggcggggagaagaagttgctgttaagatattctcctctagagaagaacgttcgtggttccgtgaggcagagatttatcaaactgtaatgttacgtcatgaaaacatcctgggatttatagcagcagacaataaagacaatggtacttggactcagctctggttggtgtcagattatcatgagcatggatccctttttgattacttaaacagatacacagttactgtggaaggaatgataaaacttgctctgtccacggcgagcggtcttgcccatcttcacatggagattgttggtacccaaggaaagccagccattgctccaaaccacagagtgggaacaaaaaggtacatggcccctgaagttctcgatgattccataaatatgaaacattttgaatccttcaaacgtgctgacatctatgcaatgggcttagtattctgggaaattgctcgacgatgttccattggtggaattcatgaagattaccaactgccttattatgatcttgtaccttctgacccatcagttgaagaaatgagaaaagttgtttgtgaacagaagttaaggccaaatatcccaaacagatggcagagctgtgaagccttgagagtaatggctaaaattatgagagaatgttggtatgccaatggagcagctaggcttacagcattgcggattaagaaaacattatcgcaactcagtcaacaggaaggcatcaaaatgtaattctacagctttgcctgaactctccttttttcttcagatctgctcctgggttttaatttgggaggtcaattgttctacctcactgagagggaacagaaggatattgcttccttttgcagcagtgtaataaagtcaatt

SEQ ID NO: 4278 - DNA, 1491 bp, Homo sapiens
  source 1..1491: mol_type = genomic DNA
atggaggcggcggtcgctgctccgcgtccccggctgctcctcgcttccacgtcgttacagtgtttctgccacctctgtacaaaagacaattttacttgtgtgacagatgggctctgctttgtctctgtcacagagaccacagacaaagttatacacaacagcatgtgtatagctgaaattgacttaattcctcgagataggccgtttgtatgtgcaccctcttcaaaaactgggtctgtgactacaacatattgctgcaatcaggaccattgcaataaaatagaacttccaactactgtaaagtcatcacctggccttggtcctgtggaactggcagctgtcattgctggaccagtgtgcttcgtctgcatctcactcatgttgatggtctatatctgccacaaccgcactgtcattcaccatcgagtgccaaatgaagaggacccttcattagatcgcccttttatttcagagggtactacgttgaaagacttaatttatgatatgacaacgtcaggttctggctcaggtttaccattgcttgttcagagaacaattgcgagaactattgtgttacaagaaagcattggcaaaggtcgatttggagaagtttggagaggaaagtggcggggagaagaagttgctgttaagatattctcctctagagaagaacgttcgtggttccgtgaggcagagatttatcaaactgtaatgttacgtcatgaaaacatcctgggatttatagcagcagacaataaagacaatggtacttggactcagctctggttggtgtcagattatcatgagcatggatccctttttgattacttaaacagatacacagttactgtggaaggaatgataaaacttgctctgtccacggcgagcggtcttgcccatcttcacatggagattgttggtacccaaggaaagccagccattgctccaaaccacagagtgggaacaaaaaggtacatggcccctgaagttctcgatgattccataaatatgaaacattttgaatccttcaaacgtgctgacatctatgcaatgggcttagtattctgggaaattgctcgacgatgttccattggtggaattcatgaagattaccaactgccttattatgatcttgtaccttctgacccatcagttgaagaaatgagaaaagttgtttgtgaacagaagttaaggccaaatatcccaaacagatggcagagctgtgaagccttgagagtaatggctaaaattatgagagaatgttggtatgccaatggagcagctaggcttacagcattgcggattaagaaaacattatcgcaactcagtcaacaggaaggcatcaaaatgtaattctacagctttgcctgaactctccttttttcttcagatctgctcctgggttttaatttgggaggtcaattgttctacctcactgagagggaacagaaggatattgcttccttttgcagcagtgtaataaagtcaatt

SEQ ID NO: 4279 - DNA, 1538 bp, Homo sapiens
  source 1..1538: mol_type = genomic DNA
agattgacagaaatgactaatacaggtatctggcctcaaggagtttacagtttcataggagaaagaaaaacaaaactagcaattctgcgttacagtgtttctgccacctctgtacaaaagacaattttacttgtgtgacagatgggctctgctttgtctctgtcacagagaccacagacaaagttatacacaacagcatgtgtatagctgaaattgacttaattcctcgagataggccgtttgtatgtgcaccctcttcaaaaactgggtctgtgactacaacatattgctgcaatcaggaccattgcaataaaatagaacttccaactactgtaaagtcatcacctggccttggtcctgtggaactggcagctgtcattgctggaccagtgtgcttcgtctgcatctcactcatgttgatggtctatatctgccacaaccgcactgtcattcaccatcgagtgccaaatgaagaggacccttcattagatcgcccttttatttcagagggtactacgttgaaagacttaatttatgatatgacaacgtcaggttctggctcaggtttaccattgcttgttcagagaacaattgcgagaactattgtgttacaagaaagcattggcaaaggtcgatttggagaagtttggagaggaaagtggcggggagaagaagttgctgttaagatattctcctctagagaagaacgttcgtggttccgtgaggcagagatttatcaaactgtaatgttacgtcatgaaaacatcctgggatttatagcagcagacaataaagacaatggtacttggactcagctctggttggtgtcagattatcatgagcatggatccctttttgattacttaaacagatacacagttactgtggaaggaatgataaaacttgctctgtccacggcgagcggtcttgcccatcttcacatggagattgttggtacccaaggaaagccagccattgctcatagagatttgaaatcaaagaatatcttggtaaagaagaatggaacttgctgtattgcagacttaggactggcagtaagacatgattcagccacagataccattgatattgctccaaaccacagagtgggaacaaaaaggtacatggcccctgaagttctcgatgattccataaatatgaaacattttgaatccttcaaacgtgctgacatctatgcaatgggcttagtattctgggaaattgctcgacgatgttccattggtggaattcatgaagattaccaactgccttattatgatcttgtaccttctgacccatcagttgaagaaatgagaaaagttgtttgtgaacagaagttaaggccaaatatcccaaacagatggcagagctgtgaagccttgagagtaatggctaaaattatgagagaatgttggtatgccaatggagcagctaggcttacagcattgcggattaagaaaacattatcgcaactcagtcaacaggaaggcatcaaaatgtaattctacagctttgcctgaactctccttttttcttca

SEQ ID NO: 4280 - DNA, 1002 bp, Homo sapiens
  source 1..1002: mol_type = genomic DNA
ctccctgccctggccaaggaggaggctgaaagagcctgagctgtgccctctccattccactgctgtggcagggtcagaaatcttggatagagaaaaccttttgcaaacgggaatgtatctttgtaattcctagcatgaaagactctaacaggtgttgctgtggccagttcaccaaccagcatatcccccctctgccaagtgcaacacccagcaaaaatgaagaggaaagcaaacaggtggagactcagcctgagaaatggtctgttgccaagcacacccagagctacccaacagattcctatggagttcttgaattccagggtggcggatattccaataaagccatggtgagaaaggcattcagacatggtgccactaggatcacagctttcattggcggccagtctcccagccccaaactgcagatacctggtcttcttcatggctgtggctcaatcttcctagatatttcattgaaaaaccaagagatatatctgtgcacatggcttttagccatgaggcttggaaactggacaccactgtaaagaacatctagtgtcccgtaaatccataccaaagctctgaatccacaaaccaggctctggcccaaccctgcaaacacactccattgctccatcttcagtaaaggaagacaaattcatttttctaataactgtggacctgcagcccccttagatgtgttgagagtctttggaaatattttcctctgaggtctgtccacagcttccctgggcctgcgctcagctggcccgagaaggaccaaggtccctcacatttgcatgtaaacagggagtgccctctgcccttccagtgagccctgccagcgtgggggaggcttcagctctgtgatccgttccagctcactctgaattacactcctacatgcccagtcacagactttttgcaatttcattttatttcactggcccaacatcattgttaaaataaaatttagctgtgttccaaatgctgcaatataca

SEQ ID NO: 4281 - DNA, 5514 bp, Homo sapiens
  source 1..5514: mol_type = genomic DNA
gccctggccaaggaggaggctgaaagagcctgagctgtgccctctccattccactgctgtggcaggttctagaagatttctgaggactcagcagtaacttgcagtgctggactgaggctatttccttatatcaactttttgaaaactcatgggtcagaaatcttggatagagaaaaccttttgcaaacgggaatgtatctttgtaattcctagcatgaaagactctaacaggtgttgctgtggccagttcaccaaccagcatatcccccctctgccaagtgcaacacccagcaaaaatgaagaggaaagcaaacaggtggagactcagcctgagaaatggtctgttgccaagcacacccagagctacccaacagattcctatggagttcttgaattccagggtggcggatattccaataaagccatgtatatccgtgtatcctatgacaccaagccagactcactgctccatctcatggtgaaagattggcagctggaactccccaagctcttaatatctgtgcatggaggcctccagaactttgagatgcagcccaagctgaaacaagtctttgggaaaggcctgatcaaggctgctatgaccaccggggcctggatcttcaccgggggtgtcagcacaggtgttatcagccacgtaggggatgccttgaaagaccactcctccaagtccagaggccgggtttgtgctataggaattgctccatggggcatcgtggagaataaggaagacctggttggaaaggatgtaacaagagtgtaccagaccatgtccaaccctctaagtaagctctctgtgctcaacaactcccacacccacttcatcctggctgacaatggcaccctgggcaagtatggcgccgaggtgaagctgcgaaggctgctggaaaagcacatctccctgcagaagatcaacacaagactggggcagggcgtgcccctcgtgggtctcgtggtggaggggggccctaacgtggtgtccatcgtcttggaatacctgcaagaagagcctcccatccctgtggtgatttgtgatggcagcggacgtgcctcggacatcctgtcctttgcgcacaagtactgtgaagaaggcggaataataaatgagtccctcagggagcagcttctagttaccattcagaaaacatttaattataataaggcacaatcacatcagctgtttgcaattataatggagtgcatgaagaagaaagaactcgtcactgtgttcagaatgggttctgagggccagcaggacatcgagatggcaattttaactgccctgctgaaaggaacaaacgtatctgctccagatcagctgagcttggcactggcttggaaccgcgtggacatagcacgaagccagatctttgtctttgggccccactggccgcccctgggaagcctggcacccccgacggacagcaaagccacggagaaggagaagaagccacccatggccaccaccaagggaggaagaggaaaagggaaaggcaagaagaaagggaaagtgaaagaggaagtggaggaagaaactgacccccggaagatagagctgctgaactgggtgaatgctttggagcaagcgatgctagatgctttagtcttagatcgtgtcgactttgtgaagctcctgattgaaaacggagtgaacatgcaacactttctgaccattccgaggctggaggagctttataacacaagactgggtccaccaaacacacttcatctgctggtgagggatgtgaaaaagagcaaccttccgcctgattaccacatcagcctcatagacatcgggctcgtgctggagtacctcatgggaggagcctaccgctgcaactacactcggaaaaactttcggaccctttacaacaacttgtttggaccaaagaggcctaaagctcttaaacttctgggaatggaagatgatgagcctccagctaaagggaagaaaaagaaaaagaagaaaaaggaggaagagatcgacattgatgtggacgaccctgccgtgagtcggttccagtatcccttccacgagctgatggtgtgggcagtgctgatgaaacgccagaaaatggcagtgttcctctggcagcgaggggaagagagcatggccaaggccctggtggcctgcaagctctacaaggccatggcccacgagtcctccgagagtgatctggtggatgacatctcccaggacttggataacaattccaaagacttcggccagcttgctttggagttattagaccagtcctataagcatgacgagcagatcgctatgaaactcctgacctacgagctgaaaaactggagcaactcgacctgcctcaaactggccgtggcagccaaacaccgggacttcattgctcacacctgcagccagatgctgctgaccgatatgtggatgggaagactgcggatgcggaagaaccccggcctgaaggttatcatggggattcttctaccccccaccatcttgtttttggaatttcgcacatatgatgatttctcgtatcaaacatccaaggaaaatgaggatggcaaagaaaaagaagaggaaaatacggatgcaaatgcagatgctggctcaagaaagggggatgaggagaacgagcacaaaaaacagagaagtattcccatcggaacaaagatctgtgaattctataacgcgcccattgtcaagttctggttttacacaatatcatacttgggctacctgctgctgtttaactacgtcatcctggtgcggatggatggctggccgtccctccaggagtggatcgtcatctcctacatcgtgagcctggcgttagagaagatacgagagatcctcatgtcagaaccaggcaaactcagccagaaaatcaaagtttggcttcaggagtactggaacatcacagatctcgtggccatttccacattcatgattggagcaattcttcgcctacagaaccagccctacatgggctatggccgggtgatctactgtgtggatatcatcttctggtacatccgtgtcctggacatctttggtgtcaacaagtatctggggccatacgtgatgatgattggaaagatgatgatcgacatgctgtactttgtggtcatcatgctggtcgtgctcatgagtttcggagtagcccgtcaagccattctgcatccagaggagaagccctcttggaaactggcccgaaacatcttctacatgccctactggatgatctatggagaggtgtttgcagaccagatagacctctacgccatggaaattaatcctccttgtggtgagaacctatatgatgaggagggcaagcggcttcctccctgtatccccggcgcctggctcactccagcactcatggcgtgctatctactggtcgccaacatcctgctggtgaacctgctgattgctgtgttcaacaataccttctttgaagtaaaatcaatatccaaccaggtgtggaagttccagcgatatcagctgattatgacatttcatgacaggccagtcctgcccccaccgatgatcattttaagccacatctacatcatcattatgcgtctcagcggccgctgcaggaaaaagagagaaggggaccaagaggaacgggatcgtggattgaagctcttccttagcgacgaggagctaaagaggctgcatgagttcgaggagcagtgcgtgcaggagcacttccgggagaaggaggatgagcagcagtcgtccagcgacgagcgcatccgggtcacttctgaaagagttgaaaatatgtcaatgaggttggaagaaatcaatgaaagagaaacttttatgaaaacttccctgcagactgttgaccttcgacttgctcagctagaagaattatctaacagaatggtgaatgctcttgaaaatcttgcgggaatcgacaggtctgacctgatccaggcacggtcccgggcttcttctgaatgtgaggcaacgtatcttctccggcaaagcagcatcaatagcgctgatggctacagcttgtatcgatatcattttaacggagaagagttattatttgaggatacatctctctccacgtcaccagggacaggagtcaggaaaaaaacctgttccttccgtataaaggaagagaaggacgtgaaaacgcacctagtcccagaatgtcagaacagtcttcacctttcactgggcacaagcacatcagcaaccccagatggcagtcaccttgcagtagatgacttaaagaacgctgaagagtcaaaattaggtccagatattgggatttcaaaggaagatgatgaaagacagacagactctaaaaaagaagaaactatttccccaagtttaaataaaacagatgtgatacatggacaggacaaatcagatgttcaaaacactcagctaacagtggaaacgacaaatatagaaggcactatttcctatcccctggaagaaaccaaaattacacgctatttccccgatgaaacgatcaatgcttgtaaaacaatgaagtccagaagcttcgtctattcccggggaagaaagctggtcggtggggttaaccaggatgtagagtacagttcaatcacggaccagcaattgacgacggaatggcaatgccaagttcaaaagatcacgcgctctcatagcacagatattccttacattgtgtcggaagctgcagtgcaagctgagcataaagagcagtttgcagatatgcaagatgaacaccatgtcgctgaagcaattcctcgaatccctcgcttgtccctaaccattactgacagaaatgggatggaaaacttactgtctgtgaagccagatcaaactttgggattcccatctctcaggtcaaaaagtttacatggacatcctaggaatgtgaaatccattcagggaaagttagacagatctggacatgccagtagtgtaagcagcttagtaattgtgtctggaatgacagcagaagaaaaaaaggttaagaaagagaaagcttccacagaaactgaatgctagtctgttttgtttctttaatttttttttttaacagtcagaaccactaatgggtgtcatcttggccatctaaacatcatcaatttctaaaaacattttccttaaaaaattttggaaattcagacttgatttacaatttaatgcactaaaagtagtattttgttagcatatgttagtaggcttagttttttcagttgcagtagtatcaaatgaaagtgatgatactgtaacgaagataaattggctaatcagtatacaagattatacaatctctttattactgagggccaccaaatagcctaggaagtgccctcgagcactgaagtcaccattaggtcacttaagaagtaagcaactagctgggcacagtggctcatgcctgtaatcctagcactttgggaggccaaggcagaaagatagcttgagtccaggagtttgagaccagcctgggcaacatagtgataccccatctcttaaaaaaaaaaaaaaaa

SEQ ID NO: 4282 - DNA, 5284 bp, Homo sapiens
  source 1..5284: mol_type = genomic DNA
atcaagacatcaaaaaggtgttgctgtggccagttcaccaaccagcatatcccccctctgccaagtgcaacacccagcaaaaatgaagaggaaagcaaacaggtggagactcagcctgagaaatggtctgttgccaagcacacccagagctacccaacagattcctatggagttcttgaattccagggtggcggatattccaataaagccatgtatatccgtgtatcctatgacaccaagccagactcactgctccatctcatggtgaaagattggcagctggaactccccaagctcttaatatctgtgcatggaggcctccagaactttgagatgcagcccaagctgaaacaagtctttgggaaaggcctgatcaaggctgctatgaccaccggggcctggatcttcaccgggggtgtcagcacaggtgttatcagccacgtaggggatgccttgaaagaccactcctccaagtccagaggccgggtttgtgctataggaattgctccatggggcatcgtggagaataaggaagacctggttggaaaggatgtaacaagagtgtaccagaccatgtccaaccctctaagtaagctctctgtgctcaacaactcccacacccacttcatcctggctgacaatggcaccctgggcaagtatggcgccgaggtgaagctgcgaaggctgctggaaaagcacatctccctgcagaagatcaacacaagactggggcagggcgtgcccctcgtgggtctcgtggtggaggggggccctaacgtggtgtccatcgtcttggaatacctgcaagaagagcctcccatccctgtggtgatttgtgatggcagcggacgtgcctcggacatcctgtcctttgcgcacaagtactgtgaagaaggcggaataataaatgagtccctcagggagcagcttctagttaccattcagaaaacatttaattataataaggcacaatcacatcagctgtttgcaattataatggagtgcatgaagaagaaagaactcgtcactgtgttcagaatgggttctgagggccagcaggacatcgagatggcaattttaactgccctgctgaaaggaacaaacgtatctgctccagatcagctgagcttggcactggcttggaaccgcgtggacatagcacgaagccagatctttgtctttgggccccactggccgcccctgggaagcctggcacccccgacggacagcaaagccacggagaaggagaagaagccacccatggccaccaccaagggaggaagaggaaaagggaaaggcaagaagaaagggaaagtgaaagaggaagtggaggaagaaactgacccccggaagatagagctgctgaactgggtgaatgctttggagcaagcgatgctagatgctttagtcttagatcgtgtcgactttgtgaagctcctgattgaaaacggagtgaacatgcaacactttctgaccattccgaggctggaggagctttataacacaagactgggtccaccaaacacacttcatctgctggtgagggatgtgaaaaagagcaaccttccgcctgattaccacatcagcctcatagacatcgggctcgtgctggagtacctcatgggaggagcctaccgctgcaactacactcggaaaaactttcggaccctttacaacaacttgtttggaccaaagaggcctaaagctcttaaacttctgggaatggaagatgatgagcctccagctaaagggaagaaaaagaaaaagaagaaaaaggaggaagagatcgacattgatgtggacgaccctgccgtgagtcggttccagtatcccttccacgagctgatggtgtgggcagtgctgatgaaacgccagaaaatggcagtgttcctctggcagcgaggggaagagagcatggccaaggccctggtggcctgcaagctctacaaggccatggcccacgagtcctccgagagtgatctggtggatgacatctcccaggacttggataacaattccaaagacttcggccagcttgctttggagttattagaccagtcctataagcatgacgagcagatcgctatgaaactcctgacctacgagctgaaaaactggagcaactcgacctgcctcaaactggccgtggcagccaaacaccgggacttcattgctcacacctgcagccagatgctgctgaccgatatgtggatgggaagactgcggatgcggaagaaccccggcctgaaggttatcatggggattcttctaccccccaccatcttgtttttggaatttcgcacatatgatgatttctcgtatcaaacatccaaggaaaatgaggatggcaaagaaaaagaagaggaaaatacggatgcaaatgcagatgctggctcaagaaagggggatgaggagaacgagcacaaaaaacagagaagtattcccatcggaacaaagatctgtgaattctataacgcgcccattgtcaagttctggttttacacaatatcatacttgggctacctgctgctgtttaactacgtcatcctggtgcggatggatggctggccgtccctccaggagtggatcgtcatctcctacatcgtgagcctggcgttagagaagatacgagagatcctcatgtcagaaccaggcaaactcagccagaaaatcaaagtttggcttcaggagtactggaacatcacagatctcgtggccatttccacattcatgattggagcaattcttcgcctacagaaccagccctacatgggctatggccgggtgatctactgtgtggatatcatcttctggtacatccgtgtcctggacatctttggtgtcaacaagtatctggggccatacgtgatgatgattggaaagatgatgatcgacatgctgtactttgtggtcatcatgctggtcgtgctcatgagtttcggagtagcccgtcaagccattctgcatccagaggagaagccctcttggaaactggcccgaaacatcttctacatgccctactggatgatctatggagaggtgtttgcagaccagatagacctctacgccatggaaattaatcctccttgtggtgagaacctatatgatgaggagggcaagcggcttcctccctgtatccccggcgcctggctcactccagcactcatggcgtgctatctactggtcgccaacatcctgctggtgaacctgctgattgctgtgttcaacaataccttctttgaagtaaaatcaatatccaaccaggtgtggaagttccagcgatatcagctgattatgacatttcatgacaggccagtcctgcccccaccgatgatcattttaagccacatctacatcatcattatgcgtctcagcggccgctgcaggaaaaagagagaaggggaccaagaggaacgggatcgtggattgaagctcttccttagcgacgaggagctaaagaggctgcatgagttcgaggagcagtgcgtgcaggagcacttccgggagaaggaggatgagcagcagtcgtccagcgacgagcgcatccgggtcacttctgaaagagttgaaaatatgtcaatgaggttggaagaaatcaatgaaagagaaacttttatgaaaacttccctgcagactgttgaccttcgacttgctcagctagaagaattatctaacagaatggtgaatgctcttgaaaatcttgcgggaatcgacaggtctgacctgatccaggcacggtcccgggcttcttctgaatgtgaggcaacgtatcttctccggcaaagcagcatcaatagcgctgatggctacagcttgtatcgatatcattttaacggagaagagttattatttgaggatacatctctctccacgtcaccagggacaggagtcaggaaaaaaacctgttccttccgtataaaggaagagaaggacgtgaaaacgcacctagtcccagaatgtcagaacagtcttcacctttcactgggcacaagcacatcagcaaccccagatggcagtcaccttgcagtagatgacttaaagaacgctgaagagtcaaaattaggtccagatattgggatttcaaaggaagatgatgaaagacagacagactctaaaaaagaagaaactatttccccaagtttaaataaaacagatgtgatacatggacaggacaaatcagatgttcaaaacactcagctaacagtggaaacgacaaatatagaaggcactatttcctatcccctggaagaaaccaaaattacacgctatttccccgatgaaacgatcaatgcttgtaaaacaatgaagtccagaagcttcgtctattcccggggaagaaagctggtcggtggggttaaccaggatgtagagtacagttcaatcacggaccagcaattgacgacggaatggcaatgccaagttcaaaagatcacgcgctctcatagcacagatattccttacattgtgtcggaagctgcagtgcaagctgagcataaagagcagtttgcagatatgcaagatgaacaccatgtcgctgaagcaattcctcgaatccctcgcttgtccctaaccattactgacagaaatgggatggaaaacttactgtctgtgaagccagatcaaactttgggattcccatctctcaggtcaaaaagtttacatggacatcctaggaatgtgaaatccattcagggaaagttagacagatctggacatgccagtagtgtaagcagcttagtaattgtgtctggaatgacagcagaagaaaaaaaggttaagaaagagaaagcttccacagaaactgaatgctagtctgttttgtttctttaatttttttttttaacagtcagaaccactaatgggtgtcatcttggccatctaaacatcatcaatttctaaaaacattttccttaaaaaattttggaaattcagacttgatttacaatttaatgcactaaaagtagtattttgttagcatatgttagtaggcttagttttttcagttgcagtagtatcaaatgaaagtgatgatactgtaacgaagataaattggctaatcagtatacaagattatacaatctctttattactgagggccaccaaatagcctaggaagtgccctcgagcactgaagtcaccattaggtcacttaagaagtaagcaactagctgggcacagtggctcatgcctgtaatcctagcactttgggaggccaaggcagaaagatagcttgagtccaggagtttgagaccagcctgggcaacatagtgataccccatctctt

SEQ ID NO: 4283 - DNA, 5687 bp, Homo sapiens
  source 1..5687: mol_type = genomic DNA
ggaggctgaaagagcctgagctgtgccctctccattccactgctgtggcagggtcagaaatcttggatagagaaaaccttttgcaaacgggaatgtatctttgtaattcctagcatgaaagactctaacaggtgttgctgtggccagttcaccaaccagcatatcccccctctgccaagtgcaacacccagcaaaaatgaagaggaaagcaaacaggtggagactcagcctgagaaatggtctgttgccaagcacacccagagctacccaacagattcctatggagttcttgaattccagggtggcggatattccaataaagccatgtatatccgtgtatcctatgacaccaagccagactcactgctccatctcatggtgaaagattggcagctggaactccccaagctcttaatatctgtgcatggaggcctccagaactttgagatgcagcccaagctgaaacaagtctttgggaaaggcctgatcaaggctgctatgaccaccggggcctggatcttcaccgggggtgtcagcacaggtgttatcagccacgtaggggatgccttgaaagaccactcctccaagtccagaggccgggtttgtgctataggaattgctccatggggcatcgtggagaataaggaagacctggttggaaaggatgtaacaagagtgtaccagaccatgtccaaccctctaagtaagctctctgtgctcaacaactcccacacccacttcatcctggctgacaatggcaccctgggcaagtatggcgccgaggtgaagctgcgaaggctgctggaaaagcacatctccctgcagaagatcaacacaagactggggcagggcgtgcccctcgtgggtctcgtggtggaggggggccctaacgtggtgtccatcgtcttggaatacctgcaagaagagcctcccatccctgtggtgatttgtgatggcagcggacgtgcctcggacatcctgtcctttgcgcacaagtactgtgaagaaggcggaataataaatgagtccctcagggagcagcttctagttaccattcagaaaacatttaattataataaggcacaatcacatcagctgtttgcaattataatggagtgcatgaagaagaaagaactcgtcactgtgttcagaatgggttctgagggccagcaggacatcgagatggcaattttaactgccctgctgaaaggaacaaacgtatctgctccagatcagctgagcttggcactggcttggaaccgcgtggacatagcacgaagccagatctttgtctttgggccccactggccgcccctgggaagcctggcacccccgacggacagcaaagccacggagaaggagaagaagccacccatggccaccaccaagggaggaagaggaaaagggaaaggcaagaagaaagggaaagtgaaagaggaagtggaggaagaaactgacccccggaagatagagctgctgaactgggtgaatgctttggagcaagcgatgctagatgctttagtcttagatcgtgtcgactttgtgaagctcctgattgaaaacggagtgaacatgcaacactttctgaccattccgaggctggaggagctttataacacaagactgggtccaccaaacacacttcatctgctggtgagggatgtgaaaaagagcaaccttccgcctgattaccacatcagcctcatagacatcgggctcgtgctggagtacctcatgggaggagcctaccgctgcaactacactcggaaaaactttcggaccctttacaacaacttgtttggaccaaagaggcctaaagctcttaaacttctgggaatggaagatgatgagcctccagctaaagggaagaaaaagaaaaagaagaaaaaggaggaagagatcgacattgatgtggacgaccctgccgtgagtcggttccagtatcccttccacgagctgatggtgtgggcagtgctgatgaaacgccagaaaatggcagtgttcctctggcagcgaggggaagagagcatggccaaggccctggtggcctgcaagctctacaaggccatggcccacgagtcctccgagagtgatctggtggatgacatctcccaggacttggataacaattccaaagacttcggccagcttgctttggagttattagaccagtcctataagcatgacgagcagatcgctatgaaactcctgacctacgagctgaaaaactggagcaactcgacctgcctcaaactggccgtggcagccaaacaccgggacttcattgctcacacctgcagccagatgctgctgaccgatatgtggatgggaagactgcggatgcggaagaaccccggcctgaaggttatcatggggattcttctaccccccaccatcttgtttttggaatttcgcacatatgatgatttctcgtatcaaacatccaaggaaaatgaggatggcaaagaaaaagaagaggaaaatacggatgcaaatgcagatgctggctcaagaaagggggatgaggagaacgagcacaaaaaacagagaagtattcccatcggaacaaagatctgtgaattctataacgcgcccattgtcaagttctggttttacacaatatcatacttgggctacctgctgctgtttaactacgtcatcctggtgcggatggatggctggccgtccctccaggagtggatcgtcatctcctacatcgtgagcctggcgttagagaagatacgagagatcctcatgtcagaaccaggcaaactcagccagaaaatcaaagtttggcttcaggagtactggaacatcacagatctcgtggccatttccacattcatgattggagcaattcttcgcctacagaaccagccctacatgggctatggccgggtgatctactgtgtggatatcatcttctggtacatccgtgtcctggacatctttggtgtcaacaagtatctggggccatacgtgatgatgattggaaagatgatgatcgacatgctgtactttgtggtcatcatgctggtcgtgctcatgagtttcggagtagcccgtcaagccattctgcatccagaggagaagccctcttggaaactggcccgaaacatcttctacatgccctactggatgatctatggagaggtgtttgcagaccagatagacctctacgccatggaaattaatcctccttgtggtgagaacctatatgatgaggagggcaagcggcttcctccctgtatccccggcgcctggctcactccagcactcatggcgtgctatctactggtcgccaacatcctgctggtgaacctgctgattgctgtgttcaacaataccttctttgaagtaaaatcaatatccaaccaggtgtggaagttccagcgatatcagctgattatgacatttcatgacaggccagtcctgcccccaccgatgatcattttaagccacatctacatcatcattatgcgtctcagcggccgctgcaggaaaaagagagaaggggaccaagaggaacgggatcgtggattgaagctcttccttagcgacgaggagctaaagaggctgcatgagttcgaggagcagtgcgtgcaggagcacttccgggagaaggaggatgagcagcagtcgtccagcgacgagcgcatccgggtcacttctgaaagagttgaaaatatgtcaatgaggttggaagaaatcaatgaaagagaaacttttatgaaaacttccctgcagactgttgaccttcgacttgctcagctagaagaattatctaacagaatggtgaatgctcttgaaaatcttgcgggaatcgacaggtctgacctgatccaggcacggtcccgggcttcttctgaatgtgaggcaacgtatcttctccggcaaagcagcatcaatagcgctgatggctacagcttgtatcgatatcattttaacggagaagagttattatttgaggatacatctctctccacgtcaccagggacaggagtcaggaaaaaaacctgttccttccgtataaaggaagagaaggacgtgaaaacgcacctagtcccagaatgtcagaacagtcttcacctttcactgggcacaagcacatcagcaaccccagatggcagtcaccttgcagtagatgacttaaagaacgctgaagagtcaaaattaggtccagatattgggatttcaaaggaagatgatgaaagacagacagactctaaaaaagaagaaactatttccccaagtttaaataaaacagatgtgatacatggacaggacaaatcagatgttcaaaacactcagctaacagtggaaacgacaaatatagaaggcactatttcctatcccctggaagaaaccaaaattacacgctatttccccgatgaaacgatcaatgcttgtaaaacaatgaagtccagaagcttcgtctattcccggggaagaaagctggtcggtggggttaaccaggatgtagagtacagttcaatcacggaccagcaattgacgacggaatggcaatgccaagttcaaaagatcacgcgctctcatagcacagatattccttacattgtgtcggaagctgcagtgcaagctgagcataaagagcagtttgcagatatgcaagatgaacaccatgtcgctgaagcaattcctcgaatccctcgcttgtccctaaccattactgacagaaatgggatggaaaacttactgtctgtgaagccagatcaaactttgggattcccatctctcaggtcaaaaagtttacatggacatcctaggaatgtgaaatccattcagggaaagttagacagatctggacatgccagtagtgtaagcagcttagtaattgtgtctggaatgacagcagaagaaaaaaaggttaagaaagagaaagcttccacagaaactgaatgctagtctgttttgtttctttaatttttttttttaacagtcagaaccactaatgggtgtcatcttggccatctaaacatcatcaatttctaaaaacattttccttaaaaaattttggaaattcagacttgatttacaatttaatgcactaaaagtagtattttgttagcatatgttagtaggcttagttttttcagttgcagtagtatcaaatgaaagtgatgatactgtaacgaagataaattggctaatcagtatacaagattatacaatctctttattactgagggccaccaaatagcctaggaagtgccctcgagcactgaagtcaccattaggtcacttaagaagtaagcaactagctgggcacagtggctcatgcctgtaatcctagcactttgggaggccaaggcagaaagatagcttgagtccaggagtttgagaccagcctgggcaacatagtgataccccatctcttaaaaaaaaaaaaaaaagtaagcaactgtgtaagaaagagaaactaaagagaaagcaaacatgaaaaaagggaggggtggaaagaagaaaaataaaattgtgaggcacaataagtgggaaggagccacaaatatgtttttatggggtctttgttttctgttttaatgttttattttaaactacacaatgggaaaaaaagtacacaattatatcaaacatcatactctaataatttagggtgacctagagttttgttaatgtgcaaaaataaagtatccaatatgcatttt

SEQ ID NO: 4284 - DNA, 5715 bp, Homo sapiens
  source 1..5715: mol_type = genomic DNA
ctaaatctcttccctctaaaccttttggggatggagggattaagcctgattacagatgttgggggtggtagcaggagtcgggcaggaggggccaccaaaagccagcacatgctcctcctaggctgaaccagcctccggccggcctcgccccaggatctcggccccctcgcccagtgcgtggggctgccgccgagtgtggggctgccgccgagtgtgtggctccgctcctgcccacccagggagggcagcccctgtgccactggcctggccacccgagggagtcagcagggtggctcacaggctcactgagagagatgagctccttcaagcggggctcgctcaagagctccacatcagggtcgcagaagggtcagaaatcttggatagagaaaaccttttgcaaacgggaatgtatctttgtaattcctagcatgaaagactctaacaggtgttgctgtggccagttcaccaaccagcatatcccccctctgccaagtgcaacacccagcaaaaatgaagaggaaagcaaacaggtggagactcagcctgagaaatggtctgttgccaagcacacccagagctacccaacagattcctatggagttcttgaattccagggtggcggatattccaataaagccatgtatatccgtgtatcctatgacaccaagccagactcactgctccatctcatggtgaaagattggcagctggaactccccaagctcttaatatctgtgcatggaggcctccagaactttgagatgcagcccaagctgaaacaagtctttgggaaaggcctgatcaaggctgctatgaccaccggggcctggatcttcaccgggggtgtcagcacaggtgttatcagccacgtaggggatgccttgaaagaccactcctccaagtccagaggccgggtttgtgctataggaattgctccatggggcatcgtggagaataaggaagacctggttggaaaggatgtaacaagagtgtaccagaccatgtccaaccctctaagtaagctctctgtgctcaacaactcccacacccacttcatcctggctgacaatggcaccctgggcaagtatggcgccgaggtgaagctgcgaaggctgctggaaaagcacatctccctgcagaagatcaacacaagactggggcagggcgtgcccctcgtgggtctcgtggtggaggggggccctaacgtggtgtccatcgtcttggaatacctgcaagaagagcctcccatccctgtggtgatttgtgatggcagcggacgtgcctcggacatcctgtcctttgcgcacaagtactgtgaagaaggcggaataataaatgagtccctcagggagcagcttctagttaccattcagaaaacatttaattataataaggcacaatcacatcagctgtttgcaattataatggagtgcatgaagaagaaagaactcgtcactgtgttcagaatgggttctgagggccagcaggacatcgagatggcaattttaactgccctgctgaaaggaacaaacgtatctgctccagatcagctgagcttggcactggcttggaaccgcgtggacatagcacgaagccagatctttgtctttgggccccactggccgcccctgggaagcctggcacccccgacggacagcaaagccacggagaaggagaagaagccacccatggccaccaccaagggaggaagaggaaaagggaaaggcaagaagaaagggaaagtgaaagaggaagtggaggaagaaactgacccccggaagatagagctgctgaactgggtgaatgctttggagcaagcgatgctagatgctttagtcttagatcgtgtcgactttgtgaagctcctgattgaaaacggagtgaacatgcaacactttctgaccattccgaggctggaggagctttataacacaagactgggtccaccaaacacacttcatctgctggtgagggatgtgaaaaagagcaaccttccgcctgattaccacatcagcctcatagacatcgggctcgtgctggagtacctcatgggaggagcctaccgctgcaactacactcggaaaaactttcggaccctttacaacaacttgtttggaccaaagaggcctaaagctcttaaacttctgggaatggaagatgatgagcctccagctaaagggaagaaaaagaaaaagaagaaaaaggaggaagagatcgacattgatgtggacgaccctgccgtgagtcggttccagtatcccttccacgagctgatggtgtgggcagtgctgatgaaacgccagaaaatggcagtgttcctctggcagcgaggggaagagagcatggccaaggccctggtggcctgcaagctctacaaggccatggcccacgagtcctccgagagtgatctggtggatgacatctcccaggacttggataacaattccaaagacttcggccagcttgctttggagttattagaccagtcctataagcatgacgagcagatcgctatgaaactcctgacctacgagctgaaaaactggagcaactcgacctgcctcaaactggccgtggcagccaaacaccgggacttcattgctcacacctgcagccagatgctgctgaccgatatgtggatgggaagactgcggatgcggaagaaccccggcctgaaggttatcatggggattcttctaccccccaccatcttgtttttggaatttcgcacatatgatgatttctcgtatcaaacatccaaggaaaatgaggatggcaaagaaaaagaagaggaaaatacggatgcaaatgcagatgctggctcaagaaagggggatgaggagaacgagcacaaaaaacagagaagtattcccatcggaacaaagatctgtgaattctataacgcgcccattgtcaagttctggttttacacaatatcatacttgggctacctgctgctgtttaactacgtcatcctggtgcggatggatggctggccgtccctccaggagtggatcgtcatctcctacatcgtgagcctggcgttagagaagatacgagagatcctcatgtcagaaccaggcaaactcagccagaaaatcaaagtttggcttcaggagtactggaacatcacagatctcgtggccatttccacattcatgattggagcaattcttcgcctacagaaccagccctacatgggctatggccgggtgatctactgtgtggatatcatcttctggtacatccgtgtcctggacatctttggtgtcaacaagtatctggggccatacgtgatgatgattggaaagatgatgatcgacatgctgtactttgtggtcatcatgctggtcgtgctcatgagtttcggagtagcccgtcaagccattctgcatccagaggagaagccctcttggaaactggcccgaaacatcttctacatgccctactggatgatctatggagaggtgtttgcagaccagatagacctctacgccatggaaattaatcctccttgtggtgagaacctatatgatgaggagggcaagcggcttcctccctgtatccccggcgcctggctcactccagcactcatggcgtgctatctactggtcgccaacatcctgctggtgaacctgctgattgctgtgttcaacaataccttctttgaagtaaaatcaatatccaaccaggtgtggaagttccagcgatatcagctgattatgacatttcatgacaggccagtcctgcccccaccgatgatcattttaagccacatctacatcatcattatgcgtctcagcggccgctgcaggaaaaagagagaaggggaccaagaggaacgggatcgtggattgaagctcttccttagcgacgaggagctaaagaggctgcatgagttcgaggagcagtgcgtgcaggagcacttccgggagaaggaggatgagcagcagtcgtccagcgacgagcgcatccgggtcacttctgaaagagttgaaaatatgtcaatgaggttggaagaaatcaatgaaagagaaacttttatgaaaacttccctgcagactgttgaccttcgacttgctcagctagaagaattatctaacagaatggtgaatgctcttgaaaatcttgcgggaatcgacaggtctgacctgatccaggcacggtcccgggcttcttctgaatgtgaggcaacgtatcttctccggcaaagcagcatcaatagcgctgatggctacagcttgtatcgatatcattttaacggagaagagttattatttgaggatacatctctctccacgtcaccagggacaggagtcaggaaaaaaacctgttccttccgtataaaggaagagaaggacgtgaaaacgcacctagtcccagaatgtcagaacagtcttcacctttcactgggcacaagcacatcagcaaccccagatggcagtcaccttgcagtagatgacttaaagaacgctgaagagtcaaaattaggtccagatattgggatttcaaaggaagatgatgaaagacagacagactctaaaaaagaagaaactatttccccaagtttaaataaaacagatgtgatacatggacaggacaaatcagatgttcaaaacactcagctaacagtggaaacgacaaatatagaaggcactatttcctatcccctggaagaaaccaaaattacacgctatttccccgatgaaacgatcaatgcttgtaaaacaatgaagtccagaagcttcgtctattcccggggaagaaagctggtcggtggggttaaccaggatgtagagtacagttcaatcacggaccagcaattgacgacggaatggcaatgccaagttcaaaagatcacgcgctctcatagcacagatattccttacattgtgtcggaagctgcagtgcaagctgagcataaagagcagtttgcagatatgcaagatgaacaccatgtcgctgaagcaattcctcgaatccctcgcttgtccctaaccattactgacagaaatgggatggaaaacttactgtctgtgaagccagatcaaactttgggattcccatctctcaggtcaaaaagtttacatggacatcctaggaatgtgaaatccattcagggaaagttagacagatctggacatgccagtagtgtaagcagcttagtaattgtgtctggaatgacagcagaagaaaaaaaggttaagaaagagaaagcttccacagaaactgaatgctagtctgttttgtttctttaatttttttttttaacagtcagaaccactaatgggtgtcatcttggccatctaaacatcatcaatttctaaaaacattttccttaaaaaattttggaaattcagacttgatttacaatttaatgcactaaaagtagtattttgttagcatatgttagtaggcttagttttttcagttgcagtagtatcaaatgaaagtgatgatactgtaacgaagataaattggctaatcagtatacaagattatacaatctctttattactgagggccaccaaatagcctaggaagtgccctcgagcactgaagtcaccattaggtcacttaagaagtaagcaactagctgggcacagtggctcatgcctgtaatcctagcactttgggaggccaaggcagaaagatagcttgagtccaggagtttgagaccagcctgggcaacatagtgataccccatctctt

SEQ ID NO: 4285 - DNA, 4282 bp, Homo sapiens
  source 1..4282: mol_type = genomic DNA
ctccttcaagcggggctcgctcaagagctccacatcagggtcgcagaagggtcagaaatcttggatagagaaaaccttttgcaaacgggaatgtatctttgtaattcctagcatgaaagactctaacaggtgttgctgtggccagttcaccaaccagcatatcccccctctgccaagtgcaacacccagcaaaaatgaagaggaaagcaaacaggtggagactcagcctgagaaatggtctgttgccaagcacacccagagctacccaacagattcctatggagttcttgaattccagggtggcggatattccaataaagccatgtatatccgtgtatcctatgacaccaagccagactcactgctccatctcatggtgaaagattggcagctggaactccccaagctcttaatatctgtgcatggaggcctccagaactttgagatgcagcccaagctgaaacaagtctttgggaaaggcctgatcaaggctgctatgaccaccggggcctggatcttcaccgggggtgtcagcacaggtgttatcagccacgtaggggatgccttgaaagaccactcctccaagtccagaggccgggtttgtgctataggaattgctccatggggcatcgtggagaataaggaagacctggttggaaaggatgtaacaagagtgtaccagaccatgtccaaccctctaagtaagctctctgtgctcaacaactcccacacccacttcatcctggctgacaatggcaccctgggcaagtatggcgccgaggtgaagctgcgaaggctgctggaaaagcacatctccctgcagaagatcaacacaagactggggcagggcgtgcccctcgtgggtctcgtggtggaggggggccctaacgtggtgtccatcgtcttggaatacctgcaagaagagcctcccatccctgtggtgatttgtgatggcagcggacgtgcctcggacatcctgtcctttgcgcacaagtactgtgaagaaggcggaataataaatgagtccctcagggagcagcttctagttaccattcagaaaacatttaattataataaggcacaatcacatcagctgtttgcaattataatggagtgcatgaagaagaaagaactcgtcactgtgttcagaatgggttctgagggccagcaggacatcgagatggcaattttaactgccctgctgaaaggaacaaacgtatctgctccagatcagctgagcttggcactggcttggaaccgcgtggacatagcacgaagccagatctttgtctttgggccccactggccgcccctgggaagcctggcacccccgacggacagcaaagccacggagaaggagaagaagccacccatggccaccaccaagggaggaagaggaaaagggaaaggcaagaagaaagggaaagtgaaagaggaagtggaggaagaaactgacccccggaagatagagctgctgaactgggtgaatgctttggagcaagcgatgctagatgctttagtcttagatcgtgtcgactttgtgaagctcctgattgaaaacggagtgaacatgcaacactttctgaccattccgaggctggaggagctttataacacaagactgggtccaccaaacacacttcatctgctggtgagggatgtgaaaaagagcaaccttccgcctgattaccacatcagcctcatagacatcgggctcgtgctggagtacctcatgggaggagcctaccgctgcaactacactcggaaaaactttcggaccctttacaacaacttgtttggaccaaagaggcctaaagctcttaaacttctgggaatggaagatgatgagcctccagctaaagggaagaaaaagaaaaagaagaaaaaggaggaagagatcgacattgatgtggacgaccctgccgtgagtcggttccagtatcccttccacgagctgatggtgtgggcagtgctgatgaaacgccagaaaatggcagtgttcctctggcagcgaggggaagagagcatggccaaggccctggtggcctgcaagctctacaaggccatggcccacgagtcctccgagagtgatctggtggatgacatctcccaggacttggataacaattccaaagacttcggccagcttgctttggagttattagaccagtcctataagcatgacgagcagatcgctatgaaactcctgacctacgagctgaaaaactggagcaactcgacctgcctcaaactggccgtggcagccaaacaccgggacttcattgctcacacctgcagccagatgctgctgaccgatatgtggatgggaagactgcggatgcggaagaaccccggcctgaaggttatcatggggattcttctaccccccaccatcttgtttttggaatttcgcacatatgatgatttctcgtatcaaacatccaaggaaaatgaggatggcaaagaaaaagaagaggaaaatacggatgcaaatgcagatgctggctcaagaaagggggatgaggagaacgagcacaaaaaacagagaagtattcccatcggaacaaagatctgtgaattctataacgcgcccattgtcaagttctggttttacacaatatcatacttgggctacctgctgctgtttaactacgtcatcctggtgcggatggatggctggccgtccctccaggagtggatcgtcatctcctacatcgtgagcctggcgttagagaagatacgagagatcctcatgtcagaaccaggcaaactcagccagaaaatcaaagtttggcttcaggagtactggaacatcacagatctcgtggccatttccacattcatgattggagcaattcttcgcctacagaaccagccctacatgggctatggccgggtgatctactgtgtggatatcatcttctggtacatccgtgtcctggacatctttggtgtcaacaagtatctggggccatacgtgatgatgattggaaagatgatgatcgacatgctgtactttgtggtcatcatgctggtcgtgctcatgagtttcggagtagcccgtcaagccattctgcatccagaggagaagccctcttggaaactggcccgaaacatcttctacatgccctactggatgatctatggagaggtgtttgcagaccagatagacctctacgccatggaaattaatcctccttgtggtgagaacctatatgatgaggagggcaagcggcttcctccctgtatccccggcgcctggctcactccagcactcatggcgtgctatctactggtcgccaacatcctgctggtgaacctgctgattgctgtgttcaacaataccttctttgaagtaaaatcaatatccaaccaggtgtggaagttccagcgatatcagctgattatgacatttcatgacaggccagtcctgcccccaccgatgatcattttaagccacatctacatcatcattatgcgtctcagcggccgctgcaggaaaaagagagaaggggaccaagaggaacgggatcgtggattgaagctcttccttagcgacgaggagctaaagaggctgcatgagttcgaggagcagtgcgtgcaggagcacttccgggagaaggaggatgagcagcagtcgtccagcgacgagcgcatccgggtcacttctgaaagagttgaaaatatgtcaatgaggttggaagaaatcaatgaaagagaaacttttatgaaaacttccctgcagactgttgaccttcgacttgctcagctagaagaattatctaacagaatggtgaatgctcttgaaaatcttgcgggaatcgacaggtctgacctgatccaggcacggtcccgggcttcttctgaatgtgaggcaacgtatcttctccggcaaagcagcatcaatagcgctgatggctacagcttgtatcgatatcattttaacggagaagagttattatttgaggatacatctctctccacgtcaccagggacaggagtcaggaaaaaaacctgttccttccgtataaaggaagagaaggacgtgaaaacgcacctagtcccagaatgtcagaacagtcttcacctttcactgggcacaagcacatcagcaaccccagatggcagtcaccttgcagtagatgacttaaagaacgctgaagagtcaaaattaggtccagatattgggatttcaaaggaagatgatgaaagacagacagactctaaaaaagaagaaactatttccccaagtttaaataaaacagatgtgatacatggacag

SEQ ID NO: 4286 - DNA, 4584 bp, Homo sapiens
  source 1..4584: mol_type = genomic DNA
atgtatatccgtgtatcctatgacaccaagccagactcactgctccatctcatggtgaaagattggcagctggaactccccaagctcttaatatctgtgcatggaggcctccagaactttgagatgcagcccaagctgaaacaagtctttgggaaaggcctgatcaaggctgctatgaccaccggggcctggatcttcaccgggggtgtcagcacaggtgttatcagccacgtaggggatgccttgaaagaccactcctccaagtccagaggccgggtttgtgctataggaattgctccatggggcatcgtggagaataaggaagacctggttggaaaggatgtaacaagagtgtaccagaccatgtccaaccctctaagtaagctctctgtgctcaacaactcccacacccacttcatcctggctgacaatggcaccctgggcaagtatggcgccgaggtgaagctgcgaaggctgctggaaaagcacatctccctgcagaagatcaacacaagactggggcagggcgtgcccctcgtgggtctcgtggtggaggggggccctaacgtggtgtccatcgtcttggaatacctgcaagaagagcctcccatccctgtggtgatttgtgatggcagcggacgtgcctcggacatcctgtcctttgcgcacaaaataataaatgagtccctcagggagcagcttctagttaccattcagaaaacatttaattataataaggcacaatcacatcagctgtttgcaattataatggagtgcatgaagaagaaagaactcgtcactgtgttcagaatgggttctgagggccagcaggacatcgagatggcaattttaactgccctgctgaaaggaacaaacgtatctgctccagatcagctgagcttggcactggcttggaaccgcgtggacatagcacgaagccagatctttgtctttgggccccactggccgcccctgggaagcctggcacccccgacggacagcaaagccacggagaaggagaagaagccacccatggccaccaccaagggaggaagaggaaaagggaaaggcaagaagaaagggaaagtgaaagaggaagtggaggaagaaactgacccccggaagatagagctgctgaactgggtgaatgctttggagcaagcgatgctagatgctttagtcttagatcgtgtcgactttgtgaagctcctgattgaaaacggagtgaacatgcaacactttctgaccattccgaggctggaggagctttataacacaagactgggtccaccaaacacacttcatctgctggtgagggatgtgaaaaagagcaaccttccgcctgattaccacatcagcctcatagacatcgggctcgtgctggagtacctcatgggaggagcctaccgctgcaactacactcggaaaaactttcggaccctttacaacaacttgtttggaccaaagaggcctaaagctcttaaacttctgggaatggaagatgatgagcctccagctaaagggaagaaaaagaaaaagaagaaaaaggaggaagagatcgacattgatgtggacgaccctgccgtgagtcggttccagtatcccttccacgagctgatggtgtgggcagtgctgatgaaacgccagaaaatggcagtgttcctctggcagcgaggggaagagagcatggccaaggccctggtggcctgcaagctctacaaggccatggcccacgagtcctccgagagtgatctggtggatgacatctcccaggacttggataacaattccaaagacttcggccagcttgctttggagttattagaccagtcctataagcatgacgagcagatcgctatgaaactcctgacctacgagctgaaaaactggagcaactcgacctgcctcaaactggccgtggcagccaaacaccgggacttcattgctcacacctgcagccagatgctgctgaccgatatgtggatgggaagactgcggatgcggaagaaccccggcctgaaggttatcatggggattcttctaccccccaccatcttgtttttggaatttcgcacatatgatgatttctcgtatcaaacatccaaggaaaatgaggatggcaaagaaaaagaagaggaaaatacggatgcaaatgcagatgctggctcaagaaagggggatgaggagaacgagcacaaaaaacagagaagtattcccatcggaacaaagatctgtgaattctataacgcgcccattgtcaagttctggttttacacaatatcatacttgggctacctgctgctgtttaactacgtcatcctggtgcggatggatggctggccgtccctccaggagtggatcgtcatctcctacatcgtgagcctggcgttagagaagatacgagagatcctcatgtcagaaccaggcaaactcagccagaaaatcaaagtttggcttcaggagtactggaacatcacagatctcgtggccatttccacattcatgattggagcaattcttcgcctacagaaccagccctacatgggctatggccgggtgatctactgtgtggatatcatcttctggtacatccgtgtcctggacatctttggtgtcaacaagtatctggggccatacgtgatgatgattggaaagatgatgatcgacatgctgtactttgtggtcatcatgctggtcgtgctcatgagtttcggagtagcccgtcaagccattctgcatccagaggagaagccctcttggaaactggcccgaaacatcttctacatgccctactggatgatctatggagaggtgtttgcagaccagatagacctctacgccatggaaattaatcctccttgtggtgagaacctatatgatgaggagggcaagcggcttcctccctgtatccccggcgcctggctcactccagcactcatggcgtgctatctactggtcgccaacatcctgctggtgaacctgctgattgctgtgttcaacaataccttctttgaagtaaaatcaatatccaaccaggtgtggaagttccagcgatatcagctgattatgacatttcatgacaggccagtcctgcccccaccgatgatcattttaagccacatctacatcatcattatgcgtctcagcggccgctgcaggaaaaagagagaaggggaccaagaggaacgggatcgtggattgaagctcttccttagcgacgaggagctaaagaggctgcatgagttcgaggagcagtgcgtgcaggagcacttccgggagaaggaggatgagcagcagtcgtccagcgacgagcgcatccgggtcacttctgaaagagttgaaaatatgtcaatgaggttggaagaaatcaatgaaagagaaacttttatgaaaacttccctgcagactgttgaccttcgacttgctcagctagaagaattatctaacagaatggtgaatgctcttgaaaatcttgcgggaatcgacaggtctgacctgatccaggcacggtcccgggcttcttctgaatgtgaggcaacgtatcttctccggcaaagcagcatcaatagcgctgatggctacagcttgtatcgatatcattttaacggagaagagttattatttgaggatacatctctctccacgtcaccagggacaggagtcaggaaaaaaacctgttccttccgtataaaggaagagaaggacgtgaaaacgcacctagtcccagaatgtcagaacagtcttcacctttcactgggcacaagcacatcagcaaccccagatggcagtcaccttgcagtagatgacttaaagaacgctgaagagtcaaaattaggtccagatattgggatttcaaaggaagatgatgaaagacagacagactctaaaaaagaagaaactatttccccaagtttaaataaaacagatgtgatacatggacaggacaaatcagatgttcaaaacactcagctaacagtggaaacgacaaatatagaaggcactatttcctatcccctggaagaaaccaaaattacacgctatttccccgatgaaacgatcaatgcttgtaaaacaatgaagtccagaagcttcgtctattcccggggaagaaagctggtcggtggggttaaccaggatgtagagtacagttcaatcacggaccagcaattgacgacggaatggcaatgccaagttcaaaagatcacgcgctctcatagcacagatattccttacattgtgtcggaagctgcagtgcaagctgagcataaagagcagtttgcagatatgcaagatgaacaccatgtcgctgaagcaattcctcgaatccctcgcttgtccctaaccattactgacagaaatgggatggaaaacttactgtctgtgaagccagatcaaactttgggattcccatctctcaggtcaaaaagtttacatggacatcctaggaatgtgaaatccattcagggaaagttagacagatctggacatgccagtagtgtaagcagcttagtaattgtgtctggaatgacagcagaagaaaaaaaggttaagaaagagaaagcttccacagaaactgaatgctag

SEQ ID NO: 4287 - DNA, 3205 bp, Homo sapiens
  source 1..3205: mol_type = genomic DNA
cgagtaggcgcgagctaagcaggaggcggaggcggaggcggagggcgaggggcggggagcgccgcctggagcgcggcaggtcatattgaacattccagatacctatcattactcgatgctgttgataacagcaagatggctttgaactcagggtcaccaccagctattggaccttactatgaaaaccatggataccaaccggaaaacccctatcccgcacagcccactgtggtccccactgtctacgaggtgcatccggctcagtactacccgtcccccgtgccccagtacgccccgagggtcctgacgcaggcttccaaccccgtcgtctgcacgcagcccaaatccccatccgggacagtgtgcacctcaaagactaagaaagcactgtgcatcaccttgaccctggggaccttcctcgtgggagctgcgctggccgctggcctactctggaagttcatgggcagcaagtgctccaactctgggatagagtgcgactcctcaggtacctgcatcaacccctctaactggtgtgatggcgtgtcacactgccccggcggggaggacgagaatcggtgtgttcgcctctacggaccaaacttcatccttcaggtgtactcatctcagaggaagtcctggcaccctgtgtgccaagacgactggaacgagaactacgggcgggcggcctgcagggacatgggctataagaataatttttactctagccaaggaatagtggatgacagcggatccaccagctttatgaaactgaacacaagtgccggcaatgtcgatatctataaaaaactgtaccacagtgatgcctgttcttcaaaagcagtggtttctttacgctgtatagcctgcggggtcaacttgaactcaagccgccagagcaggattgtgggcggcgagagcgcgctcccgggggcctggccctggcaggtcagcctgcacgtccagaacgtccacgtgtgcggaggctccatcatcacccccgagtggatcgtgacagccgcccactgcgtggaaaaacctcttaacaatccatggcattggacggcatttgcggggattttgagacaatctttcatgttctatggagccggataccaagtagaaaaagtgatttctcatccaaattatgactccaagaccaagaacaatgacattgcgctgatgaagctgcagaagcctctgactttcaacgacctagtgaaaccagtgtgtctgcccaacccaggcatgatgctgcagccagaacagctctgctggatttccgggtggggggccaccgaggagaaagggaagacctcagaagtgctgaacgctgccaaggtgcttctcattgagacacagagatgcaacagcagatatgtctatgacaacctgatcacaccagccatgatctgtgccggcttcctgcaggggaacgtcgattcttgccagggtgacagtggagggcctctggtcacttcgaagaacaatatctggtggctgataggggatacaagctggggttctggctgtgccaaagcttacagaccaggagtgtacgggaatgtgatggtattcacggactggatttatcgacaaatgagggcagacggctaatccacatggtcttcgtccttgacgtcgttttacaagaaaacaatggggctggttttgcttccccgtgcatgatttactcttagagatgattcagaggtcacttcatttttattaaacagtgaacttgtctggctttggcactctctgccattctgtgcaggctgcagtggctcccctgcccagcctgctctccctaaccccttgtccgcaaggggtgatggccggctggttgtgggcactggcggtcaagtgtggaggagaggggtggaggctgccccattgagatcttcctgctgagtcctttccaggggccaattttggatgagcatggagctgtcacctctcagctgctggatgacttgagatgaaaaaggagagacatggaaagggagacagccaggtggcacctgcagcggctgccctctggggccacttggtagtgtccccagcctacctctccacaaggggattttgctgatgggttcttagagccttagcagccctggatggtggccagaaataaagggaccagcccttcatgggtggtgacgtggtagtcacttgtaaggggaacagaaacatttttgttcttatggggtgagaatatagacagtgcccttggtgcgagggaagcaattgaaaaggaacttgccctgagcactcctggtgcaggtctccacctgcacattgggtggggctcctgggagggagactcagccttcctcctcatcctccctgaccctgctcctagcaccctggagagtgcacatgccccttggtcctggcagggcgccaagtctggcaccatgttggcctcttcaggcctgctagtcactggaaattgaggtccatgggggaaatcaaggatgctcagtttaaggtacactgtttccatgttatgtttctacacattgctacctcagtgctcctggaaacttagcttttgatgtctccaagtagtccaccttcatttaactctttgaaactgtatcatctttgccaagtaagagtggtggcctatttcagctgctttgacaaaatgactggctcctgacttaacgttctataaatgaatgtgctgaagcaaagtgcccatggtggcggcgaagaagagaaagatgtgttttgttttggactctctgtggtcccttccaatgctgtgggtttccaaccaggggaagggtcccttttgcattgccaagtgccataaccatgagcactactctaccatggttctgcctcctggccaagcaggctggtttgcaagaatgaaatgaatgattctacagctaggacttaaccttgaaatggaaagtcatgcaatcccatttgcaggatctgtctgtgcacatgcctctgtagagagcagcattcccagggaccttggaaacagttggcactgtaaggtgcttgctccccaagacacatcctaaaaggtgttgtaatggtgaaaacgtcttccttctttattgccccttcttatttatgtgaacaactgtttgtctttttttgtatcttttttaaactgtaaagttcaattgtgaaaatgaatatcatgcaaataaattatgcaatttttttttcaaagtaa

SEQ ID NO: 4288 - DNA, 3240 bp, Homo sapiens
  source 1..3240: mol_type = genomic DNA
accagggtcccggctcggggtccgggctggggaggggaacctgggcgcctgggacccgccgatgccccctgccccgcccggaggtgaaagcgggtgtgaggagcgcggcgcggcaggtcatattgaacattccagatacctatcattactcgatgctgttgataacagcaagatggctttgaactcagggtcaccaccagctattggaccttactatgaaaaccatggataccaaccggaaaacccctatcccgcacagcccactgtggtccccactgtctacgaggtgcatccggctcagtactacccgtcccccgtgccccagtacgccccgagggtcctgacgcaggcttccaaccccgtcgtctgcacgcagcccaaatccccatccgggacagtgtgcacctcaaagactaagaaagcactgtgcatcaccttgaccctggggaccttcctcgtgggagctgcgctggccgctggcctactctggaagttcatgggcagcaagtgctccaactctgggatagagtgcgactcctcaggtacctgcatcaacccctctaactggtgtgatggcgtgtcacactgccccggcggggaggacgagaatcggtgtgttcgcctctacggaccaaacttcatccttcaggtgtactcatctcagaggaagtcctggcaccctgtgtgccaagacgactggaacgagaactacgggcgggcggcctgcagggacatgggctataagaataatttttactctagccaaggaatagtggatgacagcggatccaccagctttatgaaactgaacacaagtgccggcaatgtcgatatctataaaaaactgtaccacagtgatgcctgttcttcaaaagcagtggtttctttacgctgtatagcctgcggggtcaacttgaactcaagccgccagagcaggattgtgggcggcgagagcgcgctcccgggggcctggccctggcaggtcagcctgcacgtccagaacgtccacgtgtgcggaggctccatcatcacccccgagtggatcgtgacagccgcccactgcgtggaaaaacctcttaacaatccatggcattggacggcatttgcggggattttgagacaatctttcatgttctatggagccggataccaagtagaaaaagtgatttctcatccaaattatgactccaagaccaagaacaatgacattgcgctgatgaagctgcagaagcctctgactttcaacgacctagtgaaaccagtgtgtctgcccaacccaggcatgatgctgcagccagaacagctctgctggatttccgggtggggggccaccgaggagaaagggaagacctcagaagtgctgaacgctgccaaggtgcttctcattgagacacagagatgcaacagcagatatgtctatgacaacctgatcacaccagccatgatctgtgccggcttcctgcaggggaacgtcgattcttgccagggtgacagtggagggcctctggtcacttcgaagaacaatatctggtggctgataggggatacaagctggggttctggctgtgccaaagcttacagaccaggagtgtacgggaatgtgatggtattcacggactggatttatcgacaaatgagggcagacggctaatccacatggtcttcgtccttgacgtcgttttacaagaaaacaatggggctggttttgcttccccgtgcatgatttactcttagagatgattcagaggtcacttcatttttattaaacagtgaacttgtctggctttggcactctctgccattctgtgcaggctgcagtggctcccctgcccagcctgctctccctaaccccttgtccgcaaggggtgatggccggctggttgtgggcactggcggtcaagtgtggaggagaggggtggaggctgccccattgagatcttcctgctgagtcctttccaggggccaattttggatgagcatggagctgtcacctctcagctgctggatgacttgagatgaaaaaggagagacatggaaagggagacagccaggtggcacctgcagcggctgccctctggggccacttggtagtgtccccagcctacctctccacaaggggattttgctgatgggttcttagagccttagcagccctggatggtggccagaaataaagggaccagcccttcatgggtggtgacgtggtagtcacttgtaaggggaacagaaacatttttgttcttatggggtgagaatatagacagtgcccttggtgcgagggaagcaattgaaaaggaacttgccctgagcactcctggtgcaggtctccacctgcacattgggtggggctcctgggagggagactcagccttcctcctcatcctccctgaccctgctcctagcaccctggagagtgcacatgccccttggtcctggcagggcgccaagtctggcaccatgttggcctcttcaggcctgctagtcactggaaattgaggtccatgggggaaatcaaggatgctcagtttaaggtacactgtttccatgttatgtttctacacattgctacctcagtgctcctggaaacttagcttttgatgtctccaagtagtccaccttcatttaactctttgaaactgtatcatctttgccaagtaagagtggtggcctatttcagctgctttgacaaaatgactggctcctgacttaacgttctataaatgaatgtgctgaagcaaagtgcccatggtggcggcgaagaagagaaagatgtgttttgttttggactctctgtggtcccttccaatgctgtgggtttccaaccaggggaagggtcccttttgcattgccaagtgccataaccatgagcactactctaccatggttctgcctcctggccaagcaggctggtttgcaagaatgaaatgaatgattctacagctaggacttaaccttgaaatggaaagtcatgcaatcccatttgcaggatctgtctgtgcacatgcctctgtagagagcagcattcccagggaccttggaaacagttggcactgtaaggtgcttgctccccaagacacatcctaaaaggtgttgtaatggtgaaaacgtcttccttctttattgccccttcttatttatgtgaacaactgtttgtctttttttgtatcttttttaaactgtaaagttcaattgtgaaaatgaatatcatgcaaataaattatgcaatttttttttcaaagt

SEQ ID NO: 4289 - DNA, 1901 bp, Homo sapiens
  source 1..1901: mol_type = genomic DNA
agcccaccagaggcaaaaagaggacagtctcacggtccccaagcccagagaccactgggaggggagcaagtggggtctggaccaccgaccttagcttcacctcaacccccaagaacacctgccccgttggaggcagactggagctggctgtggattttatttctcaggagaaggaggtgggagctggagagagtgacccgtgcatctttccagcttttccttggccacctgggtggcatgggagctgggagtcagagttctgctgagctgtaggaccaaaggccactggctccgctgcacctgcggactgagacacccacctgctgagtgagacccagcctctgcgtgcttaggggtcccctgctacagggcattgaggtcatattgaacattccagatacctatcattactcgatgctgttgataacagcaagatggctttgaactcagggtcaccaccagctattggaccttactatgaaaaccatggataccaaccggaaaacccctatcccgcacagcccactgtggtccccactgtctacgaggtgcatccggctcagtactacccgtcccccgtgccccagtacgccccgagggtcctgacgcaggcttccaaccccgtcgtctgcacgcagcccaaatccccatccgggacagtgtgcacctcaaagactaagaaagcactgtgcatcaccttgaccctggggaccttcctcgtgggagctgcgctggccgctggcctactctggaagttcatgggcagcaagtgctccaactctgggatagagtgcgactcctcaggtacctgcatcaacccctctaactggtgtgatggcgtgtcacactgccccggcggggaggacgagaatcggtgtgttcgcctctacggaccaaacttcatccttcaggtgtactcatctcagaggaagtcctggcaccctgtgtgccaagacgactggaacgagaactacgggcgggcggcctgcagggacatgggctataagaataatttttactctagccaaggaatagtggatgacagcggatccaccagctttatgaaactgaacacaagtgccggcaatgtcgatatctataaaaaactgtaccacagtgatgcctgttcttcaaaagcagtggtttctttacgctgtatagcctgcggggtcaacttgaactcaagccgccagagcaggattgtgggcggcgagagcgcgctcccgggggcctggccctggcaggtcagcctgcacgtccagaacgtccacgtgtgcggaggctccatcatcacccccgagtggatcgtgacagccgcccactgcgtggaaaaacctcttaacaatccatggcattggacggcatttgcggggattttgagacaatctttcatgttctatggagccggataccaagtagaaaaagtgatttctcatccaaattatgactccaagaccaagaacaatgacattgcgctgatgaagctgcagaagcctctgactttcaacgacctagtgaaaccagtgtgtctgcccaacccaggcatgatgctgcagccagaacagctctgctggatttccgggtggggggccaccgaggagaaagggaagacctcagaagtgctgaacgctgccaaggtgcttctcattgagacacagagatgcaacagcagatatgtctatgacaacctgatcacaccagccatgatctgtgccggcttcctgcaggggaacgtcgattcttgccagggtgacagtggagggcctctggtcacttcgaagaacaatatctggtggctgataggggatacaagctggggttctggctgtgccaaagcttacagaccaggagtgtacgggaatgtgatggtattcacggactggatttatcgacaaatgagg

SEQ ID NO: 4290 - DNA, 454 bp, Homo sapiens
  source 1..454: mol_type = genomic DNA
ctggctcctgagctgctgctgtgaagggaggacctggtgggctaggtaaccgggagctcccccagaaagtcactggaggttgctcaggacttccccacctttactgagtgcttttgaagaagtaggacctgccctgctccgctacagaactactggacaggtcatattgaacattccagatacctatcattactcgatgctgttgataacagcaagatggctttgaactcagggtcaccaccagctattggaccttactatgaaaaccatggataccaaccggaaaacccctatcccgcacagcccactgtggtccccactgtctacgaggtgcatccggctcagtactacccgtcccccgtgccccagtacgccccgagggtcctgacgcaggcttccaaccccgtcgtctgcacgcagcccaaatccccatccgggacagtgtgcacctcaa

SEQ ID NO: 4291 - DNA, 1701 bp, Homo sapiens
  source 1..1701: mol_type = genomic DNA
gtgaaagcgggtgtgaggagcgcggcgcggcaggtcatattgaacattccagatacctatcattactcgatgctgttgataacagcaagatggctttgaactcagggtcaccaccagctattggaccttactatgaaaaccatggataccaaccggaaaacccctatcccgcacagcccactgtggtccccactgtctacgaggtgcatccggctcagtactacccgtcccccgtgccccagtacgccccgagggtcctgacgcaggcttccaaccccgtcgtctgcacgcagcccaaatccccatccgggacagtgtgcacctcaaagactaagaaagcactgtgcatcaccttgaccctggggaccttcctcgtgggagctgcgctggccgctggcctactctggaagttcatgggcagcaagtgctccaactctgggatagagtgcgactcctcaggtacctgcatcaacccctctaactggtgtgatggcgtgtcacactgccccggcggggaggacgagaatcggtgtgttcgcctctacggaccaaacttcatccttcaggtgtactcatctcagaggaagtcctggcaccctgtgtgccaagacgactggaacgagaactacgggcgggcggcctgcagggacatgggctataagaataatttttactctagccaaggaatagtggatgacagcggatccaccagctttatgaaactgaacacaagtgccggcaatgtcgatatctataaaaaactgtaccacagtgatgcctgttcttcaaaagcagtggtttctttacgctgtatagcctgcggggtcaacttgaactcaagccgccagagcaggattgtgggcggcgagagcgcgctcccgggggcctggccctggcaggtcagcctgcacgtccagaacgtccacgtgtgcggaggctccatcatcacccccgagtggatcgtgacagccgcccactgcgtggaaaaacctcttaacaatccatggcattggacggcatttgcggggattttgagacaatctttcatgttctatggagccggataccaagtagaaaaagtgatttctcatccaaattatgactccaagaccaagaacaatgacattgcgctgatgaagctgcagaagcctctgactttcaacgacctagtgaaaccagtgtgtctgcccaacccaggcatgatgctgcagccagaacagctctgctggatttccgggtggggggccaccgaggagaaagggaagacctcagaagtgctgaacgctgccaaggtgcttctcattgagacacagagatgcaacagcagatatgtctatgacaacctgatcacaccagccatgatctgtgccggcttcctgcaggggaacgtcgattcttgccagggtgacagtggagggcctctggtcacttcgaagaacaatatctggtggctgataggggatacaagctggggttctggctgtgccaaagcttacagaccaggagtgtacgggaatgtgatggtattcacggactggatttatcgacaaatgagggcagacggctaatccacatggtcttcgtccttgacgtcgttttacaagaaaacaatggggctggttttgcttccccgtgcatgatttactcttagagatgattcagaggtcacttcatttttattaaacagtgaacttgtctggc

SEQ ID NO: 4292 - DNA, 4208 bp, Homo sapiens
  source 1..4208: mol_type = genomic DNA
agtgcatcggccccgggtctgtccgggcgttgcgggattggggcctgggaacgctcggcccccggcagccgagaagcccgtgactgggctgagcagcaccatcccagccctggggcctgctgactgcccagtcccggcttcacctgcagcgaacccggagcgttgctatcctccaccggactgtcaggctctgcgcgccccgcggaggtcggcggcgaccagcagcgactgcggagcgacggcgggcggccccgggcatgtacgcccccggaggcgcagggctgcccggcgggcgccggcggaggagcccgggaggcagcgctctgcccaagcagccggagcgtagcctggcctcggccctgcctggcgccctgtctatcacggcgctgtgcactgccctcgccgagcccgcctggttgcacatccacggaggcacctgttcgcgccaggagctgggggtctccgacgtgttgggctatgtgcacccggacctgctgaaagatttctgcatgaatccccagacagtgctgctcctgcgggtcatcgccgccttctgtttcctgggcatcctgtgtagtctctccgctttccttctggatgtctttgggccgaagcatcctgctctgaagatcactcgtcgctatgccttcgcccatatcctaacggttctgcagtgtgccaccgtcattggcttttcttattgggcttctgaactcatcttggcccagcagcagcagcataagaagtaccatggatcccaggtctatgtcaccttcgccgttagcttctacctggtggcaggagctggtggagcctcaatcctggccacggcagccaacctcctgcgccactaccccacagaggaagaggagcaggcgctggagctgctctcagagatggaagagaacgagccctacccggcggaatatgaggtcatcaaccagttccagccaccccctgcttacacaccctaatgccagccctgggctctcttcctcggcagcccctccctcaactctgcagctcctctcgcacccagaggagctcctttccccagcaggcctcactggtaggatcctgaccatcttctccaaaccttccccaggagagactctgcctttagggtcatccaagtatccctgctctcagaaccggaggtccactggttttctataatgtactctttccctcctgccacatcctgcccccttcacattcacgagtcattaccagccagggaaggtcatccaagtttcctccagcatgggcgatatctttgggaccgagactttccttggagagctgctgagagcggacagtcccaaaaacaagtgtcaaagggcccaagggaaaggggactgtgccctggaggctcacttcacagggatcagtgtttgctccacagctgtagctctgggctgacgccccccagaccccttccttctcggagtgacccgcccccaggccacctgctccggggagttctgtgcactttactctttggacttctcctcacgtgtgccctggttttatggggagagggaatcgctgttgggaaggcagagcagttgcaaccctctctgcccttgcttcatgtggctggagcccaggcaaggagagcaggagccagcgtgagactgaggccccctggtgcctatcaaggaccagagtgaaggggactacatctcccagcccttcaccttttaaatatgagtggttttaaaaggaaaaaaatgaaaccaggcaacagcaacaatattctgtttttaaaatagggacaagactgttgtcactttttagacatgtatcccattccttttggctctgcaatatttggggctgtagctccttccaagcccatggtagtccctccccgagtctctcccagtagaatgcagcctcccttccctggccccttccctctcagtgacggtgactccctggggccttctcgtggaacccagaggggctgaggactgtggcctggctggcgggccagcgtggtgctcctcaggactgcagcactgagatggaacctggcctcagtttaggaacaggggccacaacagggcaggaacccaccaccctccacataggaatacaaccagtggggccacatcatgtgaggcatcagacccacactgtcagcccagcaggccgggctgtgtccttcagacccagtgctgccctagactctgactcgggactccagcttgccacgtgccctctcccctcttgaatgtactctggtcttgcagtgtgctgctgggactttcttgctcagccatcactctggtcaccttgtttgctctgggtctggctgaattttctgccctgagatctgggcataaagtggatgaaacttgaaagaccttcagtgtagatccagatggccaacctgtccttgttaagttacttgcttcttgggaatcagtgtcccctgctgagctgaaaaggaaatggattccaatctcttccaacctttaaggtgatagatagtttgagcaagactggagaatggacaacactatgaagctgtggctagaaagggactgtcatgtcccatcctttggccagattgactggggatgtccggacagatgcctgcatgggtggtgagggccacatctgcacacgagccagtggctgcttgcagttcactgctgtgatgccagagtgtgttcaaaggtgactctcctgctcttctggactcttctctcaggcaagaaaggctgcaggctgcctgctatgtgatgcctgagcacaaagccaaggaactgaactaagtctttctgttaagtcctgagtttgtcattggcaggtttacttgtggccagctctctctgcccttgggtgtctgagcaggcagaccagaagaccaggcactggacctgcatgccaaagggactggtcatctcctgaggacctgtaaatgaccctgtggactgttccgcacgatccggaacccactttttattcactccccatgtctttggccttcctcttctttctctttccctctgccatcctgacactgatagtttgtcatataaattccccgggttgtgtttttttttctagaaaaaaattaaaagggaaaacaaaaccaaaaaaaccagaaaccacgaataagaatggaaatgacaatggctgcctgtcatttttctgtcacgattttcctgatttggtttgttccctttgtctcagagaagcaggagatgttgatgaggctgtatttttttttctttttcttgtttttgagacaagagtctcgctctgtcacccgggctggagtgtaacgtggcatgatctcagctcactgcaacctctgcctcctgggttcaagcgattatcctgcctcagcctcctgagtagctgggattacaggcatgcgccactatgcccagataatttttttgtatttttagtagagacagggtttcaccatgttggccaggctggtctggaactcctaacctcaggttatccacccaccttggcctcccaaagtgctgggattataggcatgaaccaccgtgcctggccaaagatgtaatttaaaatagttagaagggacttggcatgggccagctccgtgcatggcattttcacccccagagcttcctaatcctgttttcacacaggaagtttctaggtctttctagaacagctagaaatagtagctgactcccgcccaaggcccaaccttcaaaccctgagctcttcaggctgcatcctctggtgagctatagaggagaacgtggctcctaaactctagccatcctgtgggaggaaatagacttctttgggctgtggcttgcagaacaaactacactttttttccctctattgtttaaattttatttaataatttgtgtgtttttctgtctttattttctgtatttcacgtgttccttcactccctagaaactgcactttctttgaaaccataggtaatgaatcttactaggagaggcatggggatagagacagttctgggagtgtgacctgtaagcctcctgtagggcagtgccaggccttgattgcccacgttctctccgttccttcttccttcatacatttgatcacacagcctacacccagccccgagtgtgcatcacggtaaaagagctgagggctctcttcagggagcagcccatttaggtctcttttgttgttgttagggagaatacacatctttcttggaa

SEQ ID NO: 4293 - DNA, 3099 bp, Homo sapiens
  source 1..3099: mol_type = genomic DNA
agtgcatcggccccgggtctgtccgggcgttgcgggattggggcctgggaacgctcggcccccggcagccgagaagcccgtgactgggctgagcagcaccatcccagccctggggcctgctgactgcgaacccggagcgttgctatcctccaccggactgtcaggctctgcgcgccccgcggaggtcggcggcgaccagcagcgactgcggagcgacggcgggcggccccgggcatgtacgcccccggaggcgcagggctgcccggcgggcgccggcggaggagcccgggaggcagcgctctgcccaagcagccggagcgtagcctggcctcggccctgcctggcgccctgtctatcacggcgctgtgcactgccctcgccgagcccgcctggttgcacatccacggaggcacctgttcgcgccaggagctgggggtctccgacgtgttgggctatgtgcacccggacctgctgaaagatttctgcatgaatccccagacagtgctgctcctgcgggtcatcgccgccttctgtttcctgggcatcctgtgtagtctctccgctttccttctggatgtctttgggccgaagcatcctgctctgaagatcactcgtcgctatgccttcgcccatatcctaacggttctgcagtgtgccaccgtcattggcttttcttattgggcttctgaactcatcttggcccagcagcagcagcataagaagtaccatggatcccaggtctatgtcaccttcgccgttagcttctacctggtggcaggagctggtggagcctcaatcctggccacggcagccaacctcctgcgccactaccccacagaggaagaggagcaggcgctggagctgctctcagagatggaagagaacgagccctacccggcggaatatgaggtcatcaaccagttccagccaccccctgcttacacaccctaatgccagccctgggctctcttcctcggcagcccctccctcaactctgcagctcctctcgcacccagaggagctcctttccccagcaggcctcactggtaggatcctgaccatcttctccaaaccttccccaggagagactctgcctttagggtcatccaagtatccctgctctcagaaccggaggtccactggttttctataatgtactctttccctcctgccacatcctgcccccttcacattcacgagtcattaccagccagggaaggtcatccaagtttcctccagcatgggcgatatctttgggaccgagactttccttggagagctgctgagagcggacagtcccaaaaacaagtgtcaaagggcccaagggaaaggggactgtgccctggaggctcacttcacagggatcagtgtttgctccacagctgtagctctgggctgacgccccccagaccccttccttctcggagtgacccgcccccaggccacctgctccggggagttctgtgcactttactctttggacttctcctcacgtgtgccctggttttatggggagagggaatcgctgttgggaaggcagagcagttgcaaccctctctgcccttgcttcatgtggctggagcccaggcaaggagagcaggagccagcgtgagactgaggccccctggtgcctatcaaggaccagagtgaaggggactacatctcccagcccttcaccttttaaatatgagtggttttaaaaggaaaaaaatgaaaccaggcaacagcaacaatattctgtttttaaaatagggacaagactgttgtcactttttagacatgtatcccattccttttggctctgcaatatttggggctgtagctccttccaagcccatggtagtccctccccgagtctctcccagtagaatgcagcctcccttccctggccccttccctctcagtgacggtgactccctggggccttctcgtggaacccagaggggctgaggactgtggcctggctggcgggccagcgtggtgctcctcaggactgcagcactgagatggaacctggcctcagtttaggaacaggggccacaacagggcaggaacccaccaccctccacataggaatacaaccagtggggccacatcatgtgaggcatcagacccacactgtcagcccagcaggccgggctgtgtccttcagacccagtgctgccctagactctgactcgggactccagcttgccacgtgccctctcccctcttgaatgtactctggtcttgcagtgtgctgctgggactttcttgctcagccatcactctggtcaccttgtttgctctgggtctggctgaattttctgccctgagatctgggcataaagtggatgaaacttgaaagaccttcagtgtagatccagatggccaacctgtccttgttaagttacttgcttcttgggaatcagtgtcccctgctgagctgaaaaggaaatggattccaatctcttccaacctttaaggtgatagatagtttgagcaagactggagaatggacaacactatgaagctgtggctagaaagggactgtcatgtcccatcctttggccagattgactggggatgtccggacagatgcctgcatgggtggtgagggccacatctgcacacgagccagtggctgcttgcagttcactgctgtgatgccagagtgtgttcaaaggtgactctcctgctcttctggactcttctctcaggcaagaaaggctgcaggctgcctgctatgtgatgcctgagcacaaagccaaggaactgaactaagtctttctgttaagtcctgagtttgtcattggcaggtttacttgtggccagctctctctgcccttgggtgtctgagcaggcagaccagaagaccaggcactggacctgcatgccaaagggactggtcatctcctgaggacctgtaaatgaccctgtggactgttccgcacgatccggaacccactttttattcactccccatgtctttggccttcctcttctttctctttccctctgccatcctgacactgatagtttgtcatataaattccccgggttgtgtttttttttctagaaaaaaattaaaagggaaaacaaaaccaaaaaaaccagaaa

SEQ ID NO: 4294 - DNA, 3480 bp, Homo sapiens
  source 1..3480: mol_type = genomic DNA
gggaattgcagccgcggggcgggcggcggcggcggcggcggcggccgggacccagcgggccaggtggggacggcgcggagcgggtgcgggagatgccgtgcgggactggggccacctgagccgcccgcctcgtccccgccttctgtgggaaggatgtgcgcgcggatggccggtcgcacaacagcggcccctcgggggccctacggcccctggctctgcctcctggtggccctcgccctggacgtcgtgagagtggactgtggccaggctcccctggaccctgtctacctgccggcagccctggagctcctagacgcccctgaacacttccgtgtgcagcaggtgggccactacccacctgccaactcctctctgagctcccgatctgagacctttctgctcctacagccctggcccagggcccagccacttctccgggcctcctacccaccttttgccactcagcaggtggtcccccctcgagtcactgagccccaccaacggccagtcccatgggacgtgcgggccgtttcagtggaagcggctgtgactccagcagagccctacgcccgggttctcttccacctcaaagggcaggattggccaccagggtctggcagcctgccctgtgcccggctccatgccacacaccctgccggcactgctcaccaagcctgccgcttccagccatccctgggcgcctgcgtggtggagctggagcttccctcgcactggttctcacaggcctccaccacacgggccgagctggcctacacgcttgagcctgcagctgagggccctgggggctgtggctccggcgaggagaacgaccctggggagcaggccctcccagtggggggtgtggagctgcgcccagcagaccccccgcagtaccaggaggtacctctggacgaggctgtgactctgcgggtgcctgacatgccagtgcggcccggccagctctttagtgctaccctcctgcttcggcacaacttcacagccagcctcctgaccctgcggatcaaggtgaagaaggggctgcatgtgacagccgcccgcccagcccagcccacactctggactgccaagctggaccgcttcaagggctccaggcaccacaccaccctcatcacctgccaccgtgctgggctcacagagccagattccagcagtccccttgaactgtctgagttcctatgggtggactttgtggtggagaatagcactggtgggggcgtagcggtcactcgccccgtcacgtggcagctggagtacccaggccaggcccctgaagcagagaaggacaaaatggtgtgggaaatcctggtgtctgagcgggacatcagagcccttatcccactggccaaggctgaggagctggtgaatacagcaccactgactggagtgccccagcatgtccccgtgcgccttgtcactgtggacggcgggggggccttggtggaggtgacagagcatgtcggctgcgagtctgccaacacacaggtcctgcaggtgtctgaggcctgtgatgccgtgttcgtggctggcaaggagagccggggcgcccggggggtgcgagtggacttctggtggcgccggctccgcgcctcgctgcggctgaccgtgtgggcccccctgctaccgctgcgtatcgagctcaccgacaccaccctcgagcaggtccgcggctggagggtacctggccctgctgaagggcctgcggaacccgctgcagaggcgtcggatgaggccgagcggcgcgcccgtggctgccacctgcagtaccagcgggccggtgtgcgcttcctcgcccccttcgcggcccacccgctggacggcggccgccgcctcacgcacctgcttggccccgactggctgctagacgtgtcccacctcgtggcgccacacgcccgcgtgctggactcgcgtgtagcctctctggagggtggccgtgtcgtggtgggccgggagcccggtgtcacctccattgaggtgcgttccccactgtctgactccatcctgggggagcaggcgctggctgtgacggacgacaaggtctcagtgctggagctgagggtgcagccagtgatgggcatctcgctgaccttgagccggggcactgcccaccccggggaggtcacagctacgtgctgggcacagtcagcccttcccgccccaaagcaggaggtggccctctccctatggctgtccttctctgatcacactgtggccccagctgagctctacgaccgccgtgacctgggactgtccgtctcagccgaggagcctggtgccatcctgccagctgaggagcagggtgcccagctcggggtggtggtgagtggggcaggcgccgaggggctgccgctgcatgtggctctgcacccgcccgagccctgccgccggggccgccaccgtgtgcctctggcctctggcaccgcctggctggggctgccccctgcctccactccagcccctgctctcccatccagccctgcttggagcccaccagccacagaagccaccatgggtggtaaacggcaggtggcaggcagtgtcgggggcaacacaggtgtgaggggcaagtttgagcgggcagaggaggaggccaggaaggaggagaccgaagccagggaggaggaggaggaagaggaggaggagatggtccctgcccctcagcatgtcactgagctagagctgggcatgtacgccctgctgggagtcttctgcgtggccatcttcatcttcttggtcaatggtgtggtcttcgtcctgcgctatcagcgcaaagaacctcccgacagtgccactgaccccacctccccccagccccacaactgggtctggctgggcactgaccaggaggaactgagccgccagctggaccggcagtcccctggcccgcccaagggggaggggagctgcccctgtgagagtgggggaggaggggaggcccctaccctggcccctggccctcctgggggcaccaccagctcctcaagcaccctggcccgaaaggaggctggggggcggcggaagcgagtagagtttgtgacatttgcgccagcccctccagcccagtcacctgaggagcctgtaggggcccctgctgtgcagtccatccttgtggcaggcgaggaggacatccgctgggtgtgtgaggacatggggctgaaggaccctgaggagcttcgcaactacatggagaggatccggggcagctcctgaccctccacagccacctggtcagccaccagctggggcaacgagggtggaggtcccactgagcctctcgcctgcccccgccactcgtctggtgcttgttgatccaagtcccctgcctggtcccccacaaggactcccatccaggccccctctgccctgccccttgtcatggaccatggtcgtgaggaagggctcatgccccttatttatgggaaccatttcattctaacagaataaaccgagaaggaaaccaga

SEQ ID NO: 4295 - DNA, 3346 bp, Homo sapiens
  source 1..3346: mol_type = genomic DNA
tgtctgggaattgcagccgcggggcgggcggcggcggcggcggcggcggccgggacccagcgggccaggtggggacggcgcggagcgggtgcgggagatgccgtgcgggactggggccacctgagccgcccgcctcgtccccgccttctgtgggaaggatgtgcgcgcggatggccggtcgcacaacagcggcccctcgggggccctacggcccctggctctgcctcctggtggccctcgccctggacgtcgtgagagtggactgtggccaggctcccctggaccctgtctacctgccggcagccctggagctcctagacgcccctgaacacttccgtgtgcagcaggtgggccactacccacctgccaactcctctctgagctcccgatctgagacctttctgctcctacagccctggcccagggcccagccacttctccgggcctcctacccaccttttgccactcagcaggtggtcccccctcgagtcactgagccccaccaacggccagtcccatgggacgtgcgggccgtttcagtggaagcggctgtgactccagcagagccctacgcccgggttctcttccacctcaaagggcaggattggccaccagggtctggcagcctgccctgtgcccggctccatgccacacaccctgccggcactgctcaccaagcctgccgcttccagccatccctgggcgcctgcgtggtggagctggagcttccctcgcactggttctcacaggcctccaccacacgggccgagctggcctacacgcttgagcctgcagctgagggccctgggggctgtggctccggcgaggagaacgaccctggggagcaggccctcccagtggggggtgtggagctgcgcccagcagaccccccgcagtaccaggaggtacctctggacgaggctgtgactctgcgggtgcctgacatgccagtgcggcccggccagctctttagtgctaccctcctgcttcggcacaacttcacagccagcctcctgaccctgcggatcaaggtgaagaaggggctgcatgtgacagccgcccgcccagcccagcccacactctggactgccaagctggaccgcttcaagggctccaggcaccacaccaccctcatcacctgccaccgtgctgggctcacagagccagattccagtccccttgaactgtctgagttcctatgggtggactttgtggtggagaatagcactggtgggggcgtagcggtcactcgccccgtcacgtggcagctggagtacccaggccaggcccctgaagcagagaaggacaaaatggtgtgggaaatcctggtgtctgagcgggacatcagagcccttatcccactggccaaggctgaggagctggtgaatacagcaccactgactggagtgccccagcatgtccccgtgcgccttgtcactgtggacggcgggggggccttggtggaggtgacagagcatgtcggctgcgagtctgccaacacacaggtcctgcaggtgtctgaggcctgtgatgccgtgttcgtggctggcaaggagagccggggcgcccggggggtgcgagtggacttctggtggcgccggctccgcgcctcgctgcggctgaccgtgtgggcccccctgctaccgctgcgtatcgagctcaccgacaccaccctcgagcaggtccgcggctggagggtacctggccctgctgaagggcctgcggaacccgctgcagaggcgtcggatgaggccgagcggcgcgcccgtggctgccacctgcagtaccagcgggccggtgtgcgcttcctcgcccccttcgcggcccacccgctggacggcggccgccgcctcacgcacctgcttggccccgactggctgctagacgtgtcccacctcgtggcgccacacgcccgcgtgctggactcgcgtgtagcctctctggagggtggccgtgtcgtggtgggccgggagcccggtgtcacctccattgaggtgcgttccccactgtctgactccatcctgggggagcaggcgctggctgtgacggacgacaaggtctcagtgctggagctgagggtgcagccagtgatgggcatctcgctgaccttgagccggggcactgcccaccccggggaggtcacagctacgtgctgggcacagtcagcccttcccgccccaaagcaggaggtggccctctccctatggctgtccttctctgatcacactgtggccccagctgagctctacgaccgccgtgacctgggactgtccgtctcagccgaggagcctggtgccatcctgccagctgaggagcagggtgcccagctcggggtggtggtgagtggggcaggcgccgaggggctgccgctgcatgtggctctgcacccgcccgagccctgccgccggggccgccaccgtgtgcctctggcctctggcaccgcctggctggggctgccccctgcctccactccagcccctgctctcccatccagccctgcttggagcccaccagccacagaagccaccatgggtggtaaacggcaggtggcaggcagtgtcgggggcaacacaggtgtgaggggcaagtttgagcgggcagaggaggaggccaggaaggaggagaccgaagccagggaggaggaggaggaagaggaggaggagatggtccctgcccctcagcatgtcactgagctagagctgggcatgtacgccctgctgggagtcttctgcgtggccatcttcatcttcttggtcaatggtgtggtcttcgtcctgcgctatcagcgcaaagaacctcccgacagtgccactgaccccacctccccccagccccacaactgggtctggctgggcactgaccaggaggaactgagccgccagctggaccggcagtcccctggcccgcccaagggggaggggagctgcccctgtgagagtgggggaggaggggaggcccctaccctggcccctggccctcctgggggcaccaccagctcctcaagcaccctggcccgaaaggaggctggggggcggcggaagcgagtagagtttgtgacatttgcgccagcccctccagcccagtcacctgaggagcctgtaggggcccctgctgtgcagtccatccttgtggcaggcgaggaggacatccgctgggtgtgtgaggacatggggctgaaggaccctgaggagcttcgcaactacatggagaggatccggggcagctcctgaccctccacagccacctggtcagccaccagctggggcaacgagggtggaggtcccactgagcctctcgcctgcccccgccactcgtctggtgcttgttgatccaagtcccctgcctg

SEQ ID NO: 4296 - DNA, 2058 bp, Homo sapiens
  source 1..2058: mol_type = genomic DNA
atgctgccggagcagctctacttcctgcagagccccccggaggaggagcccgaataccaccccgacgcctcagcccaagaattaaatgtgagggagtctgacgtaagagtttgtgatgagtcatcatgtaaatatggaggagtctgtaaagaagatggagatggtttgaaatgtgcatgccaatttcagtgccatacaaattatattcctgtctgtggatcaaatggggacacttatcaaaatgaatgctttctcagaagggctgcttgtaagcaccagaaagagataacagtaatagcaagaggaccatgctactctgataatggatctggatctggagaaggagaagaggaagggtcaggggcagaagttcacagaaaacactccaagtgtggaccctgcaaatataaagctgagtgtgatgaagatgcagaaaatgttgggtgtgtatgtaatatagattgcagtggatacagttttaatcctgtgtgtgcttctgatgggagttcctataacaatccctgttttgttcgagaagcatcttgtataaagcaagaacaaattgatataaggcatcttggtcattgcacagatacagatgacactagtttgttgggaaagaaagatgatggactacaatatcgaccagatgtgaaagatgctagtgatcaaagagaagatgtttatattggaaaccacatgccttgccctgaaaacctcaatggttactgcatccatggaaaatgtgaattcatctattctactcagaaggcttcttgtagatgtgaatctggctacactggacagcactgtgaaaagacagactttagtattctctatgtagtgccaagtaggcaaaagctcactcatgttcttattgcagcaattattggagctgtacagattgccatcatagtagcaattgtaatgtgcataacaagaaaatgccccaaaaacaatagaggacgtcgacagaagcaaaacctaggtcattttacttcagatacgtcatccagaatggtttaaactgatgacttttatatgtacactgaccatgtgatgtacatttattatgtctttttttaaagaatggaaatatttatttcagaggccttatttttggacatttttagtgtagtactgttggctcgtatttagaatattcagctacgacagttttggactgtttagtagtctttgttttatgtttttaaatacagaaattgctttcacaaatttgtaccacatggtaattctaagacttgttctttacccatggaatgtaatatttttgcaaagatggactacttcacaaatggttataaagtcatatccacttcttccacaatgaccacagcaaatgaccaagcatgaactaaaggtaaagatgtttacagattacttttcttacaaaaaaaatctagaagacactgtgtttaaatagatatttaaatgtttttgagatttagtaactgattttttagacactgcctatcgcatgaactgtaaagctgtgtgtattaggtgtaaaatatttataagatatatggactggggaatttgattattcctccctttgaaaaaatagtcctaataatttgaacaaatatgttagtaatgatggaacagatcaatgaaaagtagatatagatattgtgaaaataggctgtttaacaaacagattggaataaagcctattctaccagttaaactactttaatacacattcatttttaaagaaaatgtttgttttaacataaataaacaaatcgtatcagtgtttgtgaataaaatacaaaaatgattgttaatgattggtgctcttaaagtgagcttaaaatttatccaagacgtatatccaaatttgtcctgtagtaatagattaatattcatagattgttggtgtttaaagatctgaagtgtgagtagaatgtattcagctgtttaacatgtagtttagatattcaaaagtatgcatgtagaatttaaagaatatgttaaaaattattaattttaatattttgtttggaaaagcatgttataatataatgttttcac

SEQ ID NO: 4297 - DNA, 2611 bp, Homo sapiens
  source 1..2611: mol_type = genomic DNA
cggctccgtcacgcgcccctcaccgggcgggccggggtctttgtgacgcggtggcaacggccacggacacaaagggaaggcgaggaggcgagcaagaggctgggcctgcctccggcccgcgacccccgcccgccgcgcgcgcgcccgcccgctcccctcgccgcggtgtcccccacgccggctcgcaccctcgcgcgcacccttgcgcgcccgcgaccctcgcacgcgcccggacccgccgactccgtcccgagcgccgcgggcccgggcctggcggacgctgcgggtggggcggggatgctgacgggctgctccccggctcagcggcgcggctgctaggaggcaccgaggcagcggcggggctctgggcgcgcggctggatgcccccggcctgcggctccctgcgcttcccgccgtccaggggcaccagtcatgggcgccgcagccgctgaggcgccgctccggctgcctgccgcgcctccgctcgccttctgctgctacacgtcggtgcttctgctcttcgccttctctctgcccgggagccgcgcgtccaaccagcccccgggtggtggcggcggcagcggcggggactgtcccggcggcaaaggcaagagcatcaactgctcagaattaaatgtgagggagtctgacgtaagagtttgtgatgagtcatcatgtaaatatggaggagtctgtaaagaagatggagatggtttgaaatgtgcatgccaatttcagtgccatacaaattatattcctgtctgtggatcaaatggggacacttatcaaaatgaatgctttctcagaagggctgcttgtaagcaccagaaagagataacagtaatagcaagaggaccatgctactctgataatggatctggatctggagaaggagaagaggaagggtcaggggcagaagttcacagaaaacactccaagtgtggaccctgcaaatataaagctgagtgtgatgaagatgcagaaaatgttgggtgtgtatgtaatatagattgcagtggatacagttttaatcctgtgtgtgcttctgatgggagttcctataacaatccctgttttgttcgagaagcatcttgtataaagcaagaacaaattgatataaggcatcttggtcattgcacagatacagatgacactagtttgttgggaaagaaagatgatggactacaatatcgaccagatgtgaaagatgctagtgatcaaagagaagatgtttatattggaaaccacatgccttgccctgaaaacctcaatggttactgcatccatggaaaatgtgaattcatctattctactcagaaggcttcttgtagatgtgaatctggctacactggacagcactgtgaaaagacagactttagtattctctatgtagtgccaagtaggcaaaagctcactcatgttcttattgcagcaattattggagctgtacagattgccatcatagtagcaattgtaatgtgcataacaagaaaatgccccaaaaacaatagaggacgtcgacagaagcaaaacctaggtcattttacttcagatacgtcatccagaatggtttaaactgatgacttttatatgtacactgaccatgtgatgtacatttattatgtctttttttaaagaatggaaatatttatttcagaggccttatttttggacatttttagtgtagtactgttggctcgtatttagaatattcagctacgacagttttggactgtttagtagtctttgttttatgtttttaaatacagaaattgctttcacaaatttgtaccacatggtaattctaagacttgttctttacccatggaatgtaatatttttgcaaagatggactacttcacaaatggttataaagtcatatccacttcttccacaatgaccacagcaaatgaccaagcatgaactaaaggtaaagatgtttacagattacttttcttacaaaaaaaatctagaagacactgtgtttaaatagatatttaaatgtttttgagatttagtaactgattttttagacactgcctatcgcatgaactgtaaagctgtgtgtattaggtgtaaaatatttataagatatatggactggggaatttgattattcctccctttgaaaaaatagtcctaataatttgaacaaatatgttagtaatgatggaacagatcaatgaaaagtagatatagatattgtgaaaataggctgtttaacaaacagattggaataaagcctattctaccagttaaactactttaatacacattcatttttaaagaaaatgtttgttttaacataaataaacaaatcgtatcagtgtttgtgaataaaatacaaaaatgattgttaatgattggtgctcttaaagtgagcttaaaatttatccaagacgtatatccaaatttgtcctgtagtaatagattaatattcatagattgttggtgtttaaagatctgaagtgtgagtagaatgtattcagctgtttaacatgtagtttagatattcaaaagtatgcatgtagaatttaaagaatatgttaaaaattattaattttaatattttgtttggaaaagcatgttataatataatgttttcactata

SEQ ID NO: 4298 - DNA, 1054 bp, Homo sapiens
  source 1..1054: mol_type = genomic DNA
gccaaaacagtgggggctgaactgacctctcccctttgggagagaaaaactgtctgggagcttgacaaaggcatgcaggagagaacaggagcagccacagccaggagggagagccttccccaagcaaacaatccagagcagctgtgcaaacaacggtgcataaatgaggcctcctggaccatgaagcgagtcctgagctgcgtcccggagcccacggtggtcatggctgccagagcgctctgcatgctggggctggtcctggccttgctgtcctccagctctgctgaggagtacgtgggcctgtctgcaaaccagtgtgccgtgccagccaaggacagggtggactgcggctacccccatgtcacccccaaggagtgcaacaaccggggctgctgctttgactccaggatccctggagtgccttggtgtttcaagcccctgcaggaagcagaatgcaccttctgaggcacctccagctgcccccggccgggggatgcgaggctcggagcacccttgcccggctgtgattgctgccaggcactgttcatctcagcttttctgtccctttgctcccggcaagcgcttctgctgaaagttcatatctggagcctgatgtcttaacgaataaaggtcccatgctccacccgaggacagttcttcgtgcctgagactttctgaggttgtgctttatttctgctgcgtcgtgggagagggcgggagggtgtcaggggagagtctgcccaggcctcaagggcaggaaaagactccctaaggagctgcagtgcatgcaaggatattttgaatccagactggcacccacgtcacaggaaagcctaggaacactgtaagtgccgcttcctcgggaaagcagaaaaaatacatttcaggtagaagttttcaaaaatcacaagtctttcttggtgaagacagcaagccaataaaactgtcttccaaagtggtcctttatttcacaaccactctcgctactgttcaatacttgtactattcctgggttttgtttctttgtacagtaaacattatgaacaaacaggca

SEQ ID NO: 4299 - DNA, 1109 bp, Homo sapiens
  source 1..1109: mol_type = genomic DNA
cgctccccagtagaggacccggaaccagaactggaatccgcccttaccgcttgctgccaaaacagtgggggctgaactgacctctcccctttgggagagaaaaactgtctgggagcttgacaaaggcatgcaggagagaacaggagcagccacagccaggagggagagccttccccaagcaaacaatccagagcagctgtgcaaacaacggtgcataaatgaggcctcctggaccatgaagcgagtcctgagctgcgtcccggagcccacggtggtcatggctgccagagcgctctgcatgctggggctggtcctggccttgctgtcctccagctctgctgaggagtacgtgggcctgtctgcaaaccagtgtgccgtgccagccaaggacagggtggactgcggctacccccatgtcacccccaaggagtgcaacaaccggggctgctgctttgactccaggatccctggagtgccttggtgtttcaagcccctgcaggaagcagaatgcaccttctgaggcacctccagctgcccccggccgggggatgcgaggctcggagcacccttgcccggctgtgattgctgccaggcactgttcatctcagcttttctgtccctttgctcccggcaagcgcttctgctgaaagttcatatctggagcctgatgtcttaacgaataaaggtcccatgctccacccgaggacagttcttcgtgcctgagactttctgaggttgtgctttatttctgctgcgtcgtgggagagggcgggagggtgtcaggggagagtctgcccaggcctcaagggcaggaaaagactccctaaggagctgcagtgcatgcaaggatattttgaatccagactggcacccacgtcacaggaaagcctaggaacactgtaagtgccgcttcctcgggaaagcagaaaaaatacatttcaggtagaagttttcaaaaatcacaagtctttcttggtgaagacagcaagccaataaaactgtcttccaaagtggtcctttatttcacaaccactctcgctactgttcaatacttgtactattcctgggttttgtttctttgtacagtaaacattatgaacaaacaggca

SEQ ID NO: 4300 - DNA, 3151 bp, Homo sapiens
  source 1..3151: mol_type = genomic DNA
gggcgcgagctcagggcgcctccggggtcctcactgcgctccccacgcgctgtgaccccatttgttgcacgtgcatgttcaggtcgagagagggatgcgacgtgttcggggagcagcccaccttgtgggtggccaatccgggacgggaatcttaaacttttaactcttggtgcaaagactgatccactggcggctttacgggagcgggaaaaaaatggcgctcccgacgctgccgtcctactggtgcagccagcagcgcctgaatcagcagctagcacgacagcgagagcaggaggcccggcttcggcagcagtgggagcagaacagccgttacttcaggatgtctgacatctgcagctccaaacaggcagaatggagctctaaaacctcctaccagcggagcatgcatgcctatcagcgggagaagatgaaggaggagaagaggaggagtctggaggcccgacgggaaaagctcaggcagctcatgcaggaggagcaggacctgctggccagagaactggaggagctgaggctgagcatgaacttgcaggaaagaagaatccgggagcagcacgggaagctgaaatcagccaaagaagagcagaggaaactgattgctgaacaacttttgtacgaacactggaaaaagaacaacccgaaacttcgagagatggagctggaccttcaccagaagcatgtcgtaaactcttgggaaatgcagaaagaagaaaaaaaacagcaagaagccaccgcagagcaagagaacaaacggtatgaaaatgaatatgaaagggcccgaagggaggcgctagaaaggatgaaagctgaagaggagaggaggcagctggaggacaagctccaggccgaggcactgctgcaacagatggaggagctgaagctgaaggaggtggaggcgaccaaactaaagaaggagcaggagaatctgttgaagcagcggtgggagctagagaggctggaggaagagcgaaagcagatggaagccttccggcagaaggcagagctggggcgtttcttgagacatcagtataacgctcaactcagcagacgcacacagcagatccaagaggagctggaggcagacaggcggatcctgcaggccctcctcgagaaggaggacgagagccagcgcctccacctggccaggcgggagcaggtcatggccgatgtggcctggatgaagcaggccattgaggagcagctgcagctggagcgggcgcgggaggcagagctgcagatgctgctgagggaggaggccaaggagatgtgggaaaagagagaggcagagtgggcccgagagcgcagcgcacgggacagactgatgagcgaggttctgacagggagacaacagcaaatacaagagaagattgagcagaaccgacgggcacaagaggaatccctgaaacacagggagcaacttattcgaaatcttgaggaggtgagagagttggctcgtcgcgagaaagaggagagtgaaaagctgaaatcggccaggaagcaggagctggaagcccaggttgcagagcgccggctgcaggcatgggaagcagaccagcaggaggaggaggaagaggaggaggcccggcgggtcgagcagctctcagatgccctgctgcagcaggaggcggagactatggctgagcagggctaccggcctaagccttacggacatccaaaaattgcttggaactgacttcatgggtaccataagtacagagaacaagggatgctgaggcttctgatcccagccgccaggcagttttacagggctctgttaacagtaagtgcccggggcactgtcagatggctcagcagtgcctgctcaggttcatcattgaaacatcccagtgtttggccagacattaaggtgtcgtgagagtccctttcatgcctttcttacccaagcaagggtctttgatgggcacgtgtttacagcgctgctgcatagtcttgtaatatattaacagtcacatcaactgaaggtcaatactaagagccacaggttgtacctgtgatggggcgtgtggtttcctgttgtctcacctttaattgtcaacctccagtgttgactctagaaatatgaggaaagcttttcagtttttaaaattgccatttaaatttagtctattaaaaacaaacctagaggtcttggtgcagttgatttcagagtttattaatttagtggtcccaaaagtattacatcttttatattctggaagaaaagaactgtgaacaaattagaaccccggaacactctgacgtccatggacgcattccagaaaagtggcaagagatgagtctttcctcctccaggaagcattttggtagaatttccatagagcattgtctgtgagtgactgatcccaacatgtatgttactaagccccaaaacgaacttcaaactgggtgtggtggcacgtgcctttagtcccagctacccgggaggctgcggcaagaggattgcttgagcccaggagttcgagtccaacctgggcaaaagagtgagaccccatctctaaaaccaaaaaggtaccttagaaggtcacctggttggctaaccttttaaaggcaggggcgtgacacgtaggacacattgggaatgtcttggctactacatgtagccttctgggatatatgtgcccagagggagaagcactgagcctgaagaaactagatgagtctcagaaccacagaccggccagaaatctctcccaccattatatcagcgtgatacaggtctacattcatttctacaaacaggaacaagttccttgcagcaataatattattttatgacttgtatttttactatacccttcctctgaggtttagttttcatcacattatgttcaagattccatatctccgtaaattacagctaattacagggcattgttccatggttattaaaaatcagagtttattaaaaatcctgagtcttaagggctgtcttacctttcacttccactgtcctgtagaaacagatcaagctgcaaaccacgtccttcatctgttgttcattttcttgcaactctttgactctgatcccctgagcagcacgttcatcacgcatgctctctgttgcgttccccatttcagatgtccagtaatggtgaaataaaatcctgcttcg

SEQ ID NO: 4301 - DNA, 3090 bp, Homo sapiens
  source 1..3090: mol_type = genomic DNA
gggctcgttgccggtgcaaacagggaggaaacagccggcgttgctgtagcgcgtctgggaattacaccgggggactggccggcccgcttcgtgcctgcgggaagtcgggccgggggactcttcggaaactccgagcctcagagaaatatggcgctcccgacgctgccgtcctactggtgcagccagcagcgcctgaatcagcagctagcacgacagcgagagcaggaggcccggcttcggcagcagtgggagcagaacagccgttacttcaggatgtctgacatctgcagctccaaacaggcagaatggagctctaaaacctcctaccagcggagcatgcatgcctatcagcgggagaagatgaaggaggagaagaggaggagtctggaggcccgacgggaaaagctcaggcagctcatgcaggaggagcaggacctgctggccagagaactggaggagctgaggctgagcatgaacttgcaggaaagaagaatccgggagcagcacgggaagctgaaatcagccaaagaagagcagaggaaactgattgctgaacaacttttgtacgaacactggaaaaagaacaacccgaaacttcgagagatggagctggaccttcaccagaagcatgtcgtaaactcttgggaaatgcagaaagaagaaaaaaaacagcaagaagccaccgcagagcaagagaacaaacggtatgaaaatgaatatgaaagggcccgaagggaggcgctagaaaggatgaaagctgaagaggagaggaggcagctggaggacaagctccaggccgaggcactgctgcaacagatggaggagctgaagctgaaggaggtggaggcgaccaaactaaagaaggagcaggagaatctgttgaagcagcggtgggagctagagaggctggaggaagagcgaaagcagatggaagccttccggcagaaggcagagctggggcgtttcttgagacatcagtataacgctcaactcagcagacgcacacagcagatccaagaggagctggaggcagacaggcggatcctgcaggccctcctcgagaaggaggacgagagccagcgcctccacctggccaggcgggagcaggtcatggccgatgtggcctggatgaagcaggccattgaggagcagctgcagctggagcgggcgcgggaggcagagctgcagatgctgctgagggaggaggccaaggagatgtgggaaaagagagaggcagagtgggcccgagagcgcagcgcacgggacagactgatgagcgaggttctgacagggagacaacagcaaatacaagagaagattgagcagaaccgacgggcacaagaggaatccctgaaacacagggagcaacttattcgaaatcttgaggaggtgagagagttggctcgtcgcgagaaagaggagagtgaaaagctgaaatcggccaggaagcaggagctggaagcccaggttgcagagcgccggctgcaggcatgggaagcagaccagcaggaggaggaggaagaggaggaggcccggcgggtcgagcagctctcagatgccctgctgcagcaggaggcggagactatggctgagcagggctaccggcctaagccttacggacatccaaaaattgcttggaactgacttcatgggtaccataagtacagagaacaagggatgctgaggcttctgatcccagccgccaggcagttttacagggctctgttaacagtaagtgcccggggcactgtcagatggctcagcagtgcctgctcaggttcatcattgaaacatcccagtgtttggccagacattaaggtgtcgtgagagtccctttcatgcctttcttacccaagcaagggtctttgatgggcacgtgtttacagcgctgctgcatagtcttgtaatatattaacagtcacatcaactgaaggtcaatactaagagccacaggttgtacctgtgatggggcgtgtggtttcctgttgtctcacctttaattgtcaacctccagtgttgactctagaaatatgaggaaagcttttcagtttttaaaattgccatttaaatttagtctattaaaaacaaacctagaggtcttggtgcagttgatttcagagtttattaatttagtggtcccaaaagtattacatcttttatattctggaagaaaagaactgtgaacaaattagaaccccggaacactctgacgtccatggacgcattccagaaaagtggcaagagatgagtctttcctcctccaggaagcattttggtagaatttccatagagcattgtctgtgagtgactgatcccaacatgtatgttactaagccccaaaacgaacttcaaactgggtgtggtggcacgtgcctttagtcccagctacccgggaggctgcggcaagaggattgcttgagcccaggagttcgagtccaacctgggcaaaagagtgagaccccatctctaaaaccaaaaaggtaccttagaaggtcacctggttggctaaccttttaaaggcaggggcgtgacacgtaggacacattgggaatgtcttggctactacatgtagccttctgggatatatgtgcccagagggagaagcactgagcctgaagaaactagatgagtctcagaaccacagaccggccagaaatctctcccaccattatatcagcgtgatacaggtctacattcatttctacaaacaggaacaagttccttgcagcaataatattattttatgacttgtatttttactatacccttcctctgaggtttagttttcatcacattatgttcaagattccatatctccgtaaattacagctaattacagggcattgttccatggttattaaaaatcagagtttattaaaaatcctgagtcttaagggctgtcttacctttcacttccactgtcctgtagaaacagatcaagctgcaaaccacgtccttcatctgttgttcattttcttgcaactctttgactctgatcccctgagcagcacgttcatcacgcatgctctctgttgcgttccccatttcagatgtccagtaatggtgaaataaaatcctgcttcgacagca

SEQ ID NO: 4302 - DNA, 973 bp, Homo sapiens
  source 1..973: mol_type = genomic DNA
gggatgcgacgtgttcggggagcagcccaccttgtgggtggccaatccgggacgggaatcttaaacttttaactcttggtgcaaagactgatccactggcggctttacgggagcgggaaaaaagtatgtgaagcttgccacggtctcgagaccgaggtcacacgttagcagcctgccggctacatttggaccatagacgcagagtgtttgcccccaaaactggaggacctccagaatgagattcttggcgtgcaccaggccttttcgctcattcagccggcgttcctacccaggcactgcatcgaccctacacttgaggacagcttttgggtcaggggaattggtgcctggagtgagactgctctctgctttcaaggctccagctgtatccctacattgctcaggcaattcctctctctaggtctcagcttcttcatctgcaagatgaaagatggcgctcccgacgctgccgtcctactggtgcagccagcagcgcctgaatcagcagctagcacgacagcgagagcaggaggcccggcttcggcagcagtgggagcagaacagccgttacttcaggatgtctgacatctgcagctccaaacaggcagaatggagctctaaaacctcctaccagcggagcatgcatgcctatcagcgggagaagatgaaggaggagaagaggaggagtctggaggcccgacgggaaaagctcaggcagctcatgcaggaggagcaggacctgctggccagagaactggaggagctgaggctgagcatgaacttgcaggaaagaagaatccgggagcagcacgggaagctgaaatcagccaaagaagagcagaggaaactgattgctgaacaacttttgtacgaacactggaaaaagaacaacccgaaacttcgagagatggagctggaccttcaccagaagcatgtcgtaaactcttgggaaatgcagaaagaagaaaaaaaa

SEQ ID NO: 4303 - DNA, 1214 bp, Homo sapiens
  source 1..1214: mol_type = genomic DNA
aaacagggaggaaacagccggcgttgctgtagcgcgtctgggaattacaccgggggactggccggcccgcttcgtgcctgcgggaagtcgggccgggggactcttcggaaactccgagcctcagagaaatatggcgctcccgacgctgccgtcctactggtgcagccagcagcgcctgaatcagcagctagcacgacagcgagagcaggaggcccggcttcggcagcagtgggagcagaacagccgttacttcaggatgtctgacatctgcagctccaaacaggcagaatggagctctaaaacctcctaccagcggagcatgcatgcctatcagcgggagaagatgaaggaggagaagaggaggagtctggaggcccgacgggaaaagctcaggcagctcatgcaggaggagcaggacctgctggccagagaactggaggagctgaggctgagcatgaacttgcaggaaagaagaatccgggagcagcacgggaagctgaaatcagccaaagaagagcagaggaaactgattgctgaacaacttttgtacgaacactggaaaaagaacaacccgaaacttcgagagatggagctggaccttcaccagaagcatgtcgtaaactcttgggaaatgcagaaagaagaaaaaaaacagcaagaagccaccgcagagcaagagaacaaacggtatgaaaatgaatatgaaagggcccgaagggaggcgctagaaaggatgaaagctgaagaggagagaagattgagcagaaccgacgggcacaagaggaatccctgaaacacagggagcaacttattcgaaatcttgaggaggtgagagagttggctcgtcgcgagaaagaggagagtgaaaagctgaaatcggccaggaagcaggagctggaagcccaggtagggctgagcccaagggcgggaggcaccgggcctgccaggttctctgcatcatcatgggacagggttcagagccgctggactgcctggcagggcttgcgcacgtttgagagcacggtgctcccgtttccatcccagctgcagtcctcatcctcttgactgtggcttctttccctccacatcctccatgtcgtgtgggtgaggccggtactgctgtctgttctctttactctgtctgcttctgcaagcagttggcttaccgggggccatagatctctcttcatttcagtccctgatacataagacag

SEQ ID NO: 4304 - DNA, 2077 bp, Homo sapiens
  source 1..2077: mol_type = genomic DNA
gtcgtcgggctcgttgccggtgcaaacagggaggaaacagccggcgttgctgtagcgcgtctgggaattacaccgggggactggccggcccgcttcgtgcctgcgggaagtcgggccgggggactcttcggaaactccgagcctcagagaaatatggcgctcccgacgctgccgtcctactggtgcagccagcagcgcctgaatcagcagctagcacgacagcgagagcaggaggcccggcttcggcagcagtgggagcagaacagccgttacttcaggatgtctgacatctgcagctccaaacaggcagaatggagctctaaaacctcctaccagcggagcatgcatgcctatcagcgggagaagatgaaggaggagaagaggaggagtctggaggcccgacgggaaaagctcaggcagctcatgcaggaggagcaggacctgctggccagagaactggaggagctgaggctgagcatgaacttgcaggaaagaagaatccgggagcagcacgggaagctgaaatcagccaaagaagagcagaggaaactgattgctgaacaacttttgtacgaacactggaaaaagaacaacccgaaacttcgagagatggagctggaccttcaccagaagcatgtcgtaaactcttgggaaatgcagaaagaagaaaaaaaacagcaagaagccaccgcagagcaagagaacaaacggtatgaaaatgaatatgaaagggcccgaagggaggcgctagaaaggatgaaagctgaagaggagaggaggcagctggaggacaagctccaggccgaggcactgctgcaacagatggaggagctgaagctgaaggaggtggaggcgaccaaactaaagaaggagcaggagaatctgttgaagcagcggtgggagctagagaggctggaggaagagcgaaagcagatggaagccttccggcagaaggcagagctggggcgtttcttgagacatcagtataacgctcaactcagcagacgcacacagcagatccaagaggagctggaggcagacaggcggatcctgcaggccctcctcgagaaggaggacgagagccagcgcctccacctggccaggcgggagcaggtcatggccgatgtggcctggatgaagcaggccattgaggagcagctgcagctggagcgggcgcgggaggcagagctgcagatgctgctgagggaggaggccaaggagatgtgggaaaagagagaggcagagtgggcccgagagcgcagcgcacgggacagactgatgagcgaggttctgacagggagacaacagcaaatacaagagaagattgagcagaaccgacgggcacaagaggaatccctgaaacacagggagcaacttattcgaaatcttgaggaggtgagagagttggctcgtcgcgagaaagaggagagtgaaaagctgaaatcggccaggaagcaggagctggaagcccaggttgcagagcgccggctgcaggcatgggaagcagaccagcaggaggaggaggaagaggaggaggcccggcgggtcgagcagctctcagatgccctgctgcagcaggaggcggagactatggctgagcagggctaccggcctaagccttacggacatccaaaaattgcttggaactgacttcatgggtaccataagtacagagaacaagggatgctgaggcttctgatcccagccgccaggcagttttacagggctctgttaacaaaatctgaagagttctgcgtctgaatttgaaattggactttataaagcctagaaaacagaggaggcggtgccctgcccttgtcagttgttgttctctttggtggtgatggtaaccagctgcttggcagccttggcgatgtcgtacgcacactggatgacctgctgcgtgaccagctgaacgtctgtggtggtttccaaatctgtgtcttcgtctgatgccacgctgtcatagtcgggctgatcgttgtcttgactctcaacgctgtgctggttattgatggttttcagtatgagctccacattgtctatcaataaaagcaaacaactttacttcaggctt

SEQ ID NO: 4305 - DNA, 15958 bp, Homo sapiens
  source 1..15958: mol_type = genomic DNA
ttgtttattttgtttttagtttttggggtccccgtgctgctgcaaggcgaaacgggagggagtgacccctgcgcccctcagtcccccctacgacgtcgcctccatagtctgcggagaagcggagactgcgcgcctcgcctcacagcgaaacgccgcgcactcggagccggcacggctcggcgggttgtggttttttgcactgaatgtaacctagactcatcttcacgggcttgtgttgccccaggtactgtcaaaggcagtatttttgtgtttctgcagagttttgcacaaaatctgttcccatgcaaaccaatgagggagaagtatcggaagaaagcagttccaaggtggaacaggaggattttgtaatggaagggcatggcaagactccacctcctggtgaagaaagcaaacaagagaaggagcaagaaagggaagaacagttaatggaagacaagaaaaggaagaaagaggataaaaagaaaaaagaagccactcagaaggtcacggaacaaaaaaccaaagtgcccgaagtgacgaaaccaagtttaagccaaccaacggccgccagcccaattggcagctctccatcgccaccagtcaatggtggcaacaatgccaaaagggtggcagtgccgaacggacaaccgccaagcgccgcccgctacatgcctcgggaggtgccgccgcgattccgttgccagcaggaccacaaagtgttactaaaacgtgggcagccccctccaccgtcctgcatgctccttgggggtggggcagggcctcctccctgcacagcacctggagcaaacccaaacaacgcacaagtgacaggagcgctgctgcagagtgagagtgggactgcgccagtctggagcaaaagcacaccacctgctccagataatggtacttccgcttggggtgagccaaatgaaagcagtcctgggtggggcgagatggatgatacaggagcatcgaccacaggctgggggaacacgcccgccaacgctcccaatgccatgaagcctaattccaaatctatgcaagacggctggggggagagtgacgggccagtcacaggagctcgccatcccagctgggaagaggaggaggatggaggagtctggaacaccactggctctcagggcagtgcttcctcccacaactcagcaagctggggacaaggaggaaagaaacaaatgaagtgctcactcaaaggaggaaacaatgattcatggatgaatcctcttgccaaacagttttcaaatatgggattgctgagtcagactgaagataatccaagcagcaaaatggatttgtctgtaggaagcctttcagataaaaaatttgatgtggacaagcgagcgatgaatctcggggattttaatgatatcatgaggaaggatcgatctgggttccgtccacctaattccaaagacatgggaaccacagatagtgggccttattttgagaagggcggtagtcatggtttgtttggaaacagcacagcacaatcgagaggtctgcacacacccgtgcagccactaaattcttctcccagtctccgggcgcaagtgcctccccagtttatttccccccaggtttctgcctcaatgctcaagcagtttcccaacagtggcctgagtccaggtcttttcaatgtggggccccagttatctcctcaacaaattgccatgctgagccagcttccacaaattccccagtttcagttggcatgtcagcttctcttgcagcagcagcaacagcagcagttgttacagaaccagagaaagatttctcaagctgtacgccaacagcaagagcagcagctggctcgaatggtgagtgcactgcagcagcagcagcagcagcagcagaggcagccaggcatgaagcactcgccctctcatcctgttgggcccaagccgcatctggacaacatggtacccaacgcattgaatgtggggctcccagaccttcaaaccaaagggccaatacctggatatggttctggcttcagctctggcggcatggactatggcatggttggtgggaaggaggctggaaccgagtctcgctttaaacagtggacctccatgatggaggggctgccctctgtagccacacaggaagccaatatgcacaaaaatggcgctatagtggcccctggtaaaacccggggagggtcaccgtacaaccagtttgatatcatccctggtgacacactgggtggccatacgggtcctgctggtgatagctggttacctgccaaatctccaccaacaaataaaatcggaagtaaatccagcaatgccagttggcctccagaattccaaccaggagtgccatggaaaggtatccaaaacattgaccctgaatctgacccctatgtcaccccaggaagtgtgctggggggtacagccacatctcccattgtagatactgaccaccaactgctgcgggataacaccacagggtctaattcttccctcaacacctcgctgccttcacctggtgcctggccctacagtgcctctgacaactcctttaccaacgttcatagcacttcagcaaagttccctgattacaaatcaacatggtccccagatcccataggacacaaccccactcatctctccaacaagatgtggaaaaaccatatttcctccaggaacactacaccgctgccccgcccacctcctggtctgaccaaccccaaaccatcatctccctggagcagcacagcaccccgatcagtcagggggtgggggacacaggactcacggctcgcctcggcctctacctggagtgatggtggctcagttcgtcctagttactggctggttcttcacaatctcaccccacagattgatgggtcaaccttgagaacgatctgcatgcagcatggcccactgctgacattccatctgaatctaacccagggcactgccctgatccgatacagcaccaaacaggaggcggccaaggcccaaactgcactgcacatgtgtgtgttgggaaacactaccatccttgctgagtttgccactgatgatgaagtcagccgctttctggcacaagctcagccccctacacctgcagcaaccccaagtgcgccagctgcggggtggcagtcgctggagaccggccagaaccagtcagatcccgtgggacctgctctgaatctttttggtgggtccactgggctcgggcagtggagcagcagcgctggtggcagcagcggggccgatcttgctggcgcttcattgtgggggcccccaaactattcttctagcttatggggagtcccaacggtggaagatccccataggatgggcagccctgctcctttactacctggtgaccttctgggaggagggtcggattcaatctgaacttagaactttcaactctgacctcgtgaccttttttggaacagcagcagcactaacttgaccttttcgttttttttttcaacttgcaataaatacatttttaaaaggaaaaaagaaaacggagagaaaaaaaggtgggtcattgacagactgtctgagcacatagttgcctcccttataacttcagttttttcgtttggaatatgaatccaaaaagagaacatatcactcttgaaatacttgaatcatgaacgccaacctagaaagacaatgtgaagcaagtacacataccatttaaatttaaacacaaaaaaattaaaaaaattagtttctagtttttcacttttttcatgttatatggaagttgttgctaagaaacatatatactgaaaaaaaatagctttttaactttgtttgcactgggtgtgtttccgtccttaggtctaccatgtttgggagggagggaaattcaaaagaattgttgggggaggggggagggaagacttgacggagcctcactttaaaaacaaaaacacaaaaaacctaaaaaaaaaaaaaaggaaaaaatttgtgattggctggttgataaataccagtgtgttctggcacatgtaactgcccaggcatgctcgttctggtgtgtgtgtgcacgtgtgttcatgtgcattcgcgtgcatccttctctgtctctgtgtgtgtgcctgtgttcttcccttctcccctgccccaccctgacttctcagaaagctgcatcgctgacagtctgcaggctggctggccggcccatctgctttttattttatttttttaactatgagaacacacaggcccggagagccactgctactaaagcaactccattgggctgcattaagatgaacagagtgctttttaatgatgaaagcagggagctcctttccatttgcaacttagcctgaatgtggggtttctctggctgttcttttgacctagcagtagagtggagcactgccaagtccaaaaaactagagcaggaggtacctcttggagcaacggtgtgtttatttctgtttttttttttttttaagtgaatggccaccaggcacatctgagtatctgttaagtttcatgcaggccttttcgttagtttgaaatgggaacggaagataacttttgatgatgcgatgtctcaaaaacagagaaactttgttccctctttccttatgatcaggtttgagaaattcttcaaaaaattaggtgaagttgagttacatatttctgttggttggttctctttttcattttatgaaaacagaaaagaataagtggtgagcagcctcctgaaagcatctgcagctactccctctgctcctttctcgccgagcgttacctgtgccaggccgtggcgcgttacagcaccaggccatcactgacagaaacgtttacttaacgaatgttcttaaaccagtgtgtacttcaagcgtttccttttgtttctctgtgttgtgtatttcctgtgtatgtggttttgcttaggcaggtataacttagcgaagacttttaagtattgcacctttttttgatttttgacctcttccccccaccttgtaattttgcttttttaatttcggtatttaaatacttttttttttttttaagcatcaatgtagtagtactctgggccgaacaggggtcaacgtttaatctacagttatcaccaacatgtatgtacttatgtcggaatcaaaatgtatcaaactgcttattgtgaagagaattatagcagacctgaagggggcgaaaaaccagatagggtggggggatggatgccggtgacgtgctagcacttgtgtggacatcccagtctgcattatgctgtttaacataaagtgccgacattttgtaccagcaaatacctgcccattccaacccttggtgggagcagacctctactgtcctctgtaacttgctgctattgaggacaagggagtttttctttctttagcgtcttcagtgaaggatacaatacaacaatgcctaatgtatttgactttttagcttgtgtctgtgtgtaggtgggtgggtgggtgtgtataggaaaagcctaaaacaagttatttgcatttcagtggttttgtgagacaaagaatgggaaattctgtagcccttctggcttaccctgttgattataaacctagcctcaaaagagattgacaggcatgactcaagtgagtgttcacatatacaagcctgcatgagccctctgtgggtaggtggtcacacttggcatctgcagcattgacgtggccccgctgggtgccttgagcatgccctcttcctgctctgcaatttgaatcaccaccgtgccccttccaccactgttccccatgcaaaagctctgcttccagcagcccccactgaccgctctctgtgtggagcaaagtgctgtcgtgcggtgaccaccaggtgaagagcagcttgtattcagacatctagagaaggttaaatcttagtgtccctgggccaggagcatatcccaaggctcctgcgagccagtggcgaccctgtccactgccgctcttggttcactgctgtgtcctgccccaccctcctctcctcctgcctgttggttccttgacctgcactatgggttagttgagttccttacgatactacggtgaaagccgggtgctagagcccctcttgtttacaagacataatgagggatttgaaatatgtaaaaataaacatgagaagctaaaatgttcttccatcataagcttaaagggaaaaaaactaaaaactttaaaaaaaaaagaccaaaaagtgcgtatatatatacatataaatatatattttagatgaagactaactctgggagcatttaacagtgttttttgtttctgtttttaacatttgttttcctgctttaaaatttgcaagcattctcaggaattctagggtaggaagccagttttttgaagatggtttatttaaccatatcttatcctagagagatggctgtttctttcctgttaataaacttttacaagttcctgaaacttcagaaagtttaaacaatttttacttaaaaaaatgtaaaaagaaaagtctccaaacattattgtcatactggggatcacacattttaaaacacatagaaatattttttaaaaattatcaatttagcagcaacaggtaaattcattatcttaaaaatatgggagaaggattaagctttgtaagagctcgatcatggattcttttgaaattgtgtgtagtttaatgggagagtgtttggtgtatatagatgagaatgccatcactttgttcctttccatttgagactgaactgaaatctcccctagtaatttttatttttttaaaggaacccttctccttgtccccacaaccccagcaacaaaagaaaggaaggaaggaagaaacaacagcttaaaaaaaaaagtaatctgtaaaatagtacagttggattgctgagaatctatgtaaagagttaggaaatataggttaataatttttggaacaaattttaaatataggcattactagaggaaaattatctatggactgtcctattaatgaagaatgtctgtcttacctccgtttgttttgggaggaggagaaaatatagaagaatctaataaggaacaagtgattttacttttttagctcccagctactgttgtgctcgttttaattgctgttttgaagatctgctgcttaattatccccatcccttagccggagatgtggagtgtttcctttcagtttttggtgatgttgaattcttttgtattccctcctggggccaggggtcagaattcccaagcatgaccacagcttcttttaaacattaagcttcccagtgggaaggaaactccagctcgacaggtaaagggagtgggtggggttgctgcctgcaatttctctaaaaccgctttagtgccttcgtacatacacccagacatcctgagcaagggggacgcacatgtgtgtgtgtgtggtccagtcactccacagatgtaagatactcacccataaaggaaattggagtggttctggacaggccccaaaggcagtgggctgaatttaaaataaataaacaaacgtcaagcaagttaatatgcttatgtctcagtaatgtagaatgccaagttccttcctgtgtcgtgtgccctccattactgtgcattgattcctccaggtgtgtaattgtgacaactgcagtgatttggaaagtctctttgtcttgggcaaatagaaggggttcctgttgttctgctcttgtccttcgtctcctccccttttcccccagacctcccccttctttttgtcaacttgctgggagctttgctttattggttggcagtgacctaagaacaggatatggtgaggatgtcatggaagagaagagctctttccgtggtattctttggcaagagccatgtctactaagaggttagatgacttcagtatacttataaaattcagtgagagtgccttcttctcttctaccacactctggcatagatacaggcttgctggtcacctctcattacatagatttattttaaaaacattttgattatgttaatttgagctttcccttttttttttttaactactttttaaaacacttgattactagtggcttagaggtgtgtacatctcctgaacatcacaaacttggtttctacctaccacacgagtagccaaaagaaaagaagcactaatagagaaaggggtgtctcacaccagacagaggacctctgctgtcaattagatccagtatcatgacctaactttaagtgtggaaaagagttcagatctctgagacactgtgaagaaatggatggctcatgtaacatctctgatccctcagtccccaaccctggacgtgtttcatttacaacattcataggagttaacttagcagtgttgcaagttaaggttccaaaccaaattatttaatcagtgtccccccaataaatcacttatccatttattgctagttagttttatttatagcaacttgatttcctatgagtatggctcctgttgtaagaattttcccacctcttctgacatgaatgtagcataagttagcaatcggttcttccaaactcctgtgggttgaatatggtatagaaggtatgcaagaggaaaaagaaaggaaaagataaaactcctgcctgagaatttggaagcacctttattaacacatatatctcgcagaaactagaagctcataggctgttaactttttgcaactattcactcatttttaccacttttttttttgggtgagggggtgatttttgtaaggttaacagccagattccattttgacctcagatgctgtgtactttttaatttcattttttatattctgccatcttgactcttctctaaaacagaatgaaaatgtctgcatgctgagcaaaatgcttacgccaagcctgtttttctctgcagagtaaacaggatgttttcagcagacttggctctaatagccatctctaagattagggaacaattgagtctttatgtagaaaagatccattttttccccatcctcagagttaaaattcaacatttaaagctttatcggttattgttttagatttgagatttttgtttttaagtatctataagatctttagaagtgagataaatttttcgctggttaaaaaaaatcaaactttcctctgcagtgtttttgccaagttttgtcacacttcatgtgtatgcattaactatacttcttagtgttactgcaaaaaaaaaaaacaaaaacaaaacaaaaaaaagccttgttctttaattgtgtttttcctcctgtgagtggacaactaaagccgcgtgatgatgcggatgaaaatattctggtctgtgtgtatacaatgaattgtcagtcttcagacctcatggtcgttaagaaaatagggaactcacaaaccctgctgcgcactacatttacttctttatctgcaagtacagggagtccatacagtcaagaaacacacagatacacataatgctattgaggacattgtcattctgtaagaaaacagaatattatctagatttccagagttagtgcagaccctgtgataacagtctgtgggtttgtggccagcgccaaaggtgtgtgtattttcagaaatggtccctatttgtcagtgatagtgttttttttttcttaagtttgacaaagggggtggtaatatcacattctttagatttgaaataattatcagctccaagaatctgtgaacatagtaataacaataaaaattcaacatcgaccctccctaacctgctcaccatacctccccaccccatgcctctgaagaaagaggccatgaacctacgaggtggtaaagggggacacaggtcagggagtggagagctactcctccagcagctcagcacccacactgcccgcatgcgtgtggccaccgggaccagatcccgagtgattgtggcatacccctaatatttgagtagtttttaagctgtcagtctcttgtcataacctcctaccgccacccaaaaaagtaacgaaagttgcagtaactgccagtgtttgcctcaccaaatttaaatcgttcccttttcagttagctatatacctgaatttgtttttaacaagaaactgtacatggccaggaaaaatggtactaccttggccaaagggtctttgcaaaaagctcagtcttcagttcttcactgtgacaaatgcttatcttgttcatgggaggggaaagatcagataaataggcaagaagtactctgttttaaataaagaataaatagtgtccgtttaaagcactttgtgcctcaacttcatttttaaactgtaaatcattgctttggaaataaattcccaattataattgacccatatctagccaatatcaacaagttgggatggtttttgtttttttcttttttttcaaaaagggaaattcctctttactgctcacagtaagctgcaaaagaaagttgtcaaggtggcttatgatgctgttgtagcagagctgtgaaaggaagtgctttgctttctctcccgccttccggaatctggcgttccttccccttcggctactgaaaggtgtgtacaactcccagaggggtggctgtaaaagttgactggaggcaaagtggagtggccttattgccaggactagccctacagaagagctttacagagaggaggacagtacatcctatgtgtgttcgccaaaaatgggaaaggtgggtatttaggcaaaacaaaataaaaacctttggaaccctttaagaagttacataccttttaaaggtagtatagtttctcaccaagtgatgcattttagcatgacacttcttgccagaaattttgggataagttggaataaatgtgtttaaaacatcatccaccgccctttttaaattttgtctaaggaattacttaagtatagtatttctgaatgtgcctttgtgagtacagagaccgtccgttctaggaagaagctatccgttggatacaaacaaacagacggtcagctttagtcattagggaagtcaaagttcctcctggaagtcccaggagcagctgttgagatttcattagcatcaatattgcacagtgtagagttgagtggaagagattctgggacttgggagaggagacaggggaaggtacccaggcgacgcagacccacgttagtccaagagcgcaggtttacacatctgcattccctagttttctccgtctgtatgtttgtgctcatgtggctttggctgttttgttttttgtttttctgtaagcactggagaattggaatatggtgatacttgtgacacattcatgcatgtaaacaaggcattttccagcttctgccgtgtgcagagcgggcagcacgcttttaccctttgagtctgtgtcctgaggcggccattacattcccacatgggcgtcacatcacgttgctgttgatgcaaacagggtattacacacaaggaaaaggggttttgaagagttaagattgaagtgtttgagaaagaaaagagaaaaatctgaaatcatattttatttcttcagagctattatagttgaacacagaaatctgcagtgtctttatttgtttttatgttttaaacaatttcacctcttctccccactcctatcttctaaagaaatatcaagcaaatgctaagggccatttccatgattcctcagagctcccccaaagaggagaacagtccctcccactcgattccttcagcttcattcaggaagacacagggaggagagatgctgcttctgcgctttgctctcattcctctctcatggccttgaaatgtattattatgcaaatgtgaattttgatactgaatttaagaagaggttgttggatttttttttttttttttttttttttcaaaaaaaaaagtcccacatgtggtcatcgtcgcttctttatgttgtaaggtgaattgtaactatgcattctgcaaagggggtggggaggagagggcagaaaggggaagggagtagcgttgcatccttgttcttcagtttctgtgtccatggtgtccccgtgtcctggaggggaaggggagtgagagacgaatgtggtaaggtcagcacagtgagatagagacctctgagtcctcttgccactgttgctggcaggtctgatggccaggtaaattccagggggcctgcagttcctgtcaaccaatgtggttcaggattcttgatcctagccgtgcagtgttaatccagtgcagcaatggaactccacaggctccagtgttctctggaaaaagtactcatcctttcctgaattcagagcccttcaagctcaggaaaccacgcttcactcgtgctgacctgaaagttaatctttaggtcgattttgaaaaactccgcctcctctctcctttttaatatttctttcttcctttttaatcatgtttaagtgaacttactcttagttataaggaactgtcctgctttgtggggaagagggctgttgcttgtcaggcaaaaaagttttctcttcctacccaccatccctctctctgcttcccttgcatttggcaggctgtatgaagccaatgagctgcgaggtgttttgacaggggaggtctgcatgcagcctcttctttgtcctaacaattcctttgttgatcttgcctgtgatgaatcatagcgcctgcattgctctggtctaggcattatttgcaacacacagtatcgtaagcgagagattgttctgcctatattcagtgttttccatgcagcaattcttcttgttgacgttcacagtactgtaacgagtaacagacttgatcacagtctcctcgtgcctgtgcagggctgcacaggcatgatcttatcagggttccaatctgttagattgcctttaaacaaaaaaaacaacaaaaaaataaaatcctgacgtttcaactgtctcacacaaaataatacctcgaggtacatttccccctgcaatgtaaacccttaactcctctctcctttctgacatcagtggattatcctttttaaaatatgaacatgtaaatagcaggataactttaaaaaacattttctttgctgtgaaagtaaccctaaaatatgttttcttcttttgtatttttttggtttttgtttttaagccatcagaagtttcagatctttactctttcatgtttaagaagaaagagcagaggaggtcgggggagccggtttgcatttgtgttggaggggtgttatctccattgcctcccacacagtgacagcagaccagtatgtaaaccctgtcttggctgggcgcggtggctcacaccagtaatcccagcactttgggaggctgaggcaggcagatcatctgaggtcaggagtttaagaccagcctggccaacatggtgaaaccccgtctctactaaaaaattagccggacgcagtggcgcgcgcctgtggtcccagctgctcgggaggctaaggcaggagaattgcttgaacccgggagacggaggttgcggtgagccgagattgcaccactgcactccagtgtgggcaacagagcaagacttcgactcaaaaacataaaataaacaaaagacacacacacacacaaaaaccctgtcttaaatagctgccatctcttccagcaatctagtgccagggtaagaagtgtctgaatttctctcttccagcagatccatcccctgcagggactccagaatgttctccacacaatacctggagctctcaacctttcttggttcagacacacacatacacaccccttgagtaactcagtatcattttgtagttcacagaaggatgtagtccctggcattttggtttgcactgtagaatccatagccttgtcactttgttatgctctggaaatgtactgatttcttacttgggaggaaacttgtgtaaggagatgtgcaaaccaccctgaaagccatgtgcatcctcacctcttccattaccccctccatgagctcgaagcgacattaagtagagggaaatgcttttaacaaatgctgctcatgtggatctgtcagctattgcttgcctagatttgggcacccatgaagcagggttggaatggatcattttgaattgcttctttgcagacacccccttcgcccccatctttaagataaaccctttactagtcaagaagcccttttcagttggatctcactgatcttgtatagtgacgacttcctttgaaggaagaagcttgattataagtgcatgcatattatccacccaccttctgatttgggcactgttcaccttggaattttatttattttgtttatctggaggccctttttctatcagtctctgatccctcatgggttctgcctgcccttgtatctcttgtacaatgctcccaaagggctttgctgatctctgcacttctttcctgggacactccccccaccaccaccctttgcacacaccagtgaccaaagtgtatgcagtgatctcacagaagacatcaaaaatggtgcatgcaccgtgaatgtgctcacagagacacgtgcacaagattctgcacccttggccttaatctcagtatgacttaaggtgcaggaacatttttaacaggttttaaaaaaacaaaaaacccttctgggaggaaaaaaataaaaagcagatacaacagctcaactgttcccactcctaactctccactatgtgcttataacttcacattctatgccctccccgccacccacctcatccctgttctgcgtaaccaaaaaacagacaacaaaagcaacctgaggagaggtttctggactattttatctgtctccatttagatggagatataaatgctgctttgggttccataatcctagggggctatgtttacatagtaaaatacatcctaccaaatcaggaaacagtgaataatgggagtcacttcacagagacgcaggaggacctggggggcgtagcagaggaggataggtagagaagtaccattttaattatttgtgacttgtggcttccttcctcctctcctcctccctccacgtctctctttgccccctttagacagaaggtgcagaaaagggcatcaaaaagaggctggattttttaaaaggcagctttccaactttgcacacaaacaggtaacaggaaggtacagcaaaaatcctctcatctgaaacactgtcagcagaaacaaaacctgtaaaaatgactaatcagctgcacatattgatgctctctgcaagttacctttaagtgttttttttttcttatacttgaagttgcttttacgatattattttggtggctttcttttctctctttgatgggcaatagaggaagtagataatgggatttaaggacgcctgggggagaaaagggaggatgtggcattgtctttttttttttttttttttttttttttagcatagaggtttaatcaaactcccatatgttgaaattgctcctcatattactggttttacatggacacagaaactaggcactttagaggtgcacttgcatggcaggctgggcccccttttctatattttattttcctttttagtatagtggtacttaaaatcactggttcacttaaaaaaacaaacaataaaatgttaaactctactaatgtacaaataagctgaaaagttgcattttatgtgtattttttgccatagcaggtactgtatttctcatgctggatttcaaaaaaaaaaaaaaaagtatcaaaaacaaaaaaaactaaagggtggtgttttattggattgtgacaggttgagtaataaggaattaagtcgtcgtcatttcattaaaactgagagatgatgtaatgcatatataagagttttctgaagggttttttttgggcttttaaacagcttatttttgtttttgtttagtttttttattttattttattttggaaagatatgattgtattatgtgcaactcagttgcttacattataactacaaaatatttttgggttcctggaaaaaaaagaaaaaagactaataaatgtgtttggctgctaagc

SEQ ID NO: 4306 - DNA, 17930 bp, Homo sapiens
  source 1..17930: mol_type = genomic DNA
gagagagcaagagggagagtgtgtgagagagagttagttcaagccaaaatggccgacagagtctctgctggtttctgaatatttaaaatacaaaaaaacagatagacaaaaagaattcattttttggaccttttttcatttccatttctaccttgtatgcctcaatttgctggatttaagcactgctgcactttatgagagagaaggagcaagaaagggaagaacagttaatggaagacaagaaaaggaagaaagaggataaaaagaaaaaagaagccactcagaaggtcacggaacaaaaaaccaaagtgcccgaagtgacgaaaccaagtttaagccaaccaacggccgccagcccaattggcagctctccatcgccaccagtcaatggtggcaacaatgccaaaagggtggcagtgccgaacggacaaccgccaagcgccgcccgctacatgcctcgggaggtgccgccgcgattccgttgccagcaggaccacaaagtgttactaaaacgtgggcagccccctccaccgtcctgcatgctccttgggggtggggcagggcctcctccctgcacagcacctggagcaaacccaaacaacgcacaagtgacaggagcgctgctgcagagtgagagtgggactgcgccagactcaacccttggaggtgctgctgcttcaaattatgcaaattccacttggggctcgggagcctcctccaacaacggcacctcccccaacccaattcacatctgggacaaggtgattgtagacgggtctgacatggaagagtggccttgtattgccagcaaagacactgaatcttcttccgaaaacaccaccgataacaacagtgcctcgaaccctggctctgagaagagcactctgccaggaagcaccactagtaacaaaggaaaagggagccagtgccagtctgcaagttctgggaacgaatgtaatcttggggtctggaaatctgaccctaaggctaaatctgttcaatcttccaactctactacagagaacaacaatggactaggaaattggaggaatgtgagtggtcaggatagaattggacctggctctggcttcagcaactttaacccaaatagcaacccatctgcctggccagcactggtccaagaaggaacttctaggaaaggggcattggaaacagataatagtaattccagtgcacaggttagcacagtaggtcagacatccagggaacagcagtcaaagatggaaaatgcgggtgttaattttgttgtctctggcagagaacaggctcaaattcataacactgatggaccaaaaaatggaaacactaactccttgaacttaagttcaccaaaccccatggagaataagggaatgccctttggaatgggcttggggaacacctccaggagcactgatgccccttcacaaagcactggagatcgaaagactgggagtgttggatcttggggtgcagctagggggccttctggaactgacacagtctctggacaaagcaattctggaaacaatgggaacaatggaaaagagagagaggactcctggaaaggagcttctgttcagaaatcaactgggtcaaaaaatgactcttgggacaacaataacaggtctacgggtgggtcctggaactttggcccccaggactctaatgacaacaaatggggtgaagggaacaaaatgacatctggggtctctcagggagaatggaaacagccgactgggtctgatgagttgaaaattggagaatggagtggtccaaaccaaccaaattctagcactggagcatgggacaatcaaaagggccaccccctccctgaaaaccaaggcaatgcccaggctccctgttggggaagatcttccagctccacaggaagtgaagttggaggtcaaagcactggaagcaaccacaaagcaggaagtagtgacagtcataactctggccgtcggtcgtacaggcccacacatcctgattgtcaggctgtcttgcagactcttttgagccgaactgatttggaccccagggtgctctcaaacactggctggggccaaactcaaattaagcaggacacagtgtgggacattgaagaggtgccaaggcctgaggggaaatctgacaaaggaactgaggggtgggagagcgctgccacacagaccaagaactcagggggctggggagatgcacccagccaaagcaatcaaatgaagtctggatggggggagctctcagcctctacagagtggaaagaccccaagaacacaggaggctggaatgactacaagaacaacaactcttccaactggggaggaggacgacctgatgaaaagacaccttcctcttggaatgagaatcccagcaaggatcaggggtggggaggtggacgccagcccaatcaaggatggtcttctggaaagaatggttggggggaggaagtcgatcagacaaaaaacagcaattgggaaagttctgcaagtaaacctgtgtctgggtggggtgaaggagggcagaatgaaatcgggacttggggtaatggtggcaatgcaagcctagcttcaaaaggtgggtgggaggattgcaaaagatccccagcatggaatgagacgggccgacagcccaattcctggaataaacaacaccaacagcagcagcccccacagcagccgccgccaccacaaccagaggcttctggttcgtggggaggcccacccccaccacctccaggcaacgttcgaccttccaattccagctggagcagcgggccacagcctgcaacacctaaggatgaggaacccagtggttgggaagagccatccccacagtcaattagtcggaaaatggacattgatgatggcacttcagcatggggagaccctaacagttataactacaagaatgtgaatctgtgggataagaattcccaagggggcccagcacctcgagaaccaaacctgcccaccccaatgaccagtaaatcggcatcagattccaaatctatgcaagacggctggggggagagtgacgggccagtcacaggagctcgccatcccagctgggaagaggaggaggatggaggagtctggaacaccactggctctcagggcagtgcttcctcccacaactcagcaagctggggacaaggaggaaagaaacaaatgaagtgctcactcaaaggaggaaacaatgattcatggatgaatcctcttgccaaacagttttcaaatatgggattgctgagtcagactgaagataatccaagcagcaaaatggatttgtctgtaggaagcctttcagataaaaaatttgatgtggacaagcgagcgatgaatctcggggattttaatgatatcatgaggaaggatcgatctgggttccgtccacctaattccaaagacatgggaaccacagatagtgggccttattttgagaagggcggtagtcatggtttgtttggaaacagcacagcacaatcgagaggtctgcacacacccgtgcagccactaaattcttctcccagtctccgggcgcaagtgcctccccagtttatttccccccaggtttctgcctcaatgctcaagcagtttcccaacagtggcctgagtccaggtcttttcaatgtggggccccagttatctcctcaacaaattgccatgctgagccagcttccacaaattccccagtttcagttggcatgtcagcttctcttgcagcagcagcaacagcagcagttgttacagaaccagagaaagatttctcaagctgtacgccaacagcaagagcagcagctggctcgaatggtgagtgcactgcagcagcagcagcagcagcagcagaggcagccaggcatgaagcactcgccctctcatcctgttgggcccaagccgcatctggacaacatggtacccaacgcattgaatgtggggctcccagaccttcaaaccaaagggccaatacctggatatggttctggcttcagctctggcggcatggactatggcatggttggtgggaaggaggctggaaccgagtctcgctttaaacagtggacctccatgatggaggggctgccctctgtagccacacaggaagccaatatgcacaaaaatggcgctatagtggcccctggtaaaacccggggagggtcaccgtacaaccagtttgatatcatccctggtgacacactgggtggccatacgggtcctgctggtgatagctggttacctgccaaatctccaccaacaaataaaatcggaagtaaatccagcaatgccagttggcctccagaattccaaccaggagtgccatggaaaggtatccaaaacattgaccctgaatctgacccctatgtcaccccaggaagtgtgctggggggtacagccacatctcccattgtagatactgaccaccaactgctgcgggataacaccacagggtctaattcttccctcaacacctcgctgccttcacctggtgcctggccctacagtgcctctgacaactcctttaccaacgttcatagcacttcagcaaagttccctgattacaaatcaacatggtccccagatcccataggacacaaccccactcatctctccaacaagatgtggaaaaaccatatttcctccaggaacactacaccgctgccccgcccacctcctggtctgaccaaccccaaaccatcatctccctggagcagcacagcaccccgatcagtcagggggtgggggacacaggactcacggctcgcctcggcctctacctggagtgatggtggctcagttcgtcctagttactggctggttcttcacaatctcaccccacagattgatgggtcaaccttgagaacgatctgcatgcagcatggcccactgctgacattccatctgaatctaacccagggcactgccctgatccgatacagcaccaaacaggaggcggccaaggcccaaactgcactgcacatgtgtgtgttgggaaacactaccatccttgctgagtttgccactgatgatgaagtcagccgctttctggcacaagctcagccccctacacctgcagcaaccccaagtgcgccagctgcggggtggcagtcgctggagaccggccagaaccagtcagatcccgtgggacctgctctgaatctttttggtgggtccactgggctcgggcagtggagcagcagcgctggtggcagcagcggggccgatcttgctggcgcttcattgtgggggcccccaaactattcttctagcttatggggagtcccaacggtggaagatccccataggatgggcagccctgctcctttactacctggtgaccttctgggaggagggtcggattcaatctgaacttagaactttcaactctgacctcgtgaccttttttggaacagcagcagcactaacttgaccttttcgttttttttttcaacttgcaataaatacatttttaaaaggaaaaaagaaaacggagagaaaaaaaggtgggtcattgacagactgtctgagcacatagttgcctcccttataacttcagttttttcgtttggaatatgaatccaaaaagagaacatatcactcttgaaatacttgaatcatgaacgccaacctagaaagacaatgtgaagcaagtacacataccatttaaatttaaacacaaaaaaattaaaaaaattagtttctagtttttcacttttttcatgttatatggaagttgttgctaagaaacatatatactgaaaaaaaatagctttttaactttgtttgcactgggtgtgtttccgtccttaggtctaccatgtttgggagggagggaaattcaaaagaattgttgggggaggggggagggaagacttgacggagcctcactttaaaaacaaaaacacaaaaaacctaaaaaaaaaaaaaaggaaaaaatttgtgattggctggttgataaataccagtgtgttctggcacatgtaactgcccaggcatgctcgttctggtgtgtgtgtgcacgtgtgttcatgtgcattcgcgtgcatccttctctgtctctgtgtgtgtgcctgtgttcttcccttctcccctgccccaccctgacttctcagaaagctgcatcgctgacagtctgcaggctggctggccggcccatctgctttttattttatttttttaactatgagaacacacaggcccggagagccactgctactaaagcaactccattgggctgcattaagatgaacagagtgctttttaatgatgaaagcagggagctcctttccatttgcaacttagcctgaatgtggggtttctctggctgttcttttgacctagcagtagagtggagcactgccaagtccaaaaaactagagcaggaggtacctcttggagcaacggtgtgtttatttctgtttttttttttttttaagtgaatggccaccaggcacatctgagtatctgttaagtttcatgcaggccttttcgttagtttgaaatgggaacggaagataacttttgatgatgcgatgtctcaaaaacagagaaactttgttccctctttccttatgatcaggtttgagaaattcttcaaaaaattaggtgaagttgagttacatatttctgttggttggttctctttttcattttatgaaaacagaaaagaataagtggtgagcagcctcctgaaagcatctgcagctactccctctgctcctttctcgccgagcgttacctgtgccaggccgtggcgcgttacagcaccaggccatcactgacagaaacgtttacttaacgaatgttcttaaaccagtgtgtacttcaagcgtttccttttgtttctctgtgttgtgtatttcctgtgtatgtggttttgcttaggcaggtataacttagcgaagacttttaagtattgcacctttttttgatttttgacctcttccccccaccttgtaattttgcttttttaatttcggtatttaaatacttttttttttttttaagcatcaatgtagtagtactctgggccgaacaggggtcaacgtttaatctacagttatcaccaacatgtatgtacttatgtcggaatcaaaatgtatcaaactgcttattgtgaagagaattatagcagacctgaagggggcgaaaaaccagatagggtggggggatggatgccggtgacgtgctagcacttgtgtggacatcccagtctgcattatgctgtttaacataaagtgccgacattttgtaccagcaaatacctgcccattccaacccttggtgggagcagacctctactgtcctctgtaacttgctgctattgaggacaagggagtttttctttctttagcgtcttcagtgaaggatacaatacaacaatgcctaatgtatttgactttttagcttgtgtctgtgtgtaggtgggtgggtgggtgtgtataggaaaagcctaaaacaagttatttgcatttcagtggttttgtgagacaaagaatgggaaattctgtagcccttctggcttaccctgttgattataaacctagcctcaaaagagattgacaggcatgactcaagtgagtgttcacatatacaagcctgcatgagccctctgtgggtaggtggtcacacttggcatctgcagcattgacgtggccccgctgggtgccttgagcatgccctcttcctgctctgcaatttgaatcaccaccgtgccccttccaccactgttccccatgcaaaagctctgcttccagcagcccccactgaccgctctctgtgtggagcaaagtgctgtcgtgcggtgaccaccaggtgaagagcagcttgtattcagacatctagagaaggttaaatcttagtgtccctgggccaggagcatatcccaaggctcctgcgagccagtggcgaccctgtccactgccgctcttggttcactgctgtgtcctgccccaccctcctctcctcctgcctgttggttccttgacctgcactatgggttagttgagttccttacgatactacggtgaaagccgggtgctagagcccctcttgtttacaagacataatgagggatttgaaatatgtaaaaataaacatgagaagctaaaatgttcttccatcataagcttaaagggaaaaaaactaaaaactttaaaaaaaaaagaccaaaaagtgcgtatatatatacatataaatatatattttagatgaagactaactctgggagcatttaacagtgttttttgtttctgtttttaacatttgttttcctgctttaaaatttgcaagcattctcaggaattctagggtaggaagccagttttttgaagatggtttatttaaccatatcttatcctagagagatggctgtttctttcctgttaataaacttttacaagttcctgaaacttcagaaagtttaaacaatttttacttaaaaaaatgtaaaaagaaaagtctccaaacattattgtcatactggggatcacacattttaaaacacatagaaatattttttaaaaattatcaatttagcagcaacaggtaaattcattatcttaaaaatatgggagaaggattaagctttgtaagagctcgatcatggattcttttgaaattgtgtgtagtttaatgggagagtgtttggtgtatatagatgagaatgccatcactttgttcctttccatttgagactgaactgaaatctcccctagtaatttttatttttttaaaggaacccttctccttgtccccacaaccccagcaacaaaagaaaggaaggaaggaagaaacaacagcttaaaaaaaaaagtaatctgtaaaatagtacagttggattgctgagaatctatgtaaagagttaggaaatataggttaataatttttggaacaaattttaaatataggcattactagaggaaaattatctatggactgtcctattaatgaagaatgtctgtcttacctccgtttgttttgggaggaggagaaaatatagaagaatctaataaggaacaagtgattttacttttttagctcccagctactgttgtgctcgttttaattgctgttttgaagatctgctgcttaattatccccatcccttagccggagatgtggagtgtttcctttcagtttttggtgatgttgaattcttttgtattccctcctggggccaggggtcagaattcccaagcatgaccacagcttcttttaaacattaagcttcccagtgggaaggaaactccagctcgacaggtaaagggagtgggtggggttgctgcctgcaatttctctaaaaccgctttagtgccttcgtacatacacccagacatcctgagcaagggggacgcacatgtgtgtgtgtgtggtccagtcactccacagatgtaagatactcacccataaaggaaattggagtggttctggacaggccccaaaggcagtgggctgaatttaaaataaataaacaaacgtcaagcaagttaatatgcttatgtctcagtaatgtagaatgccaagttccttcctgtgtcgtgtgccctccattactgtgcattgattcctccaggtgtgtaattgtgacaactgcagtgatttggaaagtctctttgtcttgggcaaatagaaggggttcctgttgttctgctcttgtccttcgtctcctccccttttcccccagacctcccccttctttttgtcaacttgctgggagctttgctttattggttggcagtgacctaagaacaggatatggtgaggatgtcatggaagagaagagctctttccgtggtattctttggcaagagccatgtctactaagaggttagatgacttcagtatacttataaaattcagtgagagtgccttcttctcttctaccacactctggcatagatacaggcttgctggtcacctctcattacatagatttattttaaaaacattttgattatgttaatttgagctttcccttttttttttttaactactttttaaaacacttgattactagtggcttagaggtgtgtacatctcctgaacatcacaaacttggtttctacctaccacacgagtagccaaaagaaaagaagcactaatagagaaaggggtgtctcacaccagacagaggacctctgctgtcaattagatccagtatcatgacctaactttaagtgtggaaaagagttcagatctctgagacactgtgaagaaatggatggctcatgtaacatctctgatccctcagtccccaaccctggacgtgtttcatttacaacattcataggagttaacttagcagtgttgcaagttaaggttccaaaccaaattatttaatcagtgtccccccaataaatcacttatccatttattgctagttagttttatttatagcaacttgatttcctatgagtatggctcctgttgtaagaattttcccacctcttctgacatgaatgtagcataagttagcaatcggttcttccaaactcctgtgggttgaatatggtatagaaggtatgcaagaggaaaaagaaaggaaaagataaaactcctgcctgagaatttggaagcacctttattaacacatatatctcgcagaaactagaagctcataggctgttaactttttgcaactattcactcatttttaccacttttttttttgggtgagggggtgatttttgtaaggttaacagccagattccattttgacctcagatgctgtgtactttttaatttcattttttatattctgccatcttgactcttctctaaaacagaatgaaaatgtctgcatgctgagcaaaatgcttacgccaagcctgtttttctctgcagagtaaacaggatgttttcagcagacttggctctaatagccatctctaagattagggaacaattgagtctttatgtagaaaagatccattttttccccatcctcagagttaaaattcaacatttaaagctttatcggttattgttttagatttgagatttttgtttttaagtatctataagatctttagaagtgagataaatttttcgctggttaaaaaaaatcaaactttcctctgcagtgtttttgccaagttttgtcacacttcatgtgtatgcattaactatacttcttagtgttactgcaaaaaaaaaaaacaaaaacaaaacaaaaaaaagccttgttctttaattgtgtttttcctcctgtgagtggacaactaaagccgcgtgatgatgcggatgaaaatattctggtctgtgtgtatacaatgaattgtcagtcttcagacctcatggtcgttaagaaaatagggaactcacaaaccctgctgcgcactacatttacttctttatctgcaagtacagggagtccatacagtcaagaaacacacagatacacataatgctattgaggacattgtcattctgtaagaaaacagaatattatctagatttccagagttagtgcagaccctgtgataacagtctgtgggtttgtggccagcgccaaaggtgtgtgtattttcagaaatggtccctatttgtcagtgatagtgttttttttttcttaagtttgacaaagggggtggtaatatcacattctttagatttgaaataattatcagctccaagaatctgtgaacatagtaataacaataaaaattcaacatcgaccctccctaacctgctcaccatacctccccaccccatgcctctgaagaaagaggccatgaacctacgaggtggtaaagggggacacaggtcagggagtggagagctactcctccagcagctcagcacccacactgcccgcatgcgtgtggccaccgggaccagatcccgagtgattgtggcatacccctaatatttgagtagtttttaagctgtcagtctcttgtcataacctcctaccgccacccaaaaaagtaacgaaagttgcagtaactgccagtgtttgcctcaccaaatttaaatcgttcccttttcagttagctatatacctgaatttgtttttaacaagaaactgtacatggccaggaaaaatggtactaccttggccaaagggtctttgcaaaaagctcagtcttcagttcttcactgtgacaaatgcttatcttgttcatgggaggggaaagatcagataaataggcaagaagtactctgttttaaataaagaataaatagtgtccgtttaaagcactttgtgcctcaacttcatttttaaactgtaaatcattgctttggaaataaattcccaattataattgacccatatctagccaatatcaacaagttgggatggtttttgtttttttcttttttttcaaaaagggaaattcctctttactgctcacagtaagctgcaaaagaaagttgtcaaggtggcttatgatgctgttgtagcagagctgtgaaaggaagtgctttgctttctctcccgccttccggaatctggcgttccttccccttcggctactgaaaggtgtgtacaactcccagaggggtggctgtaaaagttgactggaggcaaagtggagtggccttattgccaggactagccctacagaagagctttacagagaggaggacagtacatcctatgtgtgttcgccaaaaatgggaaaggtgggtatttaggcaaaacaaaataaaaacctttggaaccctttaagaagttacataccttttaaaggtagtatagtttctcaccaagtgatgcattttagcatgacacttcttgccagaaattttgggataagttggaataaatgtgtttaaaacatcatccaccgccctttttaaattttgtctaaggaattacttaagtatagtatttctgaatgtgcctttgtgagtacagagaccgtccgttctaggaagaagctatccgttggatacaaacaaacagacggtcagctttagtcattagggaagtcaaagttcctcctggaagtcccaggagcagctgttgagatttcattagcatcaatattgcacagtgtagagttgagtggaagagattctgggacttgggagaggagacaggggaaggtacccaggcgacgcagacccacgttagtccaagagcgcaggtttacacatctgcattccctagttttctccgtctgtatgtttgtgctcatgtggctttggctgttttgttttttgtttttctgtaagcactggagaattggaatatggtgatacttgtgacacattcatgcatgtaaacaaggcattttccagcttctgccgtgtgcagagcgggcagcacgcttttaccctttgagtctgtgtcctgaggcggccattacattcccacatgggcgtcacatcacgttgctgttgatgcaaacagggtattacacacaaggaaaaggggttttgaagagttaagattgaagtgtttgagaaagaaaagagaaaaatctgaaatcatattttatttcttcagagctattatagttgaacacagaaatctgcagtgtctttatttgtttttatgttttaaacaatttcacctcttctccccactcctatcttctaaagaaatatcaagcaaatgctaagggccatttccatgattcctcagagctcccccaaagaggagaacagtccctcccactcgattccttcagcttcattcaggaagacacagggaggagagatgctgcttctgcgctttgctctcattcctctctcatggccttgaaatgtattattatgcaaatgtgaattttgatactgaatttaagaagaggttgttggatttttttttttttttttttttttttcaaaaaaaaaagtcccacatgtggtcatcgtcgcttctttatgttgtaaggtgaattgtaactatgcattctgcaaagggggtggggaggagagggcagaaaggggaagggagtagcgttgcatccttgttcttcagtttctgtgtccatggtgtccccgtgtcctggaggggaaggggagtgagagacgaatgtggtaaggtcagcacagtgagatagagacctctgagtcctcttgccactgttgctggcaggtctgatggccaggtaaattccagggggcctgcagttcctgtcaaccaatgtggttcaggattcttgatcctagccgtgcagtgttaatccagtgcagcaatggaactccacaggctccagtgttctctggaaaaagtactcatcctttcctgaattcagagcccttcaagctcaggaaaccacgcttcactcgtgctgacctgaaagttaatctttaggtcgattttgaaaaactccgcctcctctctcctttttaatatttctttcttcctttttaatcatgtttaagtgaacttactcttagttataaggaactgtcctgctttgtggggaagagggctgttgcttgtcaggcaaaaaagttttctcttcctacccaccatccctctctctgcttcccttgcatttggcaggctgtatgaagccaatgagctgcgaggtgttttgacaggggaggtctgcatgcagcctcttctttgtcctaacaattcctttgttgatcttgcctgtgatgaatcatagcgcctgcattgctctggtctaggcattatttgcaacacacagtatcgtaagcgagagattgttctgcctatattcagtgttttccatgcagcaattcttcttgttgacgttcacagtactgtaacgagtaacagacttgatcacagtctcctcgtgcctgtgcagggctgcacaggcatgatcttatcagggttccaatctgttagattgcctttaaacaaaaaaaacaacaaaaaaataaaatcctgacgtttcaactgtctcacacaaaataatacctcgaggtacatttccccctgcaatgtaaacccttaactcctctctcctttctgacatcagtggattatcctttttaaaatatgaacatgtaaatagcaggataactttaaaaaacattttctttgctgtgaaagtaaccctaaaatatgttttcttcttttgtatttttttggtttttgtttttaagccatcagaagtttcagatctttactctttcatgtttaagaagaaagagcagaggaggtcgggggagccggtttgcatttgtgttggaggggtgttatctccattgcctcccacacagtgacagcagaccagtatgtaaaccctgtcttggctgggcgcggtggctcacaccagtaatcccagcactttgggaggctgaggcaggcagatcatctgaggtcaggagtttaagaccagcctggccaacatggtgaaaccccgtctctactaaaaaattagccggacgcagtggcgcgcgcctgtggtcccagctgctcgggaggctaaggcaggagaattgcttgaacccgggagacggaggttgcggtgagccgagattgcaccactgcactccagtgtgggcaacagagcaagacttcgactcaaaaacataaaataaacaaaagacacacacacacacaaaaaccctgtcttaaatagctgccatctcttccagcaatctagtgccagggtaagaagtgtctgaatttctctcttccagcagatccatcccctgcagggactccagaatgttctccacacaatacctggagctctcaacctttcttggttcagacacacacatacacaccccttgagtaactcagtatcattttgtagttcacagaaggatgtagtccctggcattttggtttgcactgtagaatccatagccttgtcactttgttatgctctggaaatgtactgatttcttacttgggaggaaacttgtgtaaggagatgtgcaaaccaccctgaaagccatgtgcatcctcacctcttccattaccccctccatgagctcgaagcgacattaagtagagggaaatgcttttaacaaatgctgctcatgtggatctgtcagctattgcttgcctagatttgggcacccatgaagcagggttggaatggatcattttgaattgcttctttgcagacacccccttcgcccccatctttaagataaaccctttactagtcaagaagcccttttcagttggatctcactgatcttgtatagtgacgacttcctttgaaggaagaagcttgattataagtgcatgcatattatccacccaccttctgatttgggcactgttcaccttggaattttatttattttgtttatctggaggccctttttctatcagtctctgatccctcatgggttctgcctgcccttgtatctcttgtacaatgctcccaaagggctttgctgatctctgcacttctttcctgggacactccccccaccaccaccctttgcacacaccagtgaccaaagtgtatgcagtgatctcacagaagacatcaaaaatggtgcatgcaccgtgaatgtgctcacagagacacgtgcacaagattctgcacccttggccttaatctcagtatgacttaaggtgcaggaacatttttaacaggttttaaaaaaacaaaaaacccttctgggaggaaaaaaataaaaagcagatacaacagctcaactgttcccactcctaactctccactatgtgcttataacttcacattctatgccctccccgccacccacctcatccctgttctgcgtaaccaaaaaacagacaacaaaagcaacctgaggagaggtttctggactattttatctgtctccatttagatggagatataaatgctgctttgggttccataatcctagggggctatgtttacatagtaaaatacatcctaccaaatcaggaaacagtgaataatgggagtcacttcacagagacgcaggaggacctggggggcgtagcagaggaggataggtagagaagtaccattttaattatttgtgacttgtggcttccttcctcctctcctcctccctccacgtctctctttgccccctttagacagaaggtgcagaaaagggcatcaaaaagaggctggattttttaaaaggcagctttccaactttgcacacaaacaggtaacaggaaggtacagcaaaaatcctctcatctgaaacactgtcagcagaaacaaaacctgtaaaaatgactaatcagctgcacatattgatgctctctgcaagttacctttaagtgttttttttttcttatacttgaagttgcttttacgatattattttggtggctttcttttctctctttgatgggcaatagaggaagtagataatgggatttaaggacgcctgggggagaaaagggaggatgtggcattgtctttttttttttttttttttttttttttagcatagaggtttaatcaaactcccatatgttgaaattgctcctcatattactggttttacatggacacagaaactaggcactttagaggtgcacttgcatggcaggctgggcccccttttctatattttattttcctttttagtatagtggtacttaaaatcactggttcacttaaaaaaacaaacaataaaatgttaaactctactaatgtacaaataagctgaaaagttgcattttatgtgtattttttgccatagcaggtactgtatttctcatgctggatttcaaaaaaaaaaaaaaaagtatcaaaaacaaaaaaaactaaagggtggtgttttattggattgtgacaggttgagtaataaggaattaagtcgtcgtcatttcattaaaactgagagatgatgtaatgcatatataagagttttctgaagggttttttttgggcttttaaacagcttatttttgtttttgtttagtttttttattttattttattttggaaagatatgattgtattatgtgcaactcagttgcttacattataactacaaaatatttttgggttcctggaaaaaaaagaaaaaagactaataaatgtgtttggctgctaa

SEQ ID NO: 4307 - DNA, 17949 bp, Homo sapiens
  source 1..17949: mol_type = genomic DNA
agagacagagagggagagagagagcaagagggagagtgtgtgagagagagttagttcaagccaaaatggccgacagagtctctgctggtttctgaatatttaaaatacaaaaaaacagatagacaaaaagaattcattttttggaccttttttcatttccatttctaccttgtatgcctcaatttgctggatttaagcactgctgcactttatgagagagaaggagcaagaaagggaagaacagttaatggaagacaagaaaaggaagaaagaggataaaaagaaaaaagaagccactcagaagcactccaatcaaaagacagcaatgcccgaagtgacgaaaccaagtttaagccaaccaacggccgccagcccaattggcagctctccatcgccaccagtcaatggtggcaacaatgccaaaagggtggcagtgccgaacggacaaccgccaagcgccgcccgctacatgcctcgggaggtgccgccgcgattccgttgccagcaggaccacaaagtgttactaaaacgtgggcagccccctccaccgtcctgcatgctccttgggggtggggcagggcctcctccctgcacagcacctggagcaaacccaaacaacgcacaagtgacaggagcgctgctgcagagtgagagtgggactgcgccagactcaacccttggaggtgctgctgcttcaaattatgcaaattccacttggggctcgggagcctcctccaacaacggcacctcccccaacccaattcacatctgggacaaggtgattgtagacgggtctgacatggaagagtggccttgtattgccagcaaagacactgaatcttcttccgaaaacaccaccgataacaacagtgcctcgaaccctggctctgagaagagcactctgccaggaagcaccactagtaacaaaggaaaagggagccagtgccagtctgcaagttctgggaacgaatgtaatcttggggtctggaaatctgaccctaaggctaaatctgttcaatcttccaactctactacagagaacaacaatggactaggaaattggaggaatgtgagtggtcaggatagaattggacctggctctggcttcagcaactttaacccaaatagcaacccatctgcctggccagcactggtccaagaaggaacttctaggaaaggggcattggaaacagataatagtaattccagtgcacaggttagcacagtaggtcagacatccagggaacagcagtcaaagatggaaaatgcgggtgttaattttgttgtctctggcagagaacaggctcaaattcataacactgatggaccaaaaaatggaaacactaactccttgaacttaagttcaccaaaccccatggagaataagggaatgccctttggaatgggcttggggaacacctccaggagcactgatgccccttcacaaagcactggagatcgaaagactgggagtgttggatcttggggtgcagctagggggccttctggaactgacacagtctctggacaaagcaattctggaaacaatgggaacaatggaaaagagagagaggactcctggaaaggagcttctgttcagaaatcaactgggtcaaaaaatgactcttgggacaacaataacaggtctacgggtgggtcctggaactttggcccccaggactctaatgacaacaaatggggtgaagggaacaaaatgacatctggggtctctcagggagaatggaaacagccgactgggtctgatgagttgaaaattggagaatggagtggtccaaaccaaccaaattctagcactggagcatgggacaatcaaaagggccaccccctccctgaaaaccaaggcaatgcccaggctccctgttggggaagatcttccagctccacaggaagtgaagttggaggtcaaagcactggaagcaaccacaaagcaggaagtagtgacagtcataactctggccgtcggtcgtacaggcccacacatcctgattgtcaggctgtcttgcagactcttttgagccgaactgatttggaccccagggtgctctcaaacactggctggggccaaactcaaattaagcaggacacagtgtgggacattgaagaggtgccaaggcctgaggggaaatctgacaaaggaactgaggggtgggagagcgctgccacacagaccaagaactcagggggctggggagatgcacccagccaaagcaatcaaatgaagtctggatggggggagctctcagcctctacagagtggaaagaccccaagaacacaggaggctggaatgactacaagaacaacaactcttccaactggggaggaggacgacctgatgaaaagacaccttcctcttggaatgagaatcccagcaaggatcaggggtggggaggtggacgccagcccaatcaaggatggtcttctggaaagaatggttggggggaggaagtcgatcagacaaaaaacagcaattgggaaagttctgcaagtaaacctgtgtctgggtggggtgaaggagggcagaatgaaatcgggacttggggtaatggtggcaatgcaagcctagcttcaaaaggtgggtgggaggattgcaaaagatccccagcatggaatgagacgggccgacagcccaattcctggaataaacaacaccaacagcagcagcccccacagcagccgccgccaccacaaccagaggcttctggttcgtggggaggcccacccccaccacctccaggcaacgttcgaccttccaattccagctggagcagcgggccacagcctgcaacacctaaggatgaggaacccagtggttgggaagagccatccccacagtcaattagtcggaaaatggacattgatgatggcacttcagcatggggagaccctaacagttataactacaagaatgtgaatctgtgggataagaattcccaagggggcccagcacctcgagaaccaaacctgcccaccccaatgaccagtaaatcggcatcagattccaaatctatgcaagacggctggggggagagtgacgggccagtcacaggagctcgccatcccagctgggaagaggaggaggatggaggagtctggaacaccactggctctcagggcagtgcttcctcccacaactcagcaagctggggacaaggaggaaagaaacaaatgaagtgctcactcaaaggaggaaacaatgattcatggatgaatcctcttgccaaacagttttcaaatatgggattgctgagtcagactgaagataatccaagcagcaaaatggatttgtctgtaggaagcctttcagataaaaaatttgatgtggacaagcgagcgatgaatctcggggattttaatgatatcatgaggaaggatcgatctgggttccgtccacctaattccaaagacatgggaaccacagatagtgggccttattttgagaagggcggtagtcatggtttgtttggaaacagcacagcacaatcgagaggtctgcacacacccgtgcagccactaaattcttctcccagtctccgggcgcaagtgcctccccagtttatttccccccaggtttctgcctcaatgctcaagcagtttcccaacagtggcctgagtccaggtcttttcaatgtggggccccagttatctcctcaacaaattgccatgctgagccagcttccacaaattccccagtttcagttggcatgtcagcttctcttgcagcagcagcaacagcagcagttgttacagaaccagagaaagatttctcaagctgtacgccaacagcaagagcagcagctggctcgaatggtgagtgcactgcagcagcagcagcagcagcagcagaggcagccaggcatgaagcactcgccctctcatcctgttgggcccaagccgcatctggacaacatggtacccaacgcattgaatgtggggctcccagaccttcaaaccaaagggccaatacctggatatggttctggcttcagctctggcggcatggactatggcatggttggtgggaaggaggctggaaccgagtctcgctttaaacagtggacctccatgatggaggggctgccctctgtagccacacaggaagccaatatgcacaaaaatggcgctatagtggcccctggtaaaacccggggagggtcaccgtacaaccagtttgatatcatccctggtgacacactgggtggccatacgggtcctgctggtgatagctggttacctgccaaatctccaccaacaaataaaatcggaagtaaatccagcaatgccagttggcctccagaattccaaccaggagtgccatggaaaggtatccaaaacattgaccctgaatctgacccctatgtcaccccaggaagtgtgctggggggtacagccacatctcccattgtagatactgaccaccaactgctgcgggataacaccacagggtctaattcttccctcaacacctcgctgccttcacctggtgcctggccctacagtgcctctgacaactcctttaccaacgttcatagcacttcagcaaagttccctgattacaaatcaacatggtccccagatcccataggacacaaccccactcatctctccaacaagatgtggaaaaaccatatttcctccaggaacactacaccgctgccccgcccacctcctggtctgaccaaccccaaaccatcatctccctggagcagcacagcaccccgatcagtcagggggtgggggacacaggactcacggctcgcctcggcctctacctggagtgatggtggctcagttcgtcctagttactggctggttcttcacaatctcaccccacagattgatgggtcaaccttgagaacgatctgcatgcagcatggcccactgctgacattccatctgaatctaacccagggcactgccctgatccgatacagcaccaaacaggaggcggccaaggcccaaactgcactgcacatgtgtgtgttgggaaacactaccatccttgctgagtttgccactgatgatgaagtcagccgctttctggcacaagctcagccccctacacctgcagcaaccccaagtgcgccagctgcggggtggcagtcgctggagaccggccagaaccagtcagatcccgtgggacctgctctgaatctttttggtgggtccactgggctcgggcagtggagcagcagcgctggtggcagcagcggggccgatcttgctggcgcttcattgtgggggcccccaaactattcttctagcttatggggagtcccaacggtggaagatccccataggatgggcagccctgctcctttactacctggtgaccttctgggaggagggtcggattcaatctgaacttagaactttcaactctgacctcgtgaccttttttggaacagcagcagcactaacttgaccttttcgttttttttttcaacttgcaataaatacatttttaaaaggaaaaaagaaaacggagagaaaaaaaggtgggtcattgacagactgtctgagcacatagttgcctcccttataacttcagttttttcgtttggaatatgaatccaaaaagagaacatatcactcttgaaatacttgaatcatgaacgccaacctagaaagacaatgtgaagcaagtacacataccatttaaatttaaacacaaaaaaattaaaaaaattagtttctagtttttcacttttttcatgttatatggaagttgttgctaagaaacatatatactgaaaaaaaatagctttttaactttgtttgcactgggtgtgtttccgtccttaggtctaccatgtttgggagggagggaaattcaaaagaattgttgggggaggggggagggaagacttgacggagcctcactttaaaaacaaaaacacaaaaaacctaaaaaaaaaaaaaaggaaaaaatttgtgattggctggttgataaataccagtgtgttctggcacatgtaactgcccaggcatgctcgttctggtgtgtgtgtgcacgtgtgttcatgtgcattcgcgtgcatccttctctgtctctgtgtgtgtgcctgtgttcttcccttctcccctgccccaccctgacttctcagaaagctgcatcgctgacagtctgcaggctggctggccggcccatctgctttttattttatttttttaactatgagaacacacaggcccggagagccactgctactaaagcaactccattgggctgcattaagatgaacagagtgctttttaatgatgaaagcagggagctcctttccatttgcaacttagcctgaatgtggggtttctctggctgttcttttgacctagcagtagagtggagcactgccaagtccaaaaaactagagcaggaggtacctcttggagcaacggtgtgtttatttctgtttttttttttttttaagtgaatggccaccaggcacatctgagtatctgttaagtttcatgcaggccttttcgttagtttgaaatgggaacggaagataacttttgatgatgcgatgtctcaaaaacagagaaactttgttccctctttccttatgatcaggtttgagaaattcttcaaaaaattaggtgaagttgagttacatatttctgttggttggttctctttttcattttatgaaaacagaaaagaataagtggtgagcagcctcctgaaagcatctgcagctactccctctgctcctttctcgccgagcgttacctgtgccaggccgtggcgcgttacagcaccaggccatcactgacagaaacgtttacttaacgaatgttcttaaaccagtgtgtacttcaagcgtttccttttgtttctctgtgttgtgtatttcctgtgtatgtggttttgcttaggcaggtataacttagcgaagacttttaagtattgcacctttttttgatttttgacctcttccccccaccttgtaattttgcttttttaatttcggtatttaaatacttttttttttttttaagcatcaatgtagtagtactctgggccgaacaggggtcaacgtttaatctacagttatcaccaacatgtatgtacttatgtcggaatcaaaatgtatcaaactgcttattgtgaagagaattatagcagacctgaagggggcgaaaaaccagatagggtggggggatggatgccggtgacgtgctagcacttgtgtggacatcccagtctgcattatgctgtttaacataaagtgccgacattttgtaccagcaaatacctgcccattccaacccttggtgggagcagacctctactgtcctctgtaacttgctgctattgaggacaagggagtttttctttctttagcgtcttcagtgaaggatacaatacaacaatgcctaatgtatttgactttttagcttgtgtctgtgtgtaggtgggtgggtgggtgtgtataggaaaagcctaaaacaagttatttgcatttcagtggttttgtgagacaaagaatgggaaattctgtagcccttctggcttaccctgttgattataaacctagcctcaaaagagattgacaggcatgactcaagtgagtgttcacatatacaagcctgcatgagccctctgtgggtaggtggtcacacttggcatctgcagcattgacgtggccccgctgggtgccttgagcatgccctcttcctgctctgcaatttgaatcaccaccgtgccccttccaccactgttccccatgcaaaagctctgcttccagcagcccccactgaccgctctctgtgtggagcaaagtgctgtcgtgcggtgaccaccaggtgaagagcagcttgtattcagacatctagagaaggttaaatcttagtgtccctgggccaggagcatatcccaaggctcctgcgagccagtggcgaccctgtccactgccgctcttggttcactgctgtgtcctgccccaccctcctctcctcctgcctgttggttccttgacctgcactatgggttagttgagttccttacgatactacggtgaaagccgggtgctagagcccctcttgtttacaagacataatgagggatttgaaatatgtaaaaataaacatgagaagctaaaatgttcttccatcataagcttaaagggaaaaaaactaaaaactttaaaaaaaaaagaccaaaaagtgcgtatatatatacatataaatatatattttagatgaagactaactctgggagcatttaacagtgttttttgtttctgtttttaacatttgttttcctgctttaaaatttgcaagcattctcaggaattctagggtaggaagccagttttttgaagatggtttatttaaccatatcttatcctagagagatggctgtttctttcctgttaataaacttttacaagttcctgaaacttcagaaagtttaaacaatttttacttaaaaaaatgtaaaaagaaaagtctccaaacattattgtcatactggggatcacacattttaaaacacatagaaatattttttaaaaattatcaatttagcagcaacaggtaaattcattatcttaaaaatatgggagaaggattaagctttgtaagagctcgatcatggattcttttgaaattgtgtgtagtttaatgggagagtgtttggtgtatatagatgagaatgccatcactttgttcctttccatttgagactgaactgaaatctcccctagtaatttttatttttttaaaggaacccttctccttgtccccacaaccccagcaacaaaagaaaggaaggaaggaagaaacaacagcttaaaaaaaaaagtaatctgtaaaatagtacagttggattgctgagaatctatgtaaagagttaggaaatataggttaataatttttggaacaaattttaaatataggcattactagaggaaaattatctatggactgtcctattaatgaagaatgtctgtcttacctccgtttgttttgggaggaggagaaaatatagaagaatctaataaggaacaagtgattttacttttttagctcccagctactgttgtgctcgttttaattgctgttttgaagatctgctgcttaattatccccatcccttagccggagatgtggagtgtttcctttcagtttttggtgatgttgaattcttttgtattccctcctggggccaggggtcagaattcccaagcatgaccacagcttcttttaaacattaagcttcccagtgggaaggaaactccagctcgacaggtaaagggagtgggtggggttgctgcctgcaatttctctaaaaccgctttagtgccttcgtacatacacccagacatcctgagcaagggggacgcacatgtgtgtgtgtgtggtccagtcactccacagatgtaagatactcacccataaaggaaattggagtggttctggacaggccccaaaggcagtgggctgaatttaaaataaataaacaaacgtcaagcaagttaatatgcttatgtctcagtaatgtagaatgccaagttccttcctgtgtcgtgtgccctccattactgtgcattgattcctccaggtgtgtaattgtgacaactgcagtgatttggaaagtctctttgtcttgggcaaatagaaggggttcctgttgttctgctcttgtccttcgtctcctccccttttcccccagacctcccccttctttttgtcaacttgctgggagctttgctttattggttggcagtgacctaagaacaggatatggtgaggatgtcatggaagagaagagctctttccgtggtattctttggcaagagccatgtctactaagaggttagatgacttcagtatacttataaaattcagtgagagtgccttcttctcttctaccacactctggcatagatacaggcttgctggtcacctctcattacatagatttattttaaaaacattttgattatgttaatttgagctttcccttttttttttttaactactttttaaaacacttgattactagtggcttagaggtgtgtacatctcctgaacatcacaaacttggtttctacctaccacacgagtagccaaaagaaaagaagcactaatagagaaaggggtgtctcacaccagacagaggacctctgctgtcaattagatccagtatcatgacctaactttaagtgtggaaaagagttcagatctctgagacactgtgaagaaatggatggctcatgtaacatctctgatccctcagtccccaaccctggacgtgtttcatttacaacattcataggagttaacttagcagtgttgcaagttaaggttccaaaccaaattatttaatcagtgtccccccaataaatcacttatccatttattgctagttagttttatttatagcaacttgatttcctatgagtatggctcctgttgtaagaattttcccacctcttctgacatgaatgtagcataagttagcaatcggttcttccaaactcctgtgggttgaatatggtatagaaggtatgcaagaggaaaaagaaaggaaaagataaaactcctgcctgagaatttggaagcacctttattaacacatatatctcgcagaaactagaagctcataggctgttaactttttgcaactattcactcatttttaccacttttttttttgggtgagggggtgatttttgtaaggttaacagccagattccattttgacctcagatgctgtgtactttttaatttcattttttatattctgccatcttgactcttctctaaaacagaatgaaaatgtctgcatgctgagcaaaatgcttacgccaagcctgtttttctctgcagagtaaacaggatgttttcagcagacttggctctaatagccatctctaagattagggaacaattgagtctttatgtagaaaagatccattttttccccatcctcagagttaaaattcaacatttaaagctttatcggttattgttttagatttgagatttttgtttttaagtatctataagatctttagaagtgagataaatttttcgctggttaaaaaaaatcaaactttcctctgcagtgtttttgccaagttttgtcacacttcatgtgtatgcattaactatacttcttagtgttactgcaaaaaaaaaaaacaaaaacaaaacaaaaaaaagccttgttctttaattgtgtttttcctcctgtgagtggacaactaaagccgcgtgatgatgcggatgaaaatattctggtctgtgtgtatacaatgaattgtcagtcttcagacctcatggtcgttaagaaaatagggaactcacaaaccctgctgcgcactacatttacttctttatctgcaagtacagggagtccatacagtcaagaaacacacagatacacataatgctattgaggacattgtcattctgtaagaaaacagaatattatctagatttccagagttagtgcagaccctgtgataacagtctgtgggtttgtggccagcgccaaaggtgtgtgtattttcagaaatggtccctatttgtcagtgatagtgttttttttttcttaagtttgacaaagggggtggtaatatcacattctttagatttgaaataattatcagctccaagaatctgtgaacatagtaataacaataaaaattcaacatcgaccctccctaacctgctcaccatacctccccaccccatgcctctgaagaaagaggccatgaacctacgaggtggtaaagggggacacaggtcagggagtggagagctactcctccagcagctcagcacccacactgcccgcatgcgtgtggccaccgggaccagatcccgagtgattgtggcatacccctaatatttgagtagtttttaagctgtcagtctcttgtcataacctcctaccgccacccaaaaaagtaacgaaagttgcagtaactgccagtgtttgcctcaccaaatttaaatcgttcccttttcagttagctatatacctgaatttgtttttaacaagaaactgtacatggccaggaaaaatggtactaccttggccaaagggtctttgcaaaaagctcagtcttcagttcttcactgtgacaaatgcttatcttgttcatgggaggggaaagatcagataaataggcaagaagtactctgttttaaataaagaataaatagtgtccgtttaaagcactttgtgcctcaacttcatttttaaactgtaaatcattgctttggaaataaattcccaattataattgacccatatctagccaatatcaacaagttgggatggtttttgtttttttcttttttttcaaaaagggaaattcctctttactgctcacagtaagctgcaaaagaaagttgtcaaggtggcttatgatgctgttgtagcagagctgtgaaaggaagtgctttgctttctctcccgccttccggaatctggcgttccttccccttcggctactgaaaggtgtgtacaactcccagaggggtggctgtaaaagttgactggaggcaaagtggagtggccttattgccaggactagccctacagaagagctttacagagaggaggacagtacatcctatgtgtgttcgccaaaaatgggaaaggtgggtatttaggcaaaacaaaataaaaacctttggaaccctttaagaagttacataccttttaaaggtagtatagtttctcaccaagtgatgcattttagcatgacacttcttgccagaaattttgggataagttggaataaatgtgtttaaaacatcatccaccgccctttttaaattttgtctaaggaattacttaagtatagtatttctgaatgtgcctttgtgagtacagagaccgtccgttctaggaagaagctatccgttggatacaaacaaacagacggtcagctttagtcattagggaagtcaaagttcctcctggaagtcccaggagcagctgttgagatttcattagcatcaatattgcacagtgtagagttgagtggaagagattctgggacttgggagaggagacaggggaaggtacccaggcgacgcagacccacgttagtccaagagcgcaggtttacacatctgcattccctagttttctccgtctgtatgtttgtgctcatgtggctttggctgttttgttttttgtttttctgtaagcactggagaattggaatatggtgatacttgtgacacattcatgcatgtaaacaaggcattttccagcttctgccgtgtgcagagcgggcagcacgcttttaccctttgagtctgtgtcctgaggcggccattacattcccacatgggcgtcacatcacgttgctgttgatgcaaacagggtattacacacaaggaaaaggggttttgaagagttaagattgaagtgtttgagaaagaaaagagaaaaatctgaaatcatattttatttcttcagagctattatagttgaacacagaaatctgcagtgtctttatttgtttttatgttttaaacaatttcacctcttctccccactcctatcttctaaagaaatatcaagcaaatgctaagggccatttccatgattcctcagagctcccccaaagaggagaacagtccctcccactcgattccttcagcttcattcaggaagacacagggaggagagatgctgcttctgcgctttgctctcattcctctctcatggccttgaaatgtattattatgcaaatgtgaattttgatactgaatttaagaagaggttgttggatttttttttttttttttttttttttcaaaaaaaaaagtcccacatgtggtcatcgtcgcttctttatgttgtaaggtgaattgtaactatgcattctgcaaagggggtggggaggagagggcagaaaggggaagggagtagcgttgcatccttgttcttcagtttctgtgtccatggtgtccccgtgtcctggaggggaaggggagtgagagacgaatgtggtaaggtcagcacagtgagatagagacctctgagtcctcttgccactgttgctggcaggtctgatggccaggtaaattccagggggcctgcagttcctgtcaaccaatgtggttcaggattcttgatcctagccgtgcagtgttaatccagtgcagcaatggaactccacaggctccagtgttctctggaaaaagtactcatcctttcctgaattcagagcccttcaagctcaggaaaccacgcttcactcgtgctgacctgaaagttaatctttaggtcgattttgaaaaactccgcctcctctctcctttttaatatttctttcttcctttttaatcatgtttaagtgaacttactcttagttataaggaactgtcctgctttgtggggaagagggctgttgcttgtcaggcaaaaaagttttctcttcctacccaccatccctctctctgcttcccttgcatttggcaggctgtatgaagccaatgagctgcgaggtgttttgacaggggaggtctgcatgcagcctcttctttgtcctaacaattcctttgttgatcttgcctgtgatgaatcatagcgcctgcattgctctggtctaggcattatttgcaacacacagtatcgtaagcgagagattgttctgcctatattcagtgttttccatgcagcaattcttcttgttgacgttcacagtactgtaacgagtaacagacttgatcacagtctcctcgtgcctgtgcagggctgcacaggcatgatcttatcagggttccaatctgttagattgcctttaaacaaaaaaaacaacaaaaaaataaaatcctgacgtttcaactgtctcacacaaaataatacctcgaggtacatttccccctgcaatgtaaacccttaactcctctctcctttctgacatcagtggattatcctttttaaaatatgaacatgtaaatagcaggataactttaaaaaacattttctttgctgtgaaagtaaccctaaaatatgttttcttcttttgtatttttttggtttttgtttttaagccatcagaagtttcagatctttactctttcatgtttaagaagaaagagcagaggaggtcgggggagccggtttgcatttgtgttggaggggtgttatctccattgcctcccacacagtgacagcagaccagtatgtaaaccctgtcttggctgggcgcggtggctcacaccagtaatcccagcactttgggaggctgaggcaggcagatcatctgaggtcaggagtttaagaccagcctggccaacatggtgaaaccccgtctctactaaaaaattagccggacgcagtggcgcgcgcctgtggtcccagctgctcgggaggctaaggcaggagaattgcttgaacccgggagacggaggttgcggtgagccgagattgcaccactgcactccagtgtgggcaacagagcaagacttcgactcaaaaacataaaataaacaaaagacacacacacacacaaaaaccctgtcttaaatagctgccatctcttccagcaatctagtgccagggtaagaagtgtctgaatttctctcttccagcagatccatcccctgcagggactccagaatgttctccacacaatacctggagctctcaacctttcttggttcagacacacacatacacaccccttgagtaactcagtatcattttgtagttcacagaaggatgtagtccctggcattttggtttgcactgtagaatccatagccttgtcactttgttatgctctggaaatgtactgatttcttacttgggaggaaacttgtgtaaggagatgtgcaaaccaccctgaaagccatgtgcatcctcacctcttccattaccccctccatgagctcgaagcgacattaagtagagggaaatgcttttaacaaatgctgctcatgtggatctgtcagctattgcttgcctagatttgggcacccatgaagcagggttggaatggatcattttgaattgcttctttgcagacacccccttcgcccccatctttaagataaaccctttactagtcaagaagcccttttcagttggatctcactgatcttgtatagtgacgacttcctttgaaggaagaagcttgattataagtgcatgcatattatccacccaccttctgatttgggcactgttcaccttggaattttatttattttgtttatctggaggccctttttctatcagtctctgatccctcatgggttctgcctgcccttgtatctcttgtacaatgctcccaaagggctttgctgatctctgcacttctttcctgggacactccccccaccaccaccctttgcacacaccagtgaccaaagtgtatgcagtgatctcacagaagacatcaaaaatggtgcatgcaccgtgaatgtgctcacagagacacgtgcacaagattctgcacccttggccttaatctcagtatgacttaaggtgcaggaacatttttaacaggttttaaaaaaacaaaaaacccttctgggaggaaaaaaataaaaagcagatacaacagctcaactgttcccactcctaactctccactatgtgcttataacttcacattctatgccctccccgccacccacctcatccctgttctgcgtaaccaaaaaacagacaacaaaagcaacctgaggagaggtttctggactattttatctgtctccatttagatggagatataaatgctgctttgggttccataatcctagggggctatgtttacatagtaaaatacatcctaccaaatcaggaaacagtgaataatgggagtcacttcacagagacgcaggaggacctggggggcgtagcagaggaggataggtagagaagtaccattttaattatttgtgacttgtggcttccttcctcctctcctcctccctccacgtctctctttgccccctttagacagaaggtgcagaaaagggcatcaaaaagaggctggattttttaaaaggcagctttccaactttgcacacaaacaggtaacaggaaggtacagcaaaaatcctctcatctgaaacactgtcagcagaaacaaaacctgtaaaaatgactaatcagctgcacatattgatgctctctgcaagttacctttaagtgttttttttttcttatacttgaagttgcttttacgatattattttggtggctttcttttctctctttgatgggcaatagaggaagtagataatgggatttaaggacgcctgggggagaaaagggaggatgtggcattgtctttttttttttttttttttttttttttagcatagaggtttaatcaaactcccatatgttgaaattgctcctcatattactggttttacatggacacagaaactaggcactttagaggtgcacttgcatggcaggctgggcccccttttctatattttattttcctttttagtatagtggtacttaaaatcactggttcacttaaaaaaacaaacaataaaatgttaaactctactaatgtacaaataagctgaaaagttgcattttatgtgtattttttgccatagcaggtactgtatttctcatgctggatttcaaaaaaaaaaaaaaaagtatcaaaaacaaaaaaaactaaagggtggtgttttattggattgtgacaggttgagtaataaggaattaagtcgtcgtcatttcattaaaactgagagatgatgtaatgcatatataagagttttctgaagggttttttttgggcttttaaacagcttatttttgtttttgtttagtttttttattttattttattttggaaagatatgattgtattatgtgcaactcagttgcttacattataactacaaaatatttttgggttcctggaaaaaaaagaaaaaagactaataaatgtgtttggctgctaagc

SEQ ID NO: 4308 - DNA, 3444 bp, Homo sapiens
  source 1..3444: mol_type = genomic DNA
cggcccgcggaggcgcgtccgcccctggctggcggtggcagagggaggcgtcaggcctcggatcctcgggtccctgcgcagcgtcccggcctgtgtgcaggacctgcgtgacaagggttgtggttttttgcactgaatgtaacctagactcatcttcacgggcttgtgttgccccaggtactgtcaaaggcagtatttttgtgtttctgcagagttttgcacaaaatctgttcccatgcaaaccaatgagggagaagtatcggaagaaagcagttccaaggtggaacaggaggattttgtaatggaagggcatggcaagactccacctcctggtgaagaaagcaaacaagagaaggagcaagaaagggaagaacagttaatggaagacaagaaaaggaagaaagaggataaaaagaaaaaagaagccactcagaaggtcacggaacaaaaaaccaaagtgcccgaagtgacgaaaccaagtttaagccaaccaacggccgccagcccaattggcagctctccatcgccaccagtcaatggtggcaacaatgccaaaagggtggcagtgccgaacggacaaccgccaagcgccgcccgctacatgcctcgggaggtgccgccgcgattccgttgccagcaggaccacaaagtgttactaaaacgtgggcagccccctccaccgtcctgcatgctccttgggggtggggcagggcctcctccctgcacagcacctggagcaaacccaaacaacgcacaagtgacaggagcgctgctgcagagtgagagtgggactgcgccagtctggagcaaaagcacaccacctgctccagataatggtacttccgcttggggtgagccaaatgaaagcagtcctgggtggggcgagatggatgatacaggagcatcgaccacaggctgggggaacacgcccgccaacgctcccaatgccatgaagcctaattccaaatctatgcaagacggctggggggagagtgacgggccagtcacaggagctcgccatcccagctgggaagaggaggaggatggaggagtctggaacaccactggctctcagggcagtgcttcctcccacaactcagcaagctggggacaaggaggaaagaaacaaatgaagtgctcactcaaaggaggaaacaatgattcatggatgaatcctcttgccaaacagttttcaaatatgggattgctgagtcagactgaagataatccaagcagcaaaatggatttgtctgtaggaagcctttcagataaaaaatttgatgtggacaagcgagcgatgaatctcggggattttaatgatatcatgaggaaggatcgatctgggttccgtccacctaattccaaagacatgggaaccacagatagtgggccttattttgagaagggcggtagtcatggtttgtttggaaacagcacagcacaatcgagaggtctgcacacacccgtgcagccactaaattcttctcccagtctccgggcgcaagtgcctccccagtttatttccccccaggtttctgcctcaatgctcaagcagtttcccaacagtggcctgagtccaggtcttttcaatgtggggccccagttatctcctcaacaaattgccatgctgagccagcttccacaaattccccagtttcagttggcatgtcagcttctcttgcagcagcagcaacagcagcagttgttacagaaccagagaaagatttctcaagctgtacgccaacagcaagagcagcagctggctcgaatggtgagtgcactgcagcagcagcagcagcagcagcagaggcagccaggcatgaagcactcgccctctcatcctgttgggcccaagccgcatctggacaacatggtacccaacgcattgaatgtggggctcccagaccttcaaaccaaagggccaatacctggatatggttctggcttcagctctggcggcatggactatggcatggttggtgggaaggaggctggaaccgagtctcgctttaaacagtggacctccatgatggaggggctgccctctgtagccacacaggaagccaatatgcacaaaaatggcgctatagtggcccctggtaaaacccggggagggtcaccgtacaaccagtttgatatcatccctggtgacacactgggtggccatacgggtcctgctggtgatagctggttacctgccaaatctccaccaacaaataaaatcggaagtaaatccagcaatgccagttggcctccagaattccaaccaggagtgccatggaaaggtatccaaaacattgaccctgaatctgacccctatgtcaccccaggaagtgtgctggggggtacagccacatctcccattgtagatactgaccaccaactgctgcgggataacaccacagggtctaattcttccctcaacacctcgctgccttcacctggtgcctggccctacagtgcctctgacaactcctttaccaacgttcatagcacttcagcaaagttccctgattacaaatcaacatggtccccagatcccataggacacaaccccactcatctctccaacaagatgtggaaaaaccatatttcctccaggaacactacaccgctgccccgcccacctcctggtctgaccaaccccaaaccatcatctccctggagcagcacagcaccccgatcagtcagggggtgggggacacaggactcacggctcgcctcggcctctacctggagtgatggtggctcagttcgtcctagttactggctggttcttcacaatctcaccccacagattgatgggtcaaccttgagaacgatctgcatgcagcatggcccactgctgacattccatctgaatctaacccagggcactgccctgatccgatacagcaccaaacaggaggcggccaaggcccaaactgcactgcacatgtgtgtgttgggaaacactaccatccttgctgagtttgccactgatgatgaagtcagccgctttctggcacaagctcagccccctacacctgcagcaaccccaagtgcgccagctgcggggtggcagtcgctggagaccggccagaaccagtcagatcccgtgggacctgctctgaatctttttggtgggtccactgggctcgggcagtggagcagcagcgctggtggcagcagcggggccgatcttgctggcgcttcattgtgggggcccccaaactattcttctagcttatggggagtcccaacggtggaagatccccataggatgggcagccctgctcctttactacctggtgaccttctgggaggagggtcggattcaatctgaacttagaactttcaactctgacctcgtgaccttttttggaacagcagcagcactaacttgaccttttcgttttttttttcaacttgcaataaatacatttttaaaaggaaaaaagaaaa

SEQ ID NO: 4309 - DNA, 415 bp, Homo sapiens
  source 1..415: mol_type = genomic DNA
ttgtttattttgtttttagtttttggggtccccgtgctgctgcaaggcgaaacgggagggagtgacccctgcgcccctcagtcccccctacgacgtcgcctccatagtctgcggagaagcggagactgcgcgcctcgcctcacagcgaaacgccgcgcactcggagccggcacggctcggcgggttgtggttttttgcactgaatgtaacctagactcatcttcacgggcttgtgttgccccaggtactgtcaaaggcagtatttttgtgtttctgcagagttttgcacaaaatctgttcccatgcaaaccaatgagggagaagtatcggaagaaagcagttccaaggtggaacaggaggattttgtaatggaagggcatggcaagactccacctcctggtgaagaaagcaaaca

SEQ ID NO: 4310 - DNA, 18279 bp, Homo sapiens
  source 1..18279: mol_type = genomic DNA
agagacagagagggagagagagagcaagagggagagtgtgtgagagagagttagttcaagccaaaatggccgacagagtctctgctggtttctgaatatttaaaatacaaaaaaacagatagacaaaaagaattcattttttggaccttttttcatttccatttctaccttgtatgcctcaatttgctggatttaagcactgctgcactttatgagagagaaggagcaagaaagggaagaacagttaatggaagacaagaaaaggaagaaagaggataaaaagaaaaaagaagccactcagaaggtcacggaacaaaaaaccaaagtgcccgaagtgacgaaaccaagtttaagccaaccaacggccgccagcccaattggcagctctccatcgccaccagtcaatggtggcaacaatgccaaaagggtggcagtgccgaacggacaaccgccaagcgccgcccgctacatgcctcgggaggtgccgccgcgattccgttgccagcaggaccacaaagtgttactaaaacgtgggcagccccctccaccgtcctgcatgctccttgggggtggggcagggcctcctccctgcacagcacctggagcaaacccaaacaacgcacaagtgacaggagcgctgctgcagagtgagagtgggactgcgccagactcaacccttggaggtgctgctgcttcaaattatgcaaattccacttggggctcgggagcctcctccaacaacggcacctcccccaacccaattcacatctgggacaaggtgattgtagacgggtctgacatggaagagtggccttgtattgccagcaaagacactgaatcttcttccgaaaacaccaccgataacaacagtgcctcgaaccctggctctgagaagagcactctgccaggaagcaccactagtaacaaaggaaaagggagccagtgccagtctgcaagttctgggaacgaatgtaatcttggggtctggaaatctgaccctaaggctaaatctgttcaatcttccaactctactacagagaacaacaatggactaggaaattggaggaatgtgagtggtcaggatagaattggacctggctctggcttcagcaactttaacccaaatagcaacccatctgcctggccagcactggtccaagaaggaacttctaggaaaggggcattggaaacagataatagtaattccagtgcacaggttagcacagtaggtcagacatccagggaacagcagtcaaagatggaaaatgcgggtgttaattttgttgtctctggcagagaacaggctcaaattcataacactgatggaccaaaaaatggaaacactaactccttgaacttaagttcaccaaaccccatggagaataagggaatgccctttggaatgggcttggggaacacctccaggagcactgatgccccttcacaaagcactggagatcgaaagactgggagtgttggatcttggggtgcagctagggggccttctggaactgacacagtctctggacaaagcaattctggaaacaatgggaacaatggaaaagagagagaggactcctggaaaggagcttctgttcagaaatcaactgggtcaaaaaatgactcttgggacaacaataacaggtctacgggtgggtcctggaactttggcccccaggactctaatgacaacaaatggggtgaagggaacaaaatgacatctggggtctctcagggagaatggaaacagccgactgggtctgatgagttgaaaattggagaatggagtggtccaaaccaaccaaattctagcactggagcatgggacaatcaaaagggccaccccctccctgaaaaccaaggcaatgcccaggctccctgttggggaagatcttccagctccacaggaagtgaagttggaggtcaaagcactggaagcaaccacaaagcaggaagtagtgacagtcataactctggccgtcggtcgtacaggcccacacatcctgattgtcaggctgtcttgcagactcttttgagccgaactgatttggaccccagggtgctctcaaacactggctggggccaaactcaaattaagcaggacacagtgtgggacattgaagaggtgccaaggcctgaggggaaatctgacaaaggaactgaggggtgggagagcgctgccacacagaccaagaactcagggggctggggagatgcacccagccaaagcaatcaaatgaagtctggatggggggagctctcagcctctacagagtggaaagaccccaagaacacaggaggctggaatgactacaagaacaacaactcttccaactggggaggaggacgacctgatgaaaagacaccttcctcttggaatgagaatcccagcaaggatcaggggtggggaggtggacgccagcccaatcaaggatggtcttctggaaagaatggttggggggaggaagtcgatcagacaaaaaacagcaattgggaaagttctgcaagtaaacctgtgtctgggtggggtgaaggagggcagaatgaaatcgggacttggggtaatggtggcaatgcaagcctagcttcaaaaggtgggtgggaggattgcaaaagatccccagcatggaatgagacgggccgacagcccaattcctggaataaacaacaccaacagcagcagcccccacagcagccgccgccaccacaaccagaggcttctggttcgtggggaggcccacccccaccacctccaggcaacgttcgaccttccaattccagctggagcagcgggccacagcctgcaacacctaaggatgaggaacccagtggttgggaagagccatccccacagtcaattagtcggaaaatggacattgatgatggcacttcagcatggggagaccctaacagttataactacaagaatgtgaatctgtgggataagaattcccaagggggcccagcacctcgagaaccaaacctgcccaccccaatgaccagtaaatcggcatcagtctggagcaaaagcacaccacctgctccagataatggtacttccgcttggggtgagccaaatgaaagcagtcctgggtggggcgagatggatgatacaggagcatcgaccacaggctgggggaacacgcccgccaacgctcccaatgccatgaagcctaattccaaatctatgcaagacggctggggggagagtgacgggccagtcacaggagctcgccatcccagctgggaagaggaggaggatggaggagtctggaacaccactggctctcagggcagtgcttcctcccacaactcagcaagctggggacaaggaggaaagaaacaaatgaagtgctcactcaaaggaggaaacaatgattcatggatgaatcctcttgccaaacagttttcaaatatgggattgctgagtcagactgaagataatccaagcagcaaaatggatttgtctgtaggaagcctttcagataaaaaatttgatgtggacaagcgagcgatgaatctcggggattttaatgatatcatgaggaaggatcgatctgggttccgtccacctaattccaaagacatgggaaccacagatagtgggccttattttgagaagctgactttgcctttctccaatcaagatgggtgccttggggatgaggctccctgctctcccttctccccttctcccagctacaagctgtctccctctggttccacactacccaacgtcagccttggagcaatcggcacagggctcaacccccaaaacttcgctgctagacaaggcggtagtcatggtttgtttggaaacagcacagcacaatcgagaggtctgcacacacccgtgcagccactaaattcttctcccagtctccgggcgcaagtgcctccccagtttatttccccccaggtttctgcctcaatgctcaagcagtttcccaacagtggcctgagtccaggtcttttcaatgtggggccccagttatctcctcaacaaattgccatgctgagccagcttccacaaattccccagtttcagttggcatgtcagcttctcttgcagcagcagcaacagcagcagttgttacagaaccagagaaagatttctcaagctgtacgccaacagcaagagcagcagctggctcgaatggtgagtgcactgcagcagcagcagcagcagcagcagaggcagccaggcatgaagcactcgccctctcatcctgttgggcccaagccgcatctggacaacatggtacccaacgcattgaatgtggggctcccagaccttcaaaccaaagggccaatacctggatatggttctggcttcagctctggcggcatggactatggcatggttggtgggaaggaggctggaaccgagtctcgctttaaacagtggacctccatgatggaggggctgccctctgtagccacacaggaagccaatatgcacaaaaatggcgctatagtggcccctggtaaaacccggggagggtcaccgtacaaccagtttgatatcatccctggtgacacactgggtggccatacgggtcctgctggtgatagctggttacctgccaaatctccaccaacaaataaaatcggaagtaaatccagcaatgccagttggcctccagaattccaaccaggagtgccatggaaaggtatccaaaacattgaccctgaatctgacccctatgtcaccccaggaagtgtgctggggggtacagccacatctcccattgtagatactgaccaccaactgctgcgggataacaccacagggtctaattcttccctcaacacctcgctgccttcacctggtgcctggccctacagtgcctctgacaactcctttaccaacgttcatagcacttcagcaaagttccctgattacaaatcaacatggtccccagatcccataggacacaaccccactcatctctccaacaagatgtggaaaaaccatatttcctccaggaacactacaccgctgccccgcccacctcctggtctgaccaaccccaaaccatcatctccctggagcagcacagcaccccgatcagtcagggggtgggggacacaggactcacggctcgcctcggcctctacctggagtgatggtggctcagttcgtcctagttactggctggttcttcacaatctcaccccacagattgatgggtcaaccttgagaacgatctgcatgcagcatggcccactgctgacattccatctgaatctaacccagggcactgccctgatccgatacagcaccaaacaggaggcggccaaggcccaaactgcactgcacatgtgtgtgttgggaaacactaccatccttgctgagtttgccactgatgatgaagtcagccgctttctggcacaagctcagccccctacacctgcagcaaccccaagtgcgccagctgcggggtggcagtcgctggagaccggccagaaccagtcagatcccgtgggacctgctctgaatctttttggtgggtccactgggctcgggcagtggagcagcagcgctggtggcagcagcggggccgatcttgctggcgcttcattgtgggggcccccaaactattcttctagcttatggggagtcccaacggtggaagatccccataggatgggcagccctgctcctttactacctggtgaccttctgggaggagggtcggattcaatctgaacttagaactttcaactctgacctcgtgaccttttttggaacagcagcagcactaacttgaccttttcgttttttttttcaacttgcaataaatacatttttaaaaggaaaaaagaaaacggagagaaaaaaaggtgggtcattgacagactgtctgagcacatagttgcctcccttataacttcagttttttcgtttggaatatgaatccaaaaagagaacatatcactcttgaaatacttgaatcatgaacgccaacctagaaagacaatgtgaagcaagtacacataccatttaaatttaaacacaaaaaaattaaaaaaattagtttctagtttttcacttttttcatgttatatggaagttgttgctaagaaacatatatactgaaaaaaaatagctttttaactttgtttgcactgggtgtgtttccgtccttaggtctaccatgtttgggagggagggaaattcaaaagaattgttgggggaggggggagggaagacttgacggagcctcactttaaaaacaaaaacacaaaaaacctaaaaaaaaaaaaaaggaaaaaatttgtgattggctggttgataaataccagtgtgttctggcacatgtaactgcccaggcatgctcgttctggtgtgtgtgtgcacgtgtgttcatgtgcattcgcgtgcatccttctctgtctctgtgtgtgtgcctgtgttcttcccttctcccctgccccaccctgacttctcagaaagctgcatcgctgacagtctgcaggctggctggccggcccatctgctttttattttatttttttaactatgagaacacacaggcccggagagccactgctactaaagcaactccattgggctgcattaagatgaacagagtgctttttaatgatgaaagcagggagctcctttccatttgcaacttagcctgaatgtggggtttctctggctgttcttttgacctagcagtagagtggagcactgccaagtccaaaaaactagagcaggaggtacctcttggagcaacggtgtgtttatttctgtttttttttttttttaagtgaatggccaccaggcacatctgagtatctgttaagtttcatgcaggccttttcgttagtttgaaatgggaacggaagataacttttgatgatgcgatgtctcaaaaacagagaaactttgttccctctttccttatgatcaggtttgagaaattcttcaaaaaattaggtgaagttgagttacatatttctgttggttggttctctttttcattttatgaaaacagaaaagaataagtggtgagcagcctcctgaaagcatctgcagctactccctctgctcctttctcgccgagcgttacctgtgccaggccgtggcgcgttacagcaccaggccatcactgacagaaacgtttacttaacgaatgttcttaaaccagtgtgtacttcaagcgtttccttttgtttctctgtgttgtgtatttcctgtgtatgtggttttgcttaggcaggtataacttagcgaagacttttaagtattgcacctttttttgatttttgacctcttccccccaccttgtaattttgcttttttaatttcggtatttaaatacttttttttttttttaagcatcaatgtagtagtactctgggccgaacaggggtcaacgtttaatctacagttatcaccaacatgtatgtacttatgtcggaatcaaaatgtatcaaactgcttattgtgaagagaattatagcagacctgaagggggcgaaaaaccagatagggtggggggatggatgccggtgacgtgctagcacttgtgtggacatcccagtctgcattatgctgtttaacataaagtgccgacattttgtaccagcaaatacctgcccattccaacccttggtgggagcagacctctactgtcctctgtaacttgctgctattgaggacaagggagtttttctttctttagcgtcttcagtgaaggatacaatacaacaatgcctaatgtatttgactttttagcttgtgtctgtgtgtaggtgggtgggtgggtgtgtataggaaaagcctaaaacaagttatttgcatttcagtggttttgtgagacaaagaatgggaaattctgtagcccttctggcttaccctgttgattataaacctagcctcaaaagagattgacaggcatgactcaagtgagtgttcacatatacaagcctgcatgagccctctgtgggtaggtggtcacacttggcatctgcagcattgacgtggccccgctgggtgccttgagcatgccctcttcctgctctgcaatttgaatcaccaccgtgccccttccaccactgttccccatgcaaaagctctgcttccagcagcccccactgaccgctctctgtgtggagcaaagtgctgtcgtgcggtgaccaccaggtgaagagcagcttgtattcagacatctagagaaggttaaatcttagtgtccctgggccaggagcatatcccaaggctcctgcgagccagtggcgaccctgtccactgccgctcttggttcactgctgtgtcctgccccaccctcctctcctcctgcctgttggttccttgacctgcactatgggttagttgagttccttacgatactacggtgaaagccgggtgctagagcccctcttgtttacaagacataatgagggatttgaaatatgtaaaaataaacatgagaagctaaaatgttcttccatcataagcttaaagggaaaaaaactaaaaactttaaaaaaaaaagaccaaaaagtgcgtatatatatacatataaatatatattttagatgaagactaactctgggagcatttaacagtgttttttgtttctgtttttaacatttgttttcctgctttaaaatttgcaagcattctcaggaattctagggtaggaagccagttttttgaagatggtttatttaaccatatcttatcctagagagatggctgtttctttcctgttaataaacttttacaagttcctgaaacttcagaaagtttaaacaatttttacttaaaaaaatgtaaaaagaaaagtctccaaacattattgtcatactggggatcacacattttaaaacacatagaaatattttttaaaaattatcaatttagcagcaacaggtaaattcattatcttaaaaatatgggagaaggattaagctttgtaagagctcgatcatggattcttttgaaattgtgtgtagtttaatgggagagtgtttggtgtatatagatgagaatgccatcactttgttcctttccatttgagactgaactgaaatctcccctagtaatttttatttttttaaaggaacccttctccttgtccccacaaccccagcaacaaaagaaaggaaggaaggaagaaacaacagcttaaaaaaaaaagtaatctgtaaaatagtacagttggattgctgagaatctatgtaaagagttaggaaatataggttaataatttttggaacaaattttaaatataggcattactagaggaaaattatctatggactgtcctattaatgaagaatgtctgtcttacctccgtttgttttgggaggaggagaaaatatagaagaatctaataaggaacaagtgattttacttttttagctcccagctactgttgtgctcgttttaattgctgttttgaagatctgctgcttaattatccccatcccttagccggagatgtggagtgtttcctttcagtttttggtgatgttgaattcttttgtattccctcctggggccaggggtcagaattcccaagcatgaccacagcttcttttaaacattaagcttcccagtgggaaggaaactccagctcgacaggtaaagggagtgggtggggttgctgcctgcaatttctctaaaaccgctttagtgccttcgtacatacacccagacatcctgagcaagggggacgcacatgtgtgtgtgtgtggtccagtcactccacagatgtaagatactcacccataaaggaaattggagtggttctggacaggccccaaaggcagtgggctgaatttaaaataaataaacaaacgtcaagcaagttaatatgcttatgtctcagtaatgtagaatgccaagttccttcctgtgtcgtgtgccctccattactgtgcattgattcctccaggtgtgtaattgtgacaactgcagtgatttggaaagtctctttgtcttgggcaaatagaaggggttcctgttgttctgctcttgtccttcgtctcctccccttttcccccagacctcccccttctttttgtcaacttgctgggagctttgctttattggttggcagtgacctaagaacaggatatggtgaggatgtcatggaagagaagagctctttccgtggtattctttggcaagagccatgtctactaagaggttagatgacttcagtatacttataaaattcagtgagagtgccttcttctcttctaccacactctggcatagatacaggcttgctggtcacctctcattacatagatttattttaaaaacattttgattatgttaatttgagctttcccttttttttttttaactactttttaaaacacttgattactagtggcttagaggtgtgtacatctcctgaacatcacaaacttggtttctacctaccacacgagtagccaaaagaaaagaagcactaatagagaaaggggtgtctcacaccagacagaggacctctgctgtcaattagatccagtatcatgacctaactttaagtgtggaaaagagttcagatctctgagacactgtgaagaaatggatggctcatgtaacatctctgatccctcagtccccaaccctggacgtgtttcatttacaacattcataggagttaacttagcagtgttgcaagttaaggttccaaaccaaattatttaatcagtgtccccccaataaatcacttatccatttattgctagttagttttatttatagcaacttgatttcctatgagtatggctcctgttgtaagaattttcccacctcttctgacatgaatgtagcataagttagcaatcggttcttccaaactcctgtgggttgaatatggtatagaaggtatgcaagaggaaaaagaaaggaaaagataaaactcctgcctgagaatttggaagcacctttattaacacatatatctcgcagaaactagaagctcataggctgttaactttttgcaactattcactcatttttaccacttttttttttgggtgagggggtgatttttgtaaggttaacagccagattccattttgacctcagatgctgtgtactttttaatttcattttttatattctgccatcttgactcttctctaaaacagaatgaaaatgtctgcatgctgagcaaaatgcttacgccaagcctgtttttctctgcagagtaaacaggatgttttcagcagacttggctctaatagccatctctaagattagggaacaattgagtctttatgtagaaaagatccattttttccccatcctcagagttaaaattcaacatttaaagctttatcggttattgttttagatttgagatttttgtttttaagtatctataagatctttagaagtgagataaatttttcgctggttaaaaaaaatcaaactttcctctgcagtgtttttgccaagttttgtcacacttcatgtgtatgcattaactatacttcttagtgttactgcaaaaaaaaaaaacaaaaacaaaacaaaaaaaagccttgttctttaattgtgtttttcctcctgtgagtggacaactaaagccgcgtgatgatgcggatgaaaatattctggtctgtgtgtatacaatgaattgtcagtcttcagacctcatggtcgttaagaaaatagggaactcacaaaccctgctgcgcactacatttacttctttatctgcaagtacagggagtccatacagtcaagaaacacacagatacacataatgctattgaggacattgtcattctgtaagaaaacagaatattatctagatttccagagttagtgcagaccctgtgataacagtctgtgggtttgtggccagcgccaaaggtgtgtgtattttcagaaatggtccctatttgtcagtgatagtgttttttttttcttaagtttgacaaagggggtggtaatatcacattctttagatttgaaataattatcagctccaagaatctgtgaacatagtaataacaataaaaattcaacatcgaccctccctaacctgctcaccatacctccccaccccatgcctctgaagaaagaggccatgaacctacgaggtggtaaagggggacacaggtcagggagtggagagctactcctccagcagctcagcacccacactgcccgcatgcgtgtggccaccgggaccagatcccgagtgattgtggcatacccctaatatttgagtagtttttaagctgtcagtctcttgtcataacctcctaccgccacccaaaaaagtaacgaaagttgcagtaactgccagtgtttgcctcaccaaatttaaatcgttcccttttcagttagctatatacctgaatttgtttttaacaagaaactgtacatggccaggaaaaatggtactaccttggccaaagggtctttgcaaaaagctcagtcttcagttcttcactgtgacaaatgcttatcttgttcatgggaggggaaagatcagataaataggcaagaagtactctgttttaaataaagaataaatagtgtccgtttaaagcactttgtgcctcaacttcatttttaaactgtaaatcattgctttggaaataaattcccaattataattgacccatatctagccaatatcaacaagttgggatggtttttgtttttttcttttttttcaaaaagggaaattcctctttactgctcacagtaagctgcaaaagaaagttgtcaaggtggcttatgatgctgttgtagcagagctgtgaaaggaagtgctttgctttctctcccgccttccggaatctggcgttccttccccttcggctactgaaaggtgtgtacaactcccagaggggtggctgtaaaagttgactggaggcaaagtggagtggccttattgccaggactagccctacagaagagctttacagagaggaggacagtacatcctatgtgtgttcgccaaaaatgggaaaggtgggtatttaggcaaaacaaaataaaaacctttggaaccctttaagaagttacataccttttaaaggtagtatagtttctcaccaagtgatgcattttagcatgacacttcttgccagaaattttgggataagttggaataaatgtgtttaaaacatcatccaccgccctttttaaattttgtctaaggaattacttaagtatagtatttctgaatgtgcctttgtgagtacagagaccgtccgttctaggaagaagctatccgttggatacaaacaaacagacggtcagctttagtcattagggaagtcaaagttcctcctggaagtcccaggagcagctgttgagatttcattagcatcaatattgcacagtgtagagttgagtggaagagattctgggacttgggagaggagacaggggaaggtacccaggcgacgcagacccacgttagtccaagagcgcaggtttacacatctgcattccctagttttctccgtctgtatgtttgtgctcatgtggctttggctgttttgttttttgtttttctgtaagcactggagaattggaatatggtgatacttgtgacacattcatgcatgtaaacaaggcattttccagcttctgccgtgtgcagagcgggcagcacgcttttaccctttgagtctgtgtcctgaggcggccattacattcccacatgggcgtcacatcacgttgctgttgatgcaaacagggtattacacacaaggaaaaggggttttgaagagttaagattgaagtgtttgagaaagaaaagagaaaaatctgaaatcatattttatttcttcagagctattatagttgaacacagaaatctgcagtgtctttatttgtttttatgttttaaacaatttcacctcttctccccactcctatcttctaaagaaatatcaagcaaatgctaagggccatttccatgattcctcagagctcccccaaagaggagaacagtccctcccactcgattccttcagcttcattcaggaagacacagggaggagagatgctgcttctgcgctttgctctcattcctctctcatggccttgaaatgtattattatgcaaatgtgaattttgatactgaatttaagaagaggttgttggatttttttttttttttttttttttttcaaaaaaaaaagtcccacatgtggtcatcgtcgcttctttatgttgtaaggtgaattgtaactatgcattctgcaaagggggtggggaggagagggcagaaaggggaagggagtagcgttgcatccttgttcttcagtttctgtgtccatggtgtccccgtgtcctggaggggaaggggagtgagagacgaatgtggtaaggtcagcacagtgagatagagacctctgagtcctcttgccactgttgctggcaggtctgatggccaggtaaattccagggggcctgcagttcctgtcaaccaatgtggttcaggattcttgatcctagccgtgcagtgttaatccagtgcagcaatggaactccacaggctccagtgttctctggaaaaagtactcatcctttcctgaattcagagcccttcaagctcaggaaaccacgcttcactcgtgctgacctgaaagttaatctttaggtcgattttgaaaaactccgcctcctctctcctttttaatatttctttcttcctttttaatcatgtttaagtgaacttactcttagttataaggaactgtcctgctttgtggggaagagggctgttgcttgtcaggcaaaaaagttttctcttcctacccaccatccctctctctgcttcccttgcatttggcaggctgtatgaagccaatgagctgcgaggtgttttgacaggggaggtctgcatgcagcctcttctttgtcctaacaattcctttgttgatcttgcctgtgatgaatcatagcgcctgcattgctctggtctaggcattatttgcaacacacagtatcgtaagcgagagattgttctgcctatattcagtgttttccatgcagcaattcttcttgttgacgttcacagtactgtaacgagtaacagacttgatcacagtctcctcgtgcctgtgcagggctgcacaggcatgatcttatcagggttccaatctgttagattgcctttaaacaaaaaaaacaacaaaaaaataaaatcctgacgtttcaactgtctcacacaaaataatacctcgaggtacatttccccctgcaatgtaaacccttaactcctctctcctttctgacatcagtggattatcctttttaaaatatgaacatgtaaatagcaggataactttaaaaaacattttctttgctgtgaaagtaaccctaaaatatgttttcttcttttgtatttttttggtttttgtttttaagccatcagaagtttcagatctttactctttcatgtttaagaagaaagagcagaggaggtcgggggagccggtttgcatttgtgttggaggggtgttatctccattgcctcccacacagtgacagcagaccagtatgtaaaccctgtcttggctgggcgcggtggctcacaccagtaatcccagcactttgggaggctgaggcaggcagatcatctgaggtcaggagtttaagaccagcctggccaacatggtgaaaccccgtctctactaaaaaattagccggacgcagtggcgcgcgcctgtggtcccagctgctcgggaggctaaggcaggagaattgcttgaacccgggagacggaggttgcggtgagccgagattgcaccactgcactccagtgtgggcaacagagcaagacttcgactcaaaaacataaaataaacaaaagacacacacacacacaaaaaccctgtcttaaatagctgccatctcttccagcaatctagtgccagggtaagaagtgtctgaatttctctcttccagcagatccatcccctgcagggactccagaatgttctccacacaatacctggagctctcaacctttcttggttcagacacacacatacacaccccttgagtaactcagtatcattttgtagttcacagaaggatgtagtccctggcattttggtttgcactgtagaatccatagccttgtcactttgttatgctctggaaatgtactgatttcttacttgggaggaaacttgtgtaaggagatgtgcaaaccaccctgaaagccatgtgcatcctcacctcttccattaccccctccatgagctcgaagcgacattaagtagagggaaatgcttttaacaaatgctgctcatgtggatctgtcagctattgcttgcctagatttgggcacccatgaagcagggttggaatggatcattttgaattgcttctttgcagacacccccttcgcccccatctttaagataaaccctttactagtcaagaagcccttttcagttggatctcactgatcttgtatagtgacgacttcctttgaaggaagaagcttgattataagtgcatgcatattatccacccaccttctgatttgggcactgttcaccttggaattttatttattttgtttatctggaggccctttttctatcagtctctgatccctcatgggttctgcctgcccttgtatctcttgtacaatgctcccaaagggctttgctgatctctgcacttctttcctgggacactccccccaccaccaccctttgcacacaccagtgaccaaagtgtatgcagtgatctcacagaagacatcaaaaatggtgcatgcaccgtgaatgtgctcacagagacacgtgcacaagattctgcacccttggccttaatctcagtatgacttaaggtgcaggaacatttttaacaggttttaaaaaaacaaaaaacccttctgggaggaaaaaaataaaaagcagatacaacagctcaactgttcccactcctaactctccactatgtgcttataacttcacattctatgccctccccgccacccacctcatccctgttctgcgtaaccaaaaaacagacaacaaaagcaacctgaggagaggtttctggactattttatctgtctccatttagatggagatataaatgctgctttgggttccataatcctagggggctatgtttacatagtaaaatacatcctaccaaatcaggaaacagtgaataatgggagtcacttcacagagacgcaggaggacctggggggcgtagcagaggaggataggtagagaagtaccattttaattatttgtgacttgtggcttccttcctcctctcctcctccctccacgtctctctttgccccctttagacagaaggtgcagaaaagggcatcaaaaagaggctggattttttaaaaggcagctttccaactttgcacacaaacaggtaacaggaaggtacagcaaaaatcctctcatctgaaacactgtcagcagaaacaaaacctgtaaaaatgactaatcagctgcacatattgatgctctctgcaagttacctttaagtgttttttttttcttatacttgaagttgcttttacgatattattttggtggctttcttttctctctttgatgggcaatagaggaagtagataatgggatttaaggacgcctgggggagaaaagggaggatgtggcattgtctttttttttttttttttttttttttttagcatagaggtttaatcaaactcccatatgttgaaattgctcctcatattactggttttacatggacacagaaactaggcactttagaggtgcacttgcatggcaggctgggcccccttttctatattttattttcctttttagtatagtggtacttaaaatcactggttcacttaaaaaaacaaacaataaaatgttaaactctactaatgtacaaataagctgaaaagttgcattttatgtgtattttttgccatagcaggtactgtatttctcatgctggatttcaaaaaaaaaaaaaaaagtatcaaaaacaaaaaaaactaaagggtggtgttttattggattgtgacaggttgagtaataaggaattaagtcgtcgtcatttcattaaaactgagagatgatgtaatgcatatataagagttttctgaagggttttttttgggcttttaaacagcttatttttgtttttgtttagtttttttattttattttattttggaaagatatgattgtattatgtgcaactcagttgcttacattataactacaaaatatttttgggttcctggaaaaaaaagaaaaaagactaataaatgtgtttggctgctaagc

SEQ ID NO: 4311 - DNA, 8410 bp, Homo sapiens
  source 1..8410: mol_type = genomic DNA
gacagataccctccttccggccgcgccactcgggaggcggatcccgtgggcctgaggaggcttcccccgcccggtttgctttccctccctcgctggcgctgccgcgagtccaccgagcggcctctgaggagcagccgcaggaggaggaggaggtcgtcgggggcggcgggcggagaccgcgctctcgcttccccggcggcggcaagggcaggacaatggaggtggcggtggagaaggcggtggcggcggcggcagcggcctcggctgcggcctccggggggccctcggcggcgccgagcggggagaacgaggccgagagtcggcagggcccggactcggagcgcggcggcgaggcggcccggctcaacctgttggacacttgcgccgtgtgccaccagaacatccagagccgggcgcccaagctgctgccctgcctgcactctttctgccagcgctgcctgcccgcgccccagcgctacctcatgctgcccgcgcccatgctgggctcggccgagaccccgccacccgtccctgcccccggctcgccggtcagcggctcgtcgccgttcgccacccaagttggagtcattcgttgcccagtttgcagccaagaatgtgcagagagacacatcatagataacttttttgtgaaggacactactgaggttcccagcagtacagtagaaaagtcaaatcaggtatgtacaagctgtgaggacaacgcagaagccaatgggttttgtgtagagtgtgttgaatggctctgcaagacgtgtatcagagctcatcagagggtaaagttcacaaaagaccacactgtcagacagaaagaggaagtatctccagaggcagttggtgtcaccagccagcgaccagtgttttgtccttttcataaaaaggagcagctgaagctgtactgtgagacatgtgacaaactgacatgtcgagactgtcagttgttagaacataaagagcatagataccaatttatagaagaagcttttcagaatcagaaagtgatcatagatacactaatcaccaaactgatggaaaaaacaaaatacataaaattcacaggaaatcagatccaaaacagaattattgaagtaaatcaaaatcaaaagcaggtggaacaggatattaaagttgctatatttacactgatggtagaaataaataaaaaaggaaaagctctactgcatcagttagagagccttgcaaaggaccatcgcatgaaacttatgcaacaacaacaggaagtggctggactctctaaacaattggagcatgtcatgcatttttctaaatgggcagtttccagtggcagcagtacagcattactttatagcaaacgactgattacataccggttacggcacctccttcgtgcaaggtgtgatgcatccccagtgaccaacaacaccatccaatttcactgtgatcctagtttctgggctcaaaatatcatcaacttaggttctttagtaatcgaggataaagagagccagccacaaatgcctaagcagaatcctgtcgtggaacagaattcacagccaccaagtggtttatcatcaaaccagttatccaagttcccaacacagatcagcctagctcaattacggctccagcatatgcagcaacaggtaatggctcagaggcaacaggtgcaacggaggccagcacctgtgggtttaccaaaccctagaatgcaggggcccatccagcaaccttccatctctcatcagcaaccgcctccacgtttgataaactttcagaatcacagccccaaacccaatggaccagttcttcctcctcatcctcaacaactgagatatccaccaaaccagaacataccacgacaagcaataaagccaaaccccctacagatggctttcttggctcaacaagccataaaacagtggcagatcagcagtggacagggaaccccatcaactaccaacagcacatcctctactccttccagccccacgattactagtgcagcaggatatgatggaaaggcttttggttcacctatgatcgatttgagctcaccagtgggagggtcttataatcttccctctcttccggatattgactgttcaagtactattatgctggacaatattgtgaggaaagatactaatatagatcatggccagccaagaccaccctcaaacagaacggtccagtcaccaaattcatcagtgccatctccaggccttgcaggacctgttactatgactagtgtacaccccccaatacgttcacctagtgcctccagcgttggaagccgaggaagctctggctcttccagcaaaccagcaggagctgactctacacacaaagtcccagtggtcatgctggagccaattcgaataaaacaagaaaacagtggaccaccggaaaattatgatttccctgttgttatagtgaagcaagaatcagatgaagaatctaggcctcaaaatgccaattatccaagaagcatactcacctccctgctcttaaatagcagtcagagctctacttctgaggagactgtgctaagatcagatgcccctgatagtacaggagatcaacctggacttcaccaggacaattcctcaaatggaaagtctgaatggttggatccttcccagaagtcacctcttcatgttggagagacaaggaaagaggatgaccccaatgaggactggtgtgcagtttgtcaaaacggaggggaactcctctgctgtgaaaagtgccccaaagtattccatctttcttgtcatgtgcccacattgacaaattttccaagtggagagtggatttgcactttctgccgagacttatctaaaccagaagttgaatatgattgtgatgctcccagtcacaactcagaaaaaaagaaaactgaaggccttgttaagttaacacctatagataaaaggaagtgtgagcgcctacttttatttctttactgccatgaaatgagcctggcttttcaagaccctgttcctctaactgtgcctgattattacaaaataattaaaaatccaatggatttgtcaaccatcaagaaaagactacaagaagattattccatgtactcaaaacctgaagattttgtagctgattttagattgatctttcaaaactgtgctgaattcaatgagcctgattcagaagtagccaatgctggtataaaacttgaaaattattttgaagaacttctaaagaacctctatccagaaaaaaggtttcccaaaccagaattcaggaatgaatcagaagataataaatttagtgatgattcagatgatgactttgtacagccccggaagaaacgcctcaaaagcattgaagaacgccagttgcttaaataatatgcagcaccactagcttgtgctggtttttagatttttttgttttcaaaaaaacatttgtcagtaatttaacatcactacaaaaagaagagtttgtgactattctcatctctgttttggacgtttactagactttgatttccttaatagcccatttctgttaacctcttatcactaagaaagaaaggaaagaaggagatgaatagaagaaagaaaatggaaagaaggaaaaaaggaggatagaaaaaggatggaagaaagaagcattgaaaacaaagacattcttcccacttcttggatttttaaaccacagtctggagtgatagctactgtagaaaggaaatagactttgtatgaactctttaagttgaaaagtaaaaaatatatgtggtttggatgtgtgctttaattcagctttagaaattaataccactacccgtgaattatatggcctgacaatatgaattaggtgtactgtactgaagaacagtactccacaaacatgggtggtaacaagagttccatcccaggaggccaaacggtgcaacagaagggtaggttagatgctattaagaaggcacttaatagtacatcatgtaagatggcaactgtattaaagaaaaatccggaaaacaaatgtttgatttttgtttttgtttttatcttgtctgtagaggtattttggtatagcaggttttcaaggccattttttatacatttctagatctagattttcaacttcttccactgagggaagtatatacatttgggtttgctgtgtgtctatgtgaggtttaattgtacaggtgatccttttacaacaagcctcattgtttgcagtatagcttttagtggaactacccaaaatataaatacagcagcgtgcactgtatttgatgtgagggttcttcatcatataccctactgggcattaaatataagttcctctgaaagggactcgtttttgtggttttcatctgtctataatttggaatgaaaatgtgttgtaggattttgggagcaggcagctggggggaattaatagtgattttttttttttcctgaagcatctatctcatgtttttcttttgagagtcagaacatcaaacttaatctttgatctgacttctgattttattcttctgattgattgatagaggtacaaaagacttatcttctgaggacaagcatattcttaatgtgccagacctacccggttcagctgatatagatagatagatagatagaagaaaattgctgtgccatacattaatccagcatttgacacaatatctaaatggtttgccgaagttaatctgtatttataaaacattaactggagtaaatttttctccttaggatgatagaataaaaagagctcacttgaaagaaggctattatttgcattatatcacctgccataaatttaacatagaagacttggttttatctacatggctttacttcttaaagtggaaaatatcctgtggctaattcattgggttttcaggtactgctaaagataaaatacagggagaaaataacttgttagcaatagatccccattgtttatatatataggtcttgttcataatatgtcaattatgtattgttaaaaagtcctactcacttttcaaatatgtgttacatggtaatgtttgtcattgttgttttaaagttgcatttgacatttgttctccaaagagtgtttgaacagattttgataacagtgcatacaccttttgtctttttttgctccagcattttatttttagcacagcagctgtggagcttttgctgataattttattgttggtatcttagaatactgttcgtctgacagtttattcttccatacttgtctcccaagttaaaacagagcaaaacagataaattattttgagaatcatcacaaaagggagttagaacttgtgagactaaaactataatttcctaaatgtgactaatgaaccccaaactgtcactattacattcagtgccatatttatctttcaaaacagtatttgtttcaccctaaccatctttggctgaatgaaaggcagttgagaaccatcttttggtcatacataatataattatattaaaagtaaagatcggggctgggcgcagtggctcacacctgcaatcccaccagcactttgggaggccaaggtgggcggatcacaaagtcaagagttcgagatcagcctggccaacattgtgaaaccccgcctctacaaaaaatacaaaaattagccggacatggtggcgtgcaactgtaatcccaactactcaggaggctgagacaggagaatcacttgaacgcaggaggcagaagttgcagtgagccaagatctcaccattgcactccagcctgagtgacagagactcagtctcaaaaacaaaaagtaaaggtcttgggtttctctctgtaaatagcctttgtgtaatggtctttagattaatatcctttgactttattaataagtacctgtgtgcccaggtggatctcagctaagtcatccttaaattctgttcaaatagaaataaaccataaaatgagcctaactataacccacactcacttatcaagcattcccccaaaagttcagtgcgattcaggtaaccttgacctaaacttgtacactccggtgtacatctttgaccataaactctgggagatttccctctggatttgggatcaggagcccagtagggccccattgctgaatgtttatcacacttctggctagggcttatggatgagcagaccacgtaggagctaggatttactcagttccacctcactgacagcttttctaggtgccaagcaactgacttttcctgtgtaaggaagcccaagtacttgaccagtgatatatatggccatggcaaaagtataaatggatggatgtagaccatattcaacgcagaatacattttagatcggtatctggcattgtaatcattttgtcttttgaattaacatgccctgcttgtcttttctgaatggaagggtaggaaagtggaaggtactaaaaaggaaaatgtagttttagtttcttttctaagctaaagaactggctttactactgctatattttactaccacatagtagtgtagatgtagtataacttgcttaggaatgctttcaaaaaggttacctccatagtcaaaaaaagggggagtatacagctgattgttgcatttatgaaactgcatttcaatatgctatgctgttactgtgcttagacacttccttacgtttgagttccaaggagagagagtgagaagaggaactccttttgctgagctctggtccaaattaatgtgaatccccaaagtaaattgctgcatatgaacaacaggttttaggtttaaattgaagatacattcattttatatgtatttgttgtgaatgagagaaattgagtgatctgattggccattaaaattatggtgaatgggtcgggcgcagtggctcacgcctgtaatcccagcactttgggaggccgaggtgggtagatacctgaggtcaggagtttgagaccagcctgaccaacatggtgaaaccccatctctactaaaaataccaaaatcaccagggtgtggtggcccatgcctgtaatcctagctactcgggaggctgaggcaggagaatcggcttgaacccaggaggcagaggttgcagtgagctgagatcgcaccactgtagtccagcctgggtgtcagagcaagactctgtcacaaaaagaaaaattatggggaatggccgggcgcggtggctcacacctgtaatcccagcactttgggaggccgaggtgggtggatcacctgaagtcaggagctcaagaccagcctggccaacatggtgaaaccccacctcaacagaatatacaaaaaaattagctgggtgtggtggcgggtgcctgtaatctcagctactttgggatgctgaggcaggagaatagcttgaacccaggaggtggaggttgcagtgagtcgagattgcaccattgcactccagcctgggcaacaagagcaaaactctgtctcaaaaaaaaaaaaaaatggtgaccatgcgttcaaccatataatttcttactgaaattgagctcctccttttgaataaccatgtacatatttttaaaagtattttatagccctatgtaaattaatagttgatgtctttttataaatgtttattgcatattcatcttgaatgtgaatttactgttgtaattcacatactggtgtcatgtttctgagtgagaataatgctagtcagtcagatcacagatttttctccatgaaggttttacttattgagagggacatctgaggcagtagtcttcgtctttaatttttgggggcagattggtgctttggttttaataaaaactaactttgatggatttttactgtcaatattttaccacaaggattttttaatagaaaaattactgaatgttacttcagcagagttctatctactttgagtctccattactactactgttgttcccctagctgtaacattgatccatataggggcaagctactagtccataaatagctgtaataggaaaacagttttttaaaattctaacacgtgtatttcaccagccttaaaagatttaaaaaaaaatctgacaggaaggaaagcgggtggtaagtatcttggattattctgcctcataccagccactcccaaagtaggaggaccaaagatgccatgaagacttctagttgtctggaagttatttggggaaggggggaaagacacagagtggggacctttggaagtcattttaaaaatttagctatgttaattccacttgtaaagtttgaaaggttttgattcttgtaatttctgagaattactatgttttaaatttactattggatatttaacagatctttcatggggccaacctatttgcttccttaattttcaaattaagtcctaatttgagtcctaaaaaaatctttccttgttagttgcaagttaaacatttaataaaattattttcccacgttt

SEQ ID NO: 4312 - DNA, 1650 bp, Homo sapiens
  source 1..1650: mol_type = genomic DNA
atggagggcccgcgctctgcggcgtgtcgcgctcggccagcaacttccccgggcgctgtggacttgaccgcgccgccgccgccgccgctgctccgcattctcaacagccgggcggcccctgccactcgcacttttgcagacctctgtcggagtctcctgcagccggaatctcgggttctttgccggctgcagccagttaactgctacccgcccgctgcctccacaaagctttgtccagttggagtcattcgttgcccagtttgcagccaagaatgtgcagagagacacatcatagataacttttttgtgaaggacactactgaggttcccagcagtacagtagaaaagtcaaatcaggtatgtacaagctgtgaggacaacgcagaagccaatgggttttgtgtagagtgtgttgaatggctctgcaagacgtgtatcagagctcatcagagggtaaagttcacaaaagaccacactgtcagacagaaagaggaagtatctccagaggcagttggtgtcaccagccagcgaccagtgttttgtccttttcataaaaaggagcagctgaagctgtactgtgagacatgtgacaaactgacatgtcgagactgtcagttgttagaacataaagagcatagataccaatttatagaagaagcttttcagaatcagaaagtgatcatagatacactaatcaccaaactgatggaaaaaacaaaatacataaaattcacaggaaatcagatccaaaacagaattattgaagtaaatcaaaatcaaaagcaggtggaacaggatattaaagttgctatatttacactgatggtagaaataaataaaaaaggaaaagctctactgcatcagttagagagccttgcaaaggaccatcgcatgaaacttatgcaacaacaacaggaagtggctggactctctaaacaattggagcatgtcatgcatttttctaaatgggcagtttccagtggcagcagtacagcattactttatagcaaacgactgattacataccggttacggcacctccttcgtgcaaggtgtgatgcatccccagtgaccaacaacaccatccaatttcactgtgatcctagtttctgggctcaaaatatcatcaacttaggttctttagtaatcgaggataaagagagccagccacaaatgcctaagcagaatcctgtcgtggaacagaattcacagccaccaagtggtttatcatcaaaccagttatccaagttcccaacacagatcagcctagctcaattacggctccagcatatgcagcaacagcaaccgcctccacgtttgataaactttcagaatcacagccccaaacccaatggaccagttcttcctcctcatcctcaacaactgagatatccaccaaaccagaacataccacgacaagcaataaagccaaaccccctacagatggctttcttggctcaacaagccataaaacagtggcagatcagcagtggacagggaaccccatcaactacccaaaatataaatacagcagcgtgcactgtatttgatgtgagggttcttcatcatataccctactgggcattaaatataagttcctctgaaagggactcgtttttgtggttttcatctgtctataatttggaatga

SEQ ID NO: 4313 - DNA, 3799 bp, Homo sapiens
  source 1..3799: mol_type = genomic DNA
ccgcgagtccaccgagcggcctctgaggagcagccgcaggaggaggaggaggtcgtcgggggcggcgggcggagaccgcgctctcgcttccccggcggcggcaagggcaggacaatggaggtggcggtggagaaggcggtggcggcggcggcagcggcctcggctgcggcctccggggggccctcggcggcgccgagcggggagaacgaggccgagagtcggcagggcccggactcggagcgcggcggcgaggcggcccggctcaacctgttggacacttgcgccgtgtgccaccagaacatccagagccgggcgcccaagctgctgccctgcctgcactctttctgccagcgctgcctgcccgcgccccagcgctacctcatgctgcccgcgcccatgctgggctcggccgagaccccgccacccgtccctgcccccggctcgccggtcagcggctcgtcgccgttcgccacccaagttggagtcattcgttgcccagtttgcagccaagaatgtgcagagagacacatcatagataacttttttgtgaaggacactactgaggttcccagcagtacagtagaaaagtcaaatcaggtatgtacaagctgtgaggacaacgcagaagccaatgggttttgtgtagagtgtgttgaatggctctgcaagacgtgtatcagagctcatcagagggtaaagttcacaaaagaccacactgtcagacagaaagaggaagtatctccagaggcagttggtgtcaccagccagcgaccagtgttttgtccttttcataaaaaggagcagctgaagctgtactgtgagacatgtgacaaactgacatgtcgagactgtcagttgttagaacataaagagcatagataccaatttatagaagaagcttttcagaatcagaaagtgatcatagatacactaatcaccaaactgatggaaaaaacaaaatacataaaattcacaggaaatcagatccaaaacagaattattgaagtaaatcaaaatcaaaagcaggtggaacaggatattaaagttgctatatttacactgatggtagaaataaataaaaaaggaaaagctctactgcatcagttagagagccttgcaaaggaccatcgcatgaaacttatgcaacaacaacaggaagtggctggactctctaaacaattggagcatgtcatgcatttttctaaatgggcagtttccagtggcagcagtacagcattactttatagcaaacgactgattacataccggttacggcacctccttcgtgcaaggtgtgatgcatccccagtgaccaacaacaccatccaatttcactgtgatcctagtttctgggctcaaaatatcatcaacttaggttctttagtaatcgaggataaagagagccagccacaaatgcctaagcagaatcctgtcgtggaacagaattcacagccaccaagtggtttatcatcaaaccagttatccaagttcccaacacagatcagcctagctcaattacggctccagcatatgcagcaacagcaaccgcctccacgtttgataaactttcagaatcacagccccaaacccaatggaccagttcttcctcctcatcctcaacaactgagatatccaccaaaccagaacataccacgacaagcaataaagccaaaccccctacagatggctttcttggctcaacaagccataaaacagtggcagatcagcagtggacagggaaccccatcaactaccaacagcacatcctctactccttccagccccacgattactagtgcagcaggatatgatggaaaggcttttggttcacctatgatcgatttgagctcaccagtgggagggtcttataatcttccctctcttccggatattgactgttcaagtactattatgctggacaatattgtgaggaaagatactaatatagatcatggccagccaagaccaccctcaaacagaacggtccagtcaccaaattcatcagtgccatctccaggccttgcaggacctgttactatgactagtgtacaccccccaatacgttcacctagtgcctccagcgttggaagccgaggaagctctggctcttccagcaaaccagcaggagctgactctacacacaaagtcccagtggtcatgctggagccaattcgaataaaacaagaaaacagtggaccaccggaaaattatgatttccctgttgttatagtgaagcaagaatcagatgaagaatctaggcctcaaaatgccaattatccaagaagcatactcacctccctgctcttaaatagcagtcagagctctacttctgaggagactgtgctaagatcagatgcccctgatagtacaggagatcaacctggacttcaccaggacaattcctcaaatggaaagtctgaatggttggatccttcccagaagtcacctcttcatgttggagagacaaggaaagaggatgaccccaatgaggactggtgtgcagtttgtcaaaacggaggggaactcctctgctgtgaaaagtgccccaaagtattccatctttcttgtcatgtgcccacattgacaaattttccaagtggagagtggatttgcactttctgccgagacttatctaaaccagaagttgaatatgattgtgatgctcccagtcacaactcagaaaaaaagaaaactgaaggccttgttaagttaacacctatagataaaaggaagtgtgagcgcctacttttatttctttactgccatgaaatgagcctggcttttcaagaccctgttcctctaactgtgcctgattattacaaaataattaaaaatccaatggatttgtcaaccatcaagaaaagactacaagaagattattccatgtactcaaaacctgaagattttgtagctgattttagattgatctttcaaaactgtgctgaattcaatgagcctgattcagaagtagccaatgctggtataaaacttgaaaattattttgaagaacttctaaagaacctctatccagaaaaaaggtttcccaaaccagaattcaggaatgaatcagaagataataaatttagtgatgattcagatgatgactttgtacagccccggaagaaacgcctcaaaagcattgaagaacgccagttgcttaaataatatgcagcaccactagcttgtgctggtttttagatttttttgttttcaaaaaaacatttgtcagtaatttaacatcactacaaaaagaagagtttgtgactattctcatctctgttttggacgtttactagactttgatttccttaatagcccatttctgttaacctcttatcactaagaaagaaaggaaagaaggagatgaatagaagaaagaaaatggaaagaaggaaaaaaggaggatagaaaaaggatggaagaaagaagcattgaaaacaaagacattcttcccacttcttggatttttaaaccacagtctggagtgatagctactgtagaaaggaaatagactttgtatgaactctttaagttgaaaagtaaaaaatatatgtggtttggatgtgtgctttaattcagctttagaaattaataccactacccgtgaattatatggcctgacaatatgaattaggtgtactgtactgaagaacagtactccacaaacatgggtggtaacaagagttccatcccaggaggccaaacggtgcaacagaagggtaggttagatgctattaagaaggcacttaatagtacatcatgtaagatggcaactgtattaaagaaaaatccggaaaac

SEQ ID NO: 4314 - DNA, 3417 bp, Homo sapiens
  source 1..3417: mol_type = genomic DNA
actcgggaggcggatcccgtgggcctgaggaggcttcccccgcccggtttgctttccctccctcgctggcgctgccgcgagtccaccgagcggcctctgaggagcagccgcaggaggaggaggaggtcgtcgggggcggcgggcggagaccgcgctctcgcttccccggcggcggcaagggcaggacaatggaggtggcggtggagaaggcggtggcggcggcgaggcggcccggctcaacctgttggacacttgcgccgtgtgccaccagaacatccagagccgggcgcccaagctgctgccctgcctgcactctttctgccagcgctgcctgcccgcgccccagcgctacctcatgctgcccgcgcccatgctgggctcggccgagaccccgccacccgtccctgcccccggctcgccggtcagcggctcgtcgccgttcgccacccaagttggagtcattcgttgcccagtttgcagccaagaatgtgcagagagacacatcatagataacttttttgtgaaggacactactgaggttcccagcagtacagtagaaaagtcaaatcaggtatgtacaagctgtgaggacaacgcagaagccaatgggttttgtgtagagtgtgttgaatggctctgcaagacgtgtatcagagctcatcagagggtaaagttcacaaaagaccacactgtcagacagaaagaggaagtatctccagaggcagttggtgtcaccagccagcgaccagtgttttgtccttttcataaaaaggagcagctgaagctgtactgtgagacatgtgacaaactgacatgtcgagactgtcagttgttagaacataaagagcatagataccaatttatagaagaagcttttcagaatcagaaagtgatcatagatacactaatcaccaaactgatggaaaaaacaaaatacataaaattcacaggaaatcagatccaaaacagaattattgaagtaaatcaaaatcaaaagcaggtggaacaggatattaaagttgctatatttacactgatggtagaaataaataaaaaaggaaaagctctactgcatcagttagagagccttgcaaaggaccatcgcatgaaacttatgcaacaacaacaggaagtggctggactctctaaacaattggagcatgtcatgcatttttctaaatgggcagtttccagtggcagcagtacagcattactttatagcaaacgactgattacataccggttacggcacctccttcgtgcaaggtgtgatgcatccccagtgaccaacaacaccatccaatttcactgtgatcctagtttctgggctcaaaatatcatcaacttaggttctttagtaatcgaggataaagagagccagccacaaatgcctaagcagaatcctgtcgtggaacagaattcacagccaccaagtggtttatcatcaaaccagttatccaagttcccaacacagatcagcctagctcaattacggctccagcatatgcagcaacaggtaatggctcagaggcaacaggtgcaacggaggccagcacctgtgggtttaccaaaccctagaatgcaggggcccatccagcaaccttccatctctcatcagcaaccgcctccacgtttgataaactttcagaatcacagccccaaacccaatggaccagttcttcctcctcatcctcaacaactgagatatccaccaaaccagaacataccacgacaagcaataaagccaaaccccctacagatggctttcttggctcaacaagccataaaacagtggcagatcagcagtggacagggaaccccatcaactaccaacagcacatcctctactccttccagccccacgattactagtgcagcaggatatgatggaaaggcttttggttcacctatgatcgatttgagctcaccagtgggagggtcttataatcttccctctcttccggatattgactgttcaagtactattatgctggacaatattgtgaggaaagatactaatatagatcatggccagccaagaccaccctcaaacagaacggtccagtcaccaaattcatcagtgccatctccaggccttgcaggacctgttactatgactagtgtacaccccccaatacgttcacctagtgcctccagcgttggaagccgaggaagctctggctcttccagcaaaccagcaggagctgactctacacacaaagtcccagtggtcatgctggagccaattcgaataaaacaagaaaacagtggaccaccggaaaattatgatttccctgttgttatagtgaagcaagaatcagatgaagaatctaggcctcaaaatgccaattatccaagaagcatactcacctccctgctcttaaatagcagtcagagctctacttctgaggagactgtgctaagatcagatgcccctgatagtacaggagatcaacctggacttcaccaggacaattcctcaaatggaaagtctgaatggttggatccttcccagaagtcacctcttcatgttggagagacaaggaaagaggatgaccccaatgaggactggtgtgcagtttgtcaaaacggaggggaactcctctgctgtgaaaagtgccccaaagtattccatctttcttgtcatgtgcccacattgacaaattttccaagtggagagtggatttgcactttctgccgagacttatctaaaccagaagttgaatatgattgtgatgctcccagtcacaactcagaaaaaaagaaaactgaaggccttgttaagttaacacctatagataaaaggaagtgtgagcgcctacttttatttctttactgccatgaaatgagcctggcttttcaagaccctgttcctctaactgtgcctgattattacaaaataattaaaaatccaatggatttgtcaaccatcaagaaaagactacaagaagattattccatgtactcaaaacctgaagattttgtagctgattttagattgatctttcaaaactgtgctgaattcaatgagcctgattcagaagtagccaatgctggtataaaacttgaaaattattttgaagaacttctaaagaacctctatccagaaaaaaggtttcccaaaccagaattcaggaatgaatcagaagataataaatttagtgatgattcagatgatgactttgtacagccccggaagaaacgcctcaaaagcattgaagaacgccagttgcttaaataatatgcagcaccactagcttgtgctggtttttagatttttttgttttcaaaaaaacatttgtcagtaatttaacatcactacaaaaagaagagtttgtgactattctcatctctgttttggacgtttactagactttgatttccttaatagcccatttctgttaacctcttatcact

SEQ ID NO: 4315 - DNA, 3530 bp, Homo sapiens
  source 1..3530: mol_type = genomic DNA
ggtggtggaatatagagctcatgtgatccgtcacatgacagcagatccgcggaagggcagaatgggactccaagcctgcctcctagggctctttgccctcatcctctctggcaaatgcagttacagcccggagcccgaccagcggaggacgctgcccccaggctgggtgtccctgggccgtgcggaccctgaggaagagctgagtctcacctttgccctgagacagcagaatgtggaaagactctcggagctggtgcaggctgtgtcggatcccagctctcctcaatacggaaaatacctgaccctagagaatgtggctgatctggtgaggccatccccactgaccctccacacggtgcaaaaatggctcttggcagccggagcccagaagtgccattctgtgatcacacaggactttctgacttgctggctgagcatccgacaagcagagctgctgctccctggggctgagtttcatcactatgtgggaggacctacggaaacccatgttgtaaggtccccacatccctaccagcttccacaggccttggccccccatgtggactttgtggggggactgcaccgttttcccccaacatcatccctgaggcaacgtcctgagccgcaggtgacagggactgtaggcctgcatctgggggtaaccccctctgtgatccgtaagcgatacaacttgacctcacaagacgtgggctctggcaccagcaataacagccaagcctgtgcccagttcctggagcagtatttccatgactcagacctggctcagttcatgcgcctcttcggtggcaactttgcacatcaggcatcagtagcccgtgtggttggacaacagggccggggccgggccgggattgaggccagtctagatgtgcagtacctgatgagtgctggtgccaacatctccacctgggtctacagtagccctggccggcatgagggacaggagcccttcctgcagtggctcatgctgctcagtaatgagtcagccctgccacatgtgcatactgtgagctatggagatgatgaggactccctcagcagcgcctacatccagcgggtcaacactgagctcatgaaggctgccgctcggggtctcaccctgctcttcgcctcaggtgacagtggggccgggtgttggtctgtctctggaagacaccagttccgccctaccttccctgcctccagcccctatgtcaccacagtgggaggcacatccttccaggaacctttcctcatcacaaatgaaattgttgactatatcagtggtggtggcttcagcaatgtgttcccacggccttcataccaggaggaagctgtaacgaagttcctgagctctagcccccacctgccaccatccagttacttcaatgccagtggccgtgcctacccagatgtggctgcactttctgatggctactgggtggtcagcaacagagtgcccattccatgggtgtccggaacctcggcctctactccagtgtttggggggatcctatccttgatcaatgagcacaggatccttagtggccgcccccctcttggctttctcaacccaaggctctaccagcagcatggggcaggactctttgatgtaacccgtggctgccatgagtcctgtctggatgaagaggtagagggccagggtttctgctctggtcctggctgggatcctgtaacaggctggggaacacccaacttcccagctttgctgaagactctactcaacccctgaccctttcctatcaggagagatggcttgtcccctgccctgaagctggcagttcagtcccttattctgccctgttggaagccctgctgaaccctcaactattgactgctgcagacagcttatctccctaaccctgaaatgctgtgagcttgacttgactcccaaccctaccatgctccatcatactcaggtctccctactcctgccttagattcctcaataagatgctgtaactagcattttttgaatgcctctccctccgcatctcatctttctcttttcaatcaggcttttccaaagggttgtatacagactctgtgcactatttcacttgatattcattccccaattcactgcaaggagacctctactgtcaccgtttactctttcctaccctgacatccagaaacaatggcctccagtgcatacttctcaatctttgctttatggcctttccatcatagttgcccactccctctccttacttagcttccaggtcttaacttctctgactactcttgtcttcctctctcatcaatttctgcttcttcatggaatgctgaccttcattgctccatttgtagatttttgctcttctcagtttactcattgtcccctggaacaaatcactgacatctacaaccattaccatctcactaaataagactttctatccaataatgattgatacctcaaatgtaagatgcgtgatactcaacatttcatcgtccaccttcccaaccccaaacaattccatctcgtttcttcttggtaaatgatgctatgctttttccaaccaagccagaaacctgtgtcatcttttcaccccaccttcaatcaacaagtcctcaatcaacaagtcctactgactgcacatcttaaatatatctttatcagtccacaagtccttccaattatatttcccaagtatatctagaacttatccacttatatccccactgctactaccttagtttagggctatattctcttgaaaaaaagtgtccttacttcctgccaatccccaagtcatcttccagagtaaaatgcaaatcccatcaggccacttggatgaaaacccttcaaggattactggatagaattcaggctttcccctccagcccccaatcatagctcacaaaccttccttgctatttgttcttaagtaaaaaatcatttttcctcctccctccccaaaccccaaggaactctcactcttgctcaagctgttccgtccccttaccacccctgatacaactgccaggttaatttccagaattcttgcaagactcagttcagaagtcaccttctttcgtgaatgttttgattccctgaggctactttattttggtatggctgaaaaatcctagattttctaaacaaaacctgtttgaatcttggttctgatatggactaggagagagactgggtcaagtaagcttatctccctgaggctgtttcctcgtctgttaagtgtgaatatcaatacctgcctttcataatcaccagggaataaagtggaataatgttgataacagtgcttggcacctggaagtaggtggcagatgttaacgcccttcctcccttgcactgcgccccctgtgcctacctctagcattgtaacgaccacgtagtattgaaatggccagtttacttgtctgccttcctttccaagaccgttggtgcctagaggactagaatcgtgtcctatttaactttgtgttcccaggtcctagctcaggagttggcaaataagaattaaatgtctgctacaccgaaa

SEQ ID NO: 4316 - DNA, 1527 bp, Homo sapiens
  source 1..1527: mol_type = genomic DNA
agcagatccgcggaagggcagaatgggactccaagcctgcctcctagggctctttgccctcatcctctctggcaaatgcagttacagcccggagcccgaccagcggaggacgctgcccccaggctgggtgtccctgggccgtgcggaccctgaggaagagctgagtctcacctttgccctgagacagcagaatgtggaaagactctcggagctggtgcaggctgtgtcggatcccagctctcctcaatacggaaaatacctgaccctagagaatgtggctgatctggtgaggccatccccactgaccctccacacggtgcaaaaatggctcttggcagccggagcccagaagtgccattctgtgatcacacaggactttctgacttgctggctgagcatccgacaagcagagctgctgctccctggggctgagtttcatcactatgtgggaggacctacggaaacccatgttgtaaggtccccacatccctaccagcttccacatatcttggaggtcccctatgtcaccacagtgggaggcacatccttccaggaacctttcctcatcacaaatgaaattgttgactatatcagtggtggtggcttcagcaatgtgttcccacggccttcataccaggaggaagctgtaacgaagttcctgagctctagcccccacctgccaccatccagttacttcaatgccagtggccgtgcctacccagatgtggctgcactttctgatggctactgggtggtcagcaacagagtgcccattccatgggtgtccggaacctcggcctctactccagtgtttggggggatcctatccttgatcaatgagcacaggatccttagtggccgcccccctcttggctttctcaacccaaggctctaccagcagcatggggcaggactctttgatgtaacccgtggctgccatgagtcctgtctggatgaagaggtagagggccagggtttctgctctggtcctggctgggatcctgtaacaggctggggaacacccaacttcccagctttgctgaagactctactcaacccctgaccctttcctatcaggagagatggcttgtcccctgccctgaagctggcagttcagtcccttattctgccctgttggaagccctgctgaaccctcaactattgactgctgcagacagcttatctccctaaccctgaaatgctgtgagcttgacttgactcccaaccctaccatgctccatcatactcaggtctccctactcctgccttagattcctcaataagatgctgtaactagcattttttgaatgcctctccctccgcatctcatctttctcttttcaatcaggcttttccaaagggttgtatacagactctgtgcactatttcacttgatattcattccccaattcactgcaaggagacctctactgtcaccgtttactctttcctaccctgacatccagaaacaatggcctccagtgcatacttctcaatctttgctttatggcctttccatcatagttg

SEQ ID NO: 4317 - DNA, 8604 bp, Homo sapiens
  source 1..8604: mol_type = genomic DNA
gtgctgtacgtccaagatggcggcgccctgtaggctggagggactgtgaggtaaacagctgagggggaggagacggtggtgaccatgaaagacaccaggttgacagcactggaaactgaagtaccagttgtcgctagaacagtttggtagtggccccaatgaagaaccttcagaacctgtagcacacgtcctggagccagcacagcgccttcgagcgagagaatggcccaacaagcaaatgtcggggagcttcttgccatgctggactcccccatgctgggtgtgcgggacgacgtgacagctgtctttaaagagaacctcaattctgaccgtggccctatgcttgtaaacaccttggtggattattacctggaaaccagctctcagccggcattgcacatcctgaccaccttgcaagagccacatgacaagcacctcttggacaggattaacgaatatgtgggcaaagccgccactcgtttatccatcctctcgttactgggtcatgtcataagactgcagccatcttggaagcataagctctctcaagcacctcttttgccttctttactaaaatgtctcaagatggacactgacgtcgttgtcctcacaacaggcgtcttggtgttgataaccatgctaccaatgattccacagtctgggaaacagcatcttcttgatttctttgacatttttggccgtctgtcatcatggtgcctgaagaaaccaggccacgtggcggaagtctatctcgtccatctccatgccagtgtgtacgcactctttcatcgcctttatggaatgtacccttgcaacttcgtctcctttttgcgttctcattacagtatgaaagaaaacctggagacttttgaagaagtggtcaagccaatgatggagcatgtgcgaattcatccggaattagtgactggatccaaggaccatgaactggaccctcgaaggtggaagagattagaaactcatgatgttgtgatcgagtgtgccaaaatctctctggatcccacagaagcctcatatgaagatggctattctgtgtctcaccaaatctcagcccgctttcctcatcgttcagccgatgtcaccaccagcccttatgctgacacacagaatagctatgggtgtgctacttctaccccttactccacgtctcggctgatgttgttaaatatgccagggcagctacctcagactctgagttccccatcgacacggctgataactgaaccaccacaagctactctttggagcccatctatggtttgtggtatgaccactcctccaacttctcctggaaatgtcccacctgatctgtcacacccttacagtaaagtctttggtacaactgcaggtggaaaaggaactcctctgggaaccccagcaacctctcctcctccagccccactctgtcattcggatgactacgtgcacatttcactcccccaggccacagtcacaccccccaggaaggaagagagaatggattctgcaagaccatgtctacacagacaacaccatcttctgaatgacagaggatcagaagagccacctggcagcaaaggttctgtcactctaagtgatcttccagggtttttaggtgatctggcctctgaagaagatagtattgaaaaagataaagaagaagctgcaatatctagagaactttctgagatcaccacagcagaggcagagcctgtggttcctcgaggaggctttgactctcccttttaccgagacagtctcccaggttctcagcggaagacccactcggcagcctccagttctcagggcgccagcgtgaaccctgagcctttacactcctccctggacaagcttgggcctgacacaccaaagcaagcctttactcccatagacctgccctgcggcagtgctgatgaaagccctgcgggagacagggaatgccagacttctttggagaccagtatcttcactcccagtccttgtaaaattccacctccgacgagagtgggctttggaagcgggcagcctcccccgtatgatcatctttttgaggtggcattgccaaagacagcccatcattttgtcatcaggaagactgaggagctgttaaagaaagcaaaaggaaacacagaggaagatggtgtgccctctacctccccaatggaagtgctggacagactgatacagcagggagcagacgcgcacagcaaggagctgaacaagttgcctttacccagcaagtctgtcgactggacccactttggaggctctcctccttcagatgagatccgcaccctccgagaccagttgcttttactgcacaaccagttactctatgagcgttttaagaggcagcagcatgccctccggaacaggcggctcctccgcaaggtgatcaaagcagcagctctggaggaacataatgctgccatgaaagatcagttgaagttacaagagaaggacatccagatgtggaaggttagtctgcagaaagaacaagctagatacaatcagctccaggagcagcgtgacactatggtaaccaagctccacagccagatcagacagctgcagcatgaccgagaggaattctacaaccagagccaggaattacagacgaagctggaggactgcaggaacatgattgcggagctgcggatagaactgaagaaggccaacaacaaggtgtgtcacactgagctgctgctcagtcaggtttcccaaaagctctcaaacagtgagtcggtccagcagcagatggagttcttgaacaggcagctgttggttcttggggaggtcaacgagctctatttggaacaactgcagaacaagcactcagataccacaaaggaagtagaaatgatgaaagccgcctatcggaaagagctagaaaaaaacagaagccatgttctccagcagactcagaggcttgatacctcccaaaaacggattttggaactggaatctcacctggccaagaaagaccaccttcttttggaacagaagaaatatctagaggatgtcaaactccaggcaagaggacagctgcaggccgcagagagcaggtatgaggctcagaaaaggataacccaggtgtttgaattggagatcttagatttatatggcaggttggagaaagatggcctcctgaaaaaacttgaagaagaaaaagcagaagcagctgaagcagcagaagaaaggcttgactgttgtaatgacgggtgctcagattccatggtagggcacaatgaagaggcatctggccacaacggtgagaccaagacccccaggcccagcagcgcccggggcagtagtggaagcagaggtggtggaggcagcagcagcagcagcagcgagctttctaccccagagaaacccccacaccagagggcaggcccattcagcagtcggtgggagacgactatgggagaagcgtctgccagcatccccaccactgtgggctcacttcccagttcaaaaagcttcctgggtatgaaggctcgagagttatttcgtaataagagcgagagccagtgtgatgaggacggcatgaccagtagcctttctgagagcctaaagacagaactgggcaaagacttgggtgtggaagccaagattcccctgaacctagatggccctcacccgtctcccccgaccccggacagtgttggacagctacatatcatggactacaatgagactcatcatgaacacagctaaggaatgatggtcaatcagtgttaacttgcatattgttggcacagaacaggaggtgtgaatgcacgtttcaaagctttcctgtttccagggtctgagtgcaagttcatgtgtggaaatgggacggaggtcctttggacagctgactgaatgcagaacggtttttggatctggcattgaaatgcctcttgaccttcccctccacccgccctaaccccctctcatttacctcgcagtgtgttctaatccaagggccagttggtgttcctcagtagctttactttcttcctttcccccccaaatggttgcgtcctttgaacctgtgcaatatgaggccaaatttaatctttgagtctaacacaccactttctgctttcccgaagttcagataactgggttggctctcaattagaccaggtagtttgttgcattgcaggtaagtctggttttgtcccttccaggaggacatagcctgcaaagctggttgtctttacatgaaagcgtttacatgagactttccgactgcttttttgattctgaagttcagcatctaaagcagcaggtctagaagaacaacggtttattcatacttgcattcttttggcagttctgataagcttcctagaaagttctgtgtaaacagaagcctgtttcagaaatctggagctggcactgtggagaccacacaccctttgggaaagctcttgtctcttcttcccccactacctcttatttatttggtgtttgcttgaatgctggtactattgtgaccacaggctggtgtgtaggtggtaaaacctgttctccataggagggaaggagcagtcactgggagaggttacccgagaagcacttgagcatgaggaactgcacctttaggccatctcagcttgctgggccttttgttaaacccttctgtctactggcctccctttgtgtgcatacgcctcttgttcatgtcagcttatatgtgacactgcagcagaaaggctctgaaggtccaaagagtttctgcaaagtgtatgtgaccatcatttcccaggccattagggttgcctcactgtagcaggttctaggctaccagaagaggggcagctttttcataccaattccaactttcaggggctgactctccagggagctgatgtcatcacactctccatgttagtaatggcagagcagtctaaacagagtccgggagaatgctggcaaaggctggctgtgtatacccactaggctgccccacgtgctcccgagagatgacactagtcagaaaattggcagtggcagagaatccaaactcaacaagtgctcctgaaagaaacgctagaagcctaagaactgtggtctggtgttccagctgaggcagggggatttggtaggaaggagccagtgaacttggctttcctgtttctatctttcattaaaaagaatagaaggattcagtcataaagaggtaaaaaactgtcacggtacgaaatcttagtgcccacggaggcctcgagcagagagaatgaaagtcttttttttttttttttttttttagcatggcaataaatattctagcatccctaactaaaggggactagacagttagagactctgtcaccctagctataccagcagaaaacctgttcaggcaggctttctgggtgtgactgattcccagcctgtggcagggcgtggtcccaactactcagcctagcacaggctggcagttggtactgaattgtcagatgtggagtattagtgacaccacacatttaattcagctttgtccaaaggaaagcttaaaacccaatacagtctagtttcctggttccgttttagaaaaggaaaacgtgaacaaacttagaaagggaaggaaatcccatcagtgaatcctgaaactggttttaagtgctttccttctcctcatgcccaagagatctgtgccatagaacaagataccaggcacttaaagccttttcctgaattggaaaggaaaagaggcccaagtgcaaaagaaaaaacattttagaaacggacagcttataaaaataaagggaagaaaggaggcagcatggagagaggcctgtgctagaagctccatggacgtgtctgcacagggtcctcagctcatccatgcggcctgggtgtccttttactcagctttataacaaatgtggctccaagctcaggtgcctttgagttctaggaggctgtgggttttattcaactacggttgggagaatgagacctggagtcatgttgaaggtgcccaacctaaaaatgtaggctttcatgttgcaaagaactccagagtcagtagttaggtttggtttggttttggacatgataaacctgccaagagtcaacaggtcacttgatcatgctgcagtgggtagttctaaggatggaaaggtgacagtattactctcgagaggcaattcagtcctgggcaaaggtattagtacaataagcgttaagggcagagtctaccttgaaaccaattaagcagcttggtattcataaatattgggattggatggcctccatccagaaatcactatgggtgagcatacctgtctcagctgtttggccaatgtgcataacctactcggatccccacctgacactaaccagagtcagcacaggccccgaggagcccgaagtctgctgctgtgcagcatggaattcctttaaaaaggtgcactacagttttagcggggagggggataggaagacgcagagcaaatgagctccggagtccctgcaggtgaataaacacacagatctgcatctgatagaactttgatggattttcaaaaagccgttgacaaggctctgctatacagtctataaaaattgttattatgggattggaagaaacacgtggtcatgaatagaaaaaaaacaaacccaaaggtaggaaggtcaaggtcatttcttagatggagaagttgtgaaagatgtccttggagatgagttttaggaccagcattactaaggcaggtgggcagacagtgacctctctaggtgtgtccacagagtttttcaggagagaaaactgcctgacctttgggactaagctgcggaatcttcttactaagcttgaagagtggagaggcgagaggtgagctactttgtgagccaaagcttatgtgacatggttggggaaacagtccaaactgttctgagaaggtgaactgttacgacccaggacaattagaaaaattcacccaccatgccgcacattactgggtaaaagcagggcagcagggaacaaaactccagactcttgggccgtccccatttgcaacagcacacatagtttctggtatatttgttgggaaagataaaactctagcagttgttgaggggaggatgtataaaatggtcatggggatgaaaggatctctgagaccacagaggctcagactcactgttaagaatagaaaactgggtatgcgtttcatgtagccagcagaactgaagtgtgctgtgacaagccaatgtgaatttctaccaaatagtagagcataccacttgaagaaggaaagaaccgaagagcaaacaaaagttctgcgtaatgagactcaccttttctcgctgaaagcactaagaggtgggaggaggcctgcacaggctggaggagggtttgggcagagcgaagacccggccaggaccttggtgagatggggtgccgcccacctcctgcggatactcttggagagttgttcccccagggggctctgccccacctggagaaggaagctgcctggtgtggagtgactcaaatcagtatacctatctgctgcaccttcactctccagggtacatgctttaaaaccgacccgcaacaagtattggaaaaatgtatccagtctgaagatgtttgtgtatctgtttacatccagagttctgtgacacatgccccccagattgctgcaaagatcccaaggcattgattgcacttgattaagcttttgtctgtaggtgaaagaacaagtttaggtcgaggactggcccctaggctgctgctgtgacccttgtcccatgtggcttgtttgcctgtccgggactcttcgatgtgcccaggggagcgtgttcctgtctcttccatgccgtcctgcagtccttatctgctcgcctgagggaagagtagctgtagctacaagggaagcctgcctggaagagccgagcacctgtgcccatggcttctggtcatgaaacgagttaatgatggcagaggagcttcctccccacttcgcagcgccacattatccatcctctgagataagtaggctggtttaaccattggaatggacctttcagtggaaaccctgagagtctgagaacccccagaccaacccttccctccctttccccacctcttacagtgtttggacaggagggtatggtgctgctctgtgtagcaagtactttggcttatgaaagaggcagccacgcattttgcactaggaagaatcagtaatcacttttcagaagacttctatggaccacaaatatattacggaggaacagattttgctaagacataatctagttttataactcaatcatgaatgaaccatgtgtggcaaacttgcagtttaaaggggtcccatcagtgaaagaaactgattttttttaacggactgcttttagttaaattgaagaaagtcagctcttgtcaaaaggtctaaactttcccgcctcaatcctaaaagcatgtcaacaatccacatcagatgccataaatatgaactgcaggataaaatggtacaatcttagtgaatgggaattggaatcaaaagagtttgctgtccttcttagaatgttctaaaatgtcaaggcagttgcttgtgtttaactgtgaacaaataaaaatttattgttttgcactac

SEQ ID NO: 4318 - DNA, 1507 bp, Homo sapiens
  source 1..1507: mol_type = genomic DNA
acgacgggggaggtgctgtacgtccaagatggcggcgccctgtaggctggagggactgtgaggtaaacagctgagggggaggagacggtggtgaccatgaaagacaccaggttgacagcactggaaactgaagtaccagttgtcgctagaacagtttggtagtggccccaatgaagaaccttcagaacctgtagcacacgtcctggagccagcacagcgccttcgagcgagagaatggcccaacaagcaaatgtcggggagcttcttgccatgctggactcccccatgctgggtgtgcgggacgacgtgacagctgtctttaaagagaacctcaattctgaccgtggccctatgcttgtaaacaccttggtggattattacctggaaaccagctctcagccggcattgcacatcctgaccaccttgcaagagccacatgacaagcacctcttggacaggattaacgaatatgtgggcaaagccgccactcgtttatccatcctctcgttactgggtcatgtcataagactgcagccatcttggaagcataagctctctcaagcacctcttttgccttctttactaaaatgtctcaagatggacactgacgtcgttgtcctcacaacaggcgtcttggtgttgataaccatgctaccaatgattccacagtctgggaaacagcatcttcttgatttctttgacatttttggccgtctgtcatcatggtgcctgaagaaaccaggccacgtggcggaagtctatctcgtccatctccatgccagtgtgtacgcactctttcatcgcctttatggaatgtacccttgcaacttcgtctcctttttgcgttctcattacagtatgaaagaaaacctggagacttttgaagaagtggtcaagccaatgatggagcatgtgcgaattcatccggaattagtgactggatccaaggaccatgaactggaccctcgaaggtggaagagattagaaactcatgatgttgtgatcgagtgtgccaaaatctctctggatcccacagaagcctcatatgaagatggctattctgtgtctcaccaaatctcagcccgctttcctcatcgttcagccgatgtcaccaccagcccttatgctgacacacagaatagctatgggtgtgctacttctaccccttactccacgtctcggctgatgttgttaaatatgccagggcagctacctcagactctgagttccccatcgacacggctgataactgaaccaccacaagtatggtgtcaactagtgtgcctgctctctcctctgctttctggtgaagctgaccctttgggtcagatttagtatgtggttgggaaaatttcacactgctcatttcaggagtcacttttaaggatccatgatattagcaaagaaagttactgttgcctcttagattcatcttgaagtcttgatttacaaaatgcaacttgtttcttgatacgcttttaataagatgcctttttctagatgaaaa

SEQ ID NO: 4319 - DNA, 1333 bp, Homo sapiens
  source 1..1333: mol_type = genomic DNA
cagtttggtagtggccccaatgaagaaccttcagaacctgtagcacacgtcctggagccagcacagcgccttcgagcgagagaatggcccaacaagcaaatgtcggggagcttcttgccatgctggactcccccatgctgggtgtgcgggacgacgtgacagctgtctttaaagagaacctcaattctgcacctcttggacaggattaacgaatatgtgggcaaagccgccactcgtttatccatcctctcgttactgggtcatgtcataagactgcagccatcttggaagcataagctctctcaagcacctcttttgccttctttactaaaatgtctcaagatggacactgacgtcgttgtcctcacaacaggcgtcttggtgttgataaccatgctaccaatgattccacagtctgggaaacagcatcttcttgatttctttgacatttttggccgtctgtcatcatggtgcctgaagaaaccaggccacgtggcggaagtctatctcgtccatctccatgccagtgtgtacgcactctttcatcgcctttatggaatgtacccttgcaacttcgtctcctttttgcgttctcattacagtatgaaagaaaacctggagacttttgaagaagtggtcaagccaatgatggagcatgtgcgaattcatccggaattagtgactggatccaaggaccatgaactggaccctcgaaggtggaagagattagaaactcatgatgttgtgatcgagtgtgccaaaatctctctggatcccacagaagcctcatatgaagatggctattctgtgtctcaccaaatctcagcccgctttcctcatcgttcagccgatgtcaccaccagcccttatgctgacacacagaatagctatgggtgtgctacttctaccccttactccacgtctcggctgatgttgttaaatatgccagggcagctacctcagactctgagttccccatcgacacggctgataactgaaccaccacaagctactctttggagcccatctatggtttgtggtatgaccactcctccaacttctcctggaaatgtcccacctgatctgtcacacccttacagtaaagtctttggtacaactgcaggtggaaaaggaactcctctgggaaccccagcaacctctcctcctccagccccatctgtcattcggatgactacgtgcacatttcactcccccaggccacagtcacaccccccaggaaggaagagagaatggattctgcaagaccatgtctacacagacaacaccatcttctgaatgacagaggatcagaagagccacctggcagcaaagg

SEQ ID NO: 4320 - DNA, 8463 bp, Homo sapiens
  source 1..8463: mol_type = genomic DNA
cagtttggtagtggccccaatgaagaaccttcagaacctgtagcacacgtcctggagccagcacagcgccttcgagcgagagaatggcccaacaagcaaatgtcggggagcttcttgccatgctggactcccccatgctgggtgtgcgggacgacgtgacagctgtctttaaagagaacctcaattctgaccgtggccctatgcttgtaaacaccttggtggattattacctggaaaccagctctcagccggcattgcacatcctgaccaccttgcaagagccacatgacaagcacctcttggacaggattaacgaatatgtgggcaaagccgccactcgtttatccatcctctcgttactgggtcatgtcataagactgcagccatcttggaagcataagctctctcaagcacctcttttgccttctttactaaaatgtctcaagatggacactgacgtcgttgtcctcacaacaggcgtcttggtgttgataaccatgctaccaatgattccacagtctgggaaacagcatcttcttgatttctttgacatttttggccgtctgtcatcatggtgcctgaagaaaccaggccacgtggcggaagtctatctcgtccatctccatgccagtgtgtacgcactctttcatcgcctttatggaatgtacccttgcaacttcgtctcctttttgcgttctcattacagtatgaaagaaaacctggagacttttgaagaagtggtcaagccaatgatggagcatgtgcgaattcatccggaattagtgactggatccaaggaccatgaactggaccctcgaaggtggaagagattagaaactcatgatgttgtgatcgagtgtgccaaaatctctctggatcccacagaagcctcatatgaagatggctattctgtgtctcaccaaatctcagcccgctttcctcatcgttcagccgatgtcaccaccagcccttatgctgacacacagaatagctatgggtgtgctacttctaccccttactccacgtctcggctgatgttgttaaatatgccagggcagctacctcagactctgagttccccatcgacacggctgataactgaaccaccacaagctactctttggagcccatctatggtttgtggtatgaccactcctccaacttctcctggaaatgtcccacctgatctgtcacacccttacagtaaagtctttggtacaactgcaggtggaaaaggaactcctctgggaaccccagcaacctctcctcctccagccccactctgtcattcggatgactacgtgcacatttcactcccccaggccacagtcacaccccccaggaaggaagagagaatggattctgcaagaccatgtctacacagacaacaccatcttctgaatgacagaggatcagaagagccacctggcagcaaaggttctgtcactctaagtgatcttccagggtttttaggtgatctggcctctgaagaagatagtattgaaaaagataaagaagaagctgcaatatctagagaactttctgagatcaccacagcagaggcagagcctgtggttcctcgaggaggctttgactctcccttttaccgagacagtctcccaggttctcagcggaagacccactcggcagcctccagttctcagggcgccagcgtgaaccctgagcctttacactcctccctggacaagcttgggcctgacacaccaaagcaagcctttactcccatagacctgccctgcggcagtgctgatgaaagccctgcgggagacagggaatgccagacttctttggagaccagtatcttcactcccagtccttgtaaaattccacctccgacgagagtgggctttggaagcgggcagcctcccccgtatgatcatctttttgaggtggcattgccaaagacagcccatcattttgtcatcaggaagactgaggagctgttaaagaaagcaaaaggaaacacagaggaagatggtgtgccctctacctccccaatggaagtgctggacagactgatacagcagggagcagacgcgcacagcaaggagctgaacaagttgcctttacccagcaagtctgtcgactggacccactttggaggctctcctccttcagatgagatccgcaccctccgagaccagttgcttttactgcacaaccagttactctatgagcgttttaagaggcagcagcatgccctccggaacaggcggctcctccgcaaggtgatcaaagcagcagctctggaggaacataatgctgccatgaaagatcagttgaagttacaagagaaggacatccagatgtggaaggttagtctgcagaaagaacaagctagatacaatcagctccaggagcagcgtgacactatggtaaccaagctccacagccagatcagacagctgcagcatgaccgagaggaattctacaaccagagccaggaattacagacgaagctggaggactgcaggaacatgattgcggagctgcggatagaactgaagaaggccaacaacaaggtgtgtcacactgagctgctgctcagtcaggtttcccaaaagctctcaaacagtgagtcggtccagcagcagatggagttcttgaacaggcagctgttggttcttggggaggtcaacgagctctatttggaacaactgcagaacaagcactcagataccacaaaggaagtagaaatgatgaaagccgcctatcggaaagagctagaaaaaaacagaagccatgttctccagcagactcagaggcttgatacctcccaaaaacggattttggaactggaatctcacctggccaagaaagaccaccttcttttggaacagaagaaatatctagaggatgtcaaactccaggcaagaggacagctgcaggccgcagagagcaggtatgaggctcagaaaaggataacccaggtgtttgaattggagatcttagatttatatggcaggttggagaaagatggcctcctgaaaaaacttgaagaagaaaaagcagaagcagctgaagcagcagaagaaaggcttgactgttgtaatgacgggtgctcagattccatggtagggcacaatgaagaggcatctggccacaacggtgagaccaagacccccaggcccagcagcgcccggggcagtagtggaagcagaggtggtggaggcagcagcagcagcagcagcgagctttctaccccagagaaacccccacaccagagggcaggcccattcagcagtcggtgggagacgactatgggagaagcgtctgccagcatccccaccactgtgggctcacttcccagttcaaaaagcttcctgggtatgaaggctcgagagttatttcgtaataagagcgagagccagtgtgatgaggacggcatgaccagtagcctttctgagagcctaaagacagaactgggcaaagacttgggtgtggaagccaagattcccctgaacctagatggccctcacccgtctcccccgaccccggacagtgttggacagctacatatcatggactacaatgagactcatcatgaacacagctaaggaatgatggtcaatcagtgttaacttgcatattgttggcacagaacaggaggtgtgaatgcacgtttcaaagctttcctgtttccagggtctgagtgcaagttcatgtgtggaaatgggacggaggtcctttggacagctgactgaatgcagaacggtttttggatctggcattgaaatgcctcttgaccttcccctccacccgccctaaccccctctcatttacctcgcagtgtgttctaatccaagggccagttggtgttcctcagtagctttactttcttcctttcccccccaaatggttgcgtcctttgaacctgtgcaatatgaggccaaatttaatctttgagtctaacacaccactttctgctttcccgaagttcagataactgggttggctctcaattagaccaggtagtttgttgcattgcaggtaagtctggttttgtcccttccaggaggacatagcctgcaaagctggttgtctttacatgaaagcgtttacatgagactttccgactgcttttttgattctgaagttcagcatctaaagcagcaggtctagaagaacaacggtttattcatacttgcattcttttggcagttctgataagcttcctagaaagttctgtgtaaacagaagcctgtttcagaaatctggagctggcactgtggagaccacacaccctttgggaaagctcttgtctcttcttcccccactacctcttatttatttggtgtttgcttgaatgctggtactattgtgaccacaggctggtgtgtaggtggtaaaacctgttctccataggagggaaggagcagtcactgggagaggttacccgagaagcacttgagcatgaggaactgcacctttaggccatctcagcttgctgggccttttgttaaacccttctgtctactggcctccctttgtgtgcatacgcctcttgttcatgtcagcttatatgtgacactgcagcagaaaggctctgaaggtccaaagagtttctgcaaagtgtatgtgaccatcatttcccaggccattagggttgcctcactgtagcaggttctaggctaccagaagaggggcagctttttcataccaattccaactttcaggggctgactctccagggagctgatgtcatcacactctccatgttagtaatggcagagcagtctaaacagagtccgggagaatgctggcaaaggctggctgtgtatacccactaggctgccccacgtgctcccgagagatgacactagtcagaaaattggcagtggcagagaatccaaactcaacaagtgctcctgaaagaaacgctagaagcctaagaactgtggtctggtgttccagctgaggcagggggatttggtaggaaggagccagtgaacttggctttcctgtttctatctttcattaaaaagaatagaaggattcagtcataaagaggtaaaaaactgtcacggtacgaaatcttagtgcccacggaggcctcgagcagagagaatgaaagtcttttttttttttttttttttttagcatggcaataaatattctagcatccctaactaaaggggactagacagttagagactctgtcaccctagctataccagcagaaaacctgttcaggcaggctttctgggtgtgactgattcccagcctgtggcagggcgtggtcccaactactcagcctagcacaggctggcagttggtactgaattgtcagatgtggagtattagtgacaccacacatttaattcagctttgtccaaaggaaagcttaaaacccaatacagtctagtttcctggttccgttttagaaaaggaaaacgtgaacaaacttagaaagggaaggaaatcccatcagtgaatcctgaaactggttttaagtgctttccttctcctcatgcccaagagatctgtgccatagaacaagataccaggcacttaaagccttttcctgaattggaaaggaaaagaggcccaagtgcaaaagaaaaaacattttagaaacggacagcttataaaaataaagggaagaaaggaggcagcatggagagaggcctgtgctagaagctccatggacgtgtctgcacagggtcctcagctcatccatgcggcctgggtgtccttttactcagctttataacaaatgtggctccaagctcaggtgcctttgagttctaggaggctgtgggttttattcaactacggttgggagaatgagacctggagtcatgttgaaggtgcccaacctaaaaatgtaggctttcatgttgcaaagaactccagagtcagtagttaggtttggtttggttttggacatgataaacctgccaagagtcaacaggtcacttgatcatgctgcagtgggtagttctaaggatggaaaggtgacagtattactctcgagaggcaattcagtcctgggcaaaggtattagtacaataagcgttaagggcagagtctaccttgaaaccaattaagcagcttggtattcataaatattgggattggatggcctccatccagaaatcactatgggtgagcatacctgtctcagctgtttggccaatgtgcataacctactcggatccccacctgacactaaccagagtcagcacaggccccgaggagcccgaagtctgctgctgtgcagcatggaattcctttaaaaaggtgcactacagttttagcggggagggggataggaagacgcagagcaaatgagctccggagtccctgcaggtgaataaacacacagatctgcatctgatagaactttgatggattttcaaaaagccgttgacaaggctctgctatacagtctataaaaattgttattatgggattggaagaaacacgtggtcatgaatagaaaaaaaacaaacccaaaggtaggaaggtcaaggtcatttcttagatggagaagttgtgaaagatgtccttggagatgagttttaggaccagcattactaaggcaggtgggcagacagtgacctctctaggtgtgtccacagagtttttcaggagagaaaactgcctgacctttgggactaagctgcggaatcttcttactaagcttgaagagtggagaggcgagaggtgagctactttgtgagccaaagcttatgtgacatggttggggaaacagtccaaactgttctgagaaggtgaactgttacgacccaggacaattagaaaaattcacccaccatgccgcacattactgggtaaaagcagggcagcagggaacaaaactccagactcttgggccgtccccatttgcaacagcacacatagtttctggtatatttgttgggaaagataaaactctagcagttgttgaggggaggatgtataaaatggtcatggggatgaaaggatctctgagaccacagaggctcagactcactgttaagaatagaaaactgggtatgcgtttcatgtagccagcagaactgaagtgtgctgtgacaagccaatgtgaatttctaccaaatagtagagcataccacttgaagaaggaaagaaccgaagagcaaacaaaagttctgcgtaatgagactcaccttttctcgctgaaagcactaagaggtgggaggaggcctgcacaggctggaggagggtttgggcagagcgaagacccggccaggaccttggtgagatggggtgccgcccacctcctgcggatactcttggagagttgttcccccagggggctctgccccacctggagaaggaagctgcctggtgtggagtgactcaaatcagtatacctatctgctgcaccttcactctccagggtacatgctttaaaaccgacccgcaacaagtattggaaaaatgtatccagtctgaagatgtttgtgtatctgtttacatccagagttctgtgacacatgccccccagattgctgcaaagatcccaaggcattgattgcacttgattaagcttttgtctgtaggtgaaagaacaagtttaggtcgaggactggcccctaggctgctgctgtgacccttgtcccatgtggcttgtttgcctgtccgggactcttcgatgtgcccaggggagcgtgttcctgtctcttccatgccgtcctgcagtccttatctgctcgcctgagggaagagtagctgtagctacaagggaagcctgcctggaagagccgagcacctgtgcccatggcttctggtcatgaaacgagttaatgatggcagaggagcttcctccccacttcgcagcgccacattatccatcctctgagataagtaggctggtttaaccattggaatggacctttcagtggaaaccctgagagtctgagaacccccagaccaacccttccctccctttccccacctcttacagtgtttggacaggagggtatggtgctgctctgtgtagcaagtactttggcttatgaaagaggcagccacgcattttgcactaggaagaatcagtaatcacttttcagaagacttctatggaccacaaatatattacggaggaacagattttgctaagacataatctagttttataactcaatcatgaatgaaccatgtgtggcaaacttgcagtttaaaggggtcccatcagtgaaagaaactgattttttttaacggactgcttttagttaaattgaagaaagtcagctcttgtcaaaaggtctaaactttcccgcctcaatcctaaaagcatgtcaacaatccacatcagatgccataaatatgaactgcaggataaaatggtacaatcttagtgaatgggaattggaatcaaaagagtttgctgtccttcttagaatgttctaaaatgtcaaggcagttgcttgtgtttaactgtgaacaaataaaaatttattgttttgcact

SEQ ID NO: 4321 - DNA, 1383 bp, Homo sapiens
  source 1..1383: mol_type = genomic DNA
cagcacctcttggacaggattaacgaatatgtgggcaaagccgccactcgtttatccatcctctcgttactgggtcatgtcataagactgcagccatcttggaagcataagctctctcaagcacctcttttgccttctttactaaaatgtctcaagatggacactgacgtcgttgtcctcacaacaggcgtcttggtgttgataaccatgctaccaatgattccacagtctgggaaacagcatcttcttgatttctttgacatttttggccgtctgtcatcatggtgcctgaagaaaccaggccacgtggcggaagtctatctcgtccatctccatgccagtgtgtacgcactctttcatcgcctttatggaatgtacccttgcaacttcgtctcctttttgcgttctcattacagtatgaaagaaaacctggagacttttgaagaagtggtcaagccaatgatggagcatgtgcgaattcatccggaattagtgactggatccaaggaccatgaactggaccctcgaaggtggaagagattagaaactcatgatgttgtgatcgagtgtgccaaaatctctctggatcccacagaagcctcatatgaagatggctattctgtgtctcaccaaatctcagcccgctttcctcatcgttcagccgatgtcaccaccagcccttatgctgacacacagaatagctatgggtgtgctacttctaccccttactccacgtctcggctgatgttgttaaatatgccagggcatctggccacaacggtgagaccaagacccccaggcccagcagcgcccggggcagtagtggaagcagaggtggtggaggcagcagcagcagcagcagcgagctttctaccccagagaaacccccacaccagagggcaggcccattcagcagtcggtgggagacgactatgggagaagcgtctgccagcatccccaccactgtgggctcacttcccagttcaaaaagcttcctgggtatgaaggctcgagagttatttcgtaataagagcgagagccagtgtgatgaggacggcatgaccagtagcctttctgagagcctaaagacagaactgggcaaagacttgggtgtggaagccaagattcccctgaacctagatggccctcacccgtctcccccgaccccggacagtgttggacagctacatatcatggactacaatgagactcatcatgaacacagctaaggaatgatggtcaatcagtgttaacttgcatattgttggcacagaacaggaggtgtgaatgcacgtttcaaagctttcctgtttccagggtctgagtgcaagttcatgtgtggaaatgggacggaggtcctttggacagctgactgaatgcaga

SEQ ID NO: 4322 - DNA, 8310 bp, Homo sapiens
  source 1..8310: mol_type = genomic DNA
cagtttggtagtggccccaatgaagaaccttcagaacctgtagcacacgtcctggagccagcacagcgccttcgagcgagagaatggcccaacaagcaaatgtcggggagcttcttgccatgctggactcccccatgctgggtgtgcgggacgacgtgacagctgtctttaaagagaacctcaattctgaccgtggccctatgcttgtaaacaccttggtggattattacctggaaaccagctctcagccggcattgcacatcctgaccaccttgcaagagccacatgacaagatggacactgacgtcgttgtcctcacaacaggcgtcttggtgttgataaccatgctaccaatgattccacagtctgggaaacagcatcttcttgatttctttgacatttttggccgtctgtcatcatggtgcctgaagaaaccaggccacgtggcggaagtctatctcgtccatctccatgccagtgtgtacgcactctttcatcgcctttatggaatgtacccttgcaacttcgtctcctttttgcgttctcattacagtatgaaagaaaacctggagacttttgaagaagtggtcaagccaatgatggagcatgtgcgaattcatccggaattagtgactggatccaaggaccatgaactggaccctcgaaggtggaagagattagaaactcatgatgttgtgatcgagtgtgccaaaatctctctggatcccacagaagcctcatatgaagatggctattctgtgtctcaccaaatctcagcccgctttcctcatcgttcagccgatgtcaccaccagcccttatgctgacacacagaatagctatgggtgtgctacttctaccccttactccacgtctcggctgatgttgttaaatatgccagggcagctacctcagactctgagttccccatcgacacggctgataactgaaccaccacaagctactctttggagcccatctatggtttgtggtatgaccactcctccaacttctcctggaaatgtcccacctgatctgtcacacccttacagtaaagtctttggtacaactgcaggtggaaaaggaactcctctgggaaccccagcaacctctcctcctccagccccactctgtcattcggatgactacgtgcacatttcactcccccaggccacagtcacaccccccaggaaggaagagagaatggattctgcaagaccatgtctacacagacaacaccatcttctgaatgacagaggatcagaagagccacctggcagcaaaggttctgtcactctaagtgatcttccagggtttttaggtgatctggcctctgaagaagatagtattgaaaaagataaagaagaagctgcaatatctagagaactttctgagatcaccacagcagaggcagagcctgtggttcctcgaggaggctttgactctcccttttaccgagacagtctcccaggttctcagcggaagacccactcggcagcctccagttctcagggcgccagcgtgaaccctgagcctttacactcctccctggacaagcttgggcctgacacaccaaagcaagcctttactcccatagacctgccctgcggcagtgctgatgaaagccctgcgggagacagggaatgccagacttctttggagaccagtatcttcactcccagtccttgtaaaattccacctccgacgagagtgggctttggaagcgggcagcctcccccgtatgatcatctttttgaggtggcattgccaaagacagcccatcattttgtcatcaggaagactgaggagctgttaaagaaagcaaaaggaaacacagaggaagatggtgtgccctctacctccccaatggaagtgctggacagactgatacagcagggagcagacgcgcacagcaaggagctgaacaagttgcctttacccagcaagtctgtcgactggacccactttggaggctctcctccttcagatgagatccgcaccctccgagaccagttgcttttactgcacaaccagttactctatgagcgttttaagaggcagcagcatgccctccggaacaggcggctcctccgcaaggtgatcaaagcagcagctctggaggaacataatgctgccatgaaagatcagttgaagttacaagagaaggacatccagatgtggaaggttagtctgcagaaagaacaagctagatacaatcagctccaggagcagcgtgacactatggtaaccaagctccacagccagatcagacagctgcagcatgaccgagaggaattctacaaccagagccaggaattacagacgaagctggaggactgcaggaacatgattgcggagctgcggatagaactgaagaaggccaacaacaaggtgtgtcacactgagctgctgctcagtcaggtttcccaaaagctctcaaacagtgagtcggtccagcagcagatggagttcttgaacaggcagctgttggttcttggggaggtcaacgagctctatttggaacaactgcagaacaagcactcagataccacaaaggaagtagaaatgatgaaagccgcctatcggaaagagctagaaaaaaacagaagccatgttctccagcagactcagaggcttgatacctcccaaaaacggattttggaactggaatctcacctggccaagaaagaccaccttcttttggaacagaagaaatatctagaggatgtcaaactccaggcaagaggacagctgcaggccgcagagagcaggtatgaggctcagaaaaggataacccaggtgtttgaattggagatcttagatttatatggcaggttggagaaagatggcctcctgaaaaaacttgaagaagaaaaagcagaagcagctgaagcagcagaagaaaggcttgactgttgtaatgacgggtgctcagattccatggtagggcacaatgaagaggcatctggccacaacggtgagaccaagacccccaggcccagcagcgcccggggcagtagtggaagcagaggtggtggaggcagcagcagcagcagcagcgagctttctaccccagagaaacccccacaccagagggcaggcccattcagcagtcggtgggagacgactatgggagaagcgtctgccagcatccccaccactgtgggctcacttcccagttcaaaaagcttcctgggtatgaaggctcgagagttatttcgtaataagagcgagagccagtgtgatgaggacggcatgaccagtagcctttctgagagcctaaagacagaactgggcaaagacttgggtgtggaagccaagattcccctgaacctagatggccctcacccgtctcccccgaccccggacagtgttggacagctacatatcatggactacaatgagactcatcatgaacacagctaaggaatgatggtcaatcagtgttaacttgcatattgttggcacagaacaggaggtgtgaatgcacgtttcaaagctttcctgtttccagggtctgagtgcaagttcatgtgtggaaatgggacggaggtcctttggacagctgactgaatgcagaacggtttttggatctggcattgaaatgcctcttgaccttcccctccacccgccctaaccccctctcatttacctcgcagtgtgttctaatccaagggccagttggtgttcctcagtagctttactttcttcctttcccccccaaatggttgcgtcctttgaacctgtgcaatatgaggccaaatttaatctttgagtctaacacaccactttctgctttcccgaagttcagataactgggttggctctcaattagaccaggtagtttgttgcattgcaggtaagtctggttttgtcccttccaggaggacatagcctgcaaagctggttgtctttacatgaaagcgtttacatgagactttccgactgcttttttgattctgaagttcagcatctaaagcagcaggtctagaagaacaacggtttattcatacttgcattcttttggcagttctgataagcttcctagaaagttctgtgtaaacagaagcctgtttcagaaatctggagctggcactgtggagaccacacaccctttgggaaagctcttgtctcttcttcccccactacctcttatttatttggtgtttgcttgaatgctggtactattgtgaccacaggctggtgtgtaggtggtaaaacctgttctccataggagggaaggagcagtcactgggagaggttacccgagaagcacttgagcatgaggaactgcacctttaggccatctcagcttgctgggccttttgttaaacccttctgtctactggcctccctttgtgtgcatacgcctcttgttcatgtcagcttatatgtgacactgcagcagaaaggctctgaaggtccaaagagtttctgcaaagtgtatgtgaccatcatttcccaggccattagggttgcctcactgtagcaggttctaggctaccagaagaggggcagctttttcataccaattccaactttcaggggctgactctccagggagctgatgtcatcacactctccatgttagtaatggcagagcagtctaaacagagtccgggagaatgctggcaaaggctggctgtgtatacccactaggctgccccacgtgctcccgagagatgacactagtcagaaaattggcagtggcagagaatccaaactcaacaagtgctcctgaaagaaacgctagaagcctaagaactgtggtctggtgttccagctgaggcagggggatttggtaggaaggagccagtgaacttggctttcctgtttctatctttcattaaaaagaatagaaggattcagtcataaagaggtaaaaaactgtcacggtacgaaatcttagtgcccacggaggcctcgagcagagagaatgaaagtcttttttttttttttttttttttagcatggcaataaatattctagcatccctaactaaaggggactagacagttagagactctgtcaccctagctataccagcagaaaacctgttcaggcaggctttctgggtgtgactgattcccagcctgtggcagggcgtggtcccaactactcagcctagcacaggctggcagttggtactgaattgtcagatgtggagtattagtgacaccacacatttaattcagctttgtccaaaggaaagcttaaaacccaatacagtctagtttcctggttccgttttagaaaaggaaaacgtgaacaaacttagaaagggaaggaaatcccatcagtgaatcctgaaactggttttaagtgctttccttctcctcatgcccaagagatctgtgccatagaacaagataccaggcacttaaagccttttcctgaattggaaaggaaaagaggcccaagtgcaaaagaaaaaacattttagaaacggacagcttataaaaataaagggaagaaaggaggcagcatggagagaggcctgtgctagaagctccatggacgtgtctgcacagggtcctcagctcatccatgcggcctgggtgtccttttactcagctttataacaaatgtggctccaagctcaggtgcctttgagttctaggaggctgtgggttttattcaactacggttgggagaatgagacctggagtcatgttgaaggtgcccaacctaaaaatgtaggctttcatgttgcaaagaactccagagtcagtagttaggtttggtttggttttggacatgataaacctgccaagagtcaacaggtcacttgatcatgctgcagtgggtagttctaaggatggaaaggtgacagtattactctcgagaggcaattcagtcctgggcaaaggtattagtacaataagcgttaagggcagagtctaccttgaaaccaattaagcagcttggtattcataaatattgggattggatggcctccatccagaaatcactatgggtgagcatacctgtctcagctgtttggccaatgtgcataacctactcggatccccacctgacactaaccagagtcagcacaggccccgaggagcccgaagtctgctgctgtgcagcatggaattcctttaaaaaggtgcactacagttttagcggggagggggataggaagacgcagagcaaatgagctccggagtccctgcaggtgaataaacacacagatctgcatctgatagaactttgatggattttcaaaaagccgttgacaaggctctgctatacagtctataaaaattgttattatgggattggaagaaacacgtggtcatgaatagaaaaaaaacaaacccaaaggtaggaaggtcaaggtcatttcttagatggagaagttgtgaaagatgtccttggagatgagttttaggaccagcattactaaggcaggtgggcagacagtgacctctctaggtgtgtccacagagtttttcaggagagaaaactgcctgacctttgggactaagctgcggaatcttcttactaagcttgaagagtggagaggcgagaggtgagctactttgtgagccaaagcttatgtgacatggttggggaaacagtccaaactgttctgagaaggtgaactgttacgacccaggacaattagaaaaattcacccaccatgccgcacattactgggtaaaagcagggcagcagggaacaaaactccagactcttgggccgtccccatttgcaacagcacacatagtttctggtatatttgttgggaaagataaaactctagcagttgttgaggggaggatgtataaaatggtcatggggatgaaaggatctctgagaccacagaggctcagactcactgttaagaatagaaaactgggtatgcgtttcatgtagccagcagaactgaagtgtgctgtgacaagccaatgtgaatttctaccaaatagtagagcataccacttgaagaaggaaagaaccgaagagcaaacaaaagttctgcgtaatgagactcaccttttctcgctgaaagcactaagaggtgggaggaggcctgcacaggctggaggagggtttgggcagagcgaagacccggccaggaccttggtgagatggggtgccgcccacctcctgcggatactcttggagagttgttcccccagggggctctgccccacctggagaaggaagctgcctggtgtggagtgactcaaatcagtatacctatctgctgcaccttcactctccagggtacatgctttaaaaccgacccgcaacaagtattggaaaaatgtatccagtctgaagatgtttgtgtatctgtttacatccagagttctgtgacacatgccccccagattgctgcaaagatcccaaggcattgattgcacttgattaagcttttgtctgtaggtgaaagaacaagtttaggtcgaggactggcccctaggctgctgctgtgacccttgtcccatgtggcttgtttgcctgtccgggactcttcgatgtgcccaggggagcgtgttcctgtctcttccatgccgtcctgcagtccttatctgctcgcctgagggaagagtagctgtagctacaagggaagcctgcctggaagagccgagcacctgtgcccatggcttctggtcatgaaacgagttaatgatggcagaggagcttcctccccacttcgcagcgccacattatccatcctctgagataagtaggctggtttaaccattggaatggacctttcagtggaaaccctgagagtctgagaacccccagaccaacccttccctccctttccccacctcttacagtgtttggacaggagggtatggtgctgctctgtgtagcaagtactttggcttatgaaagaggcagccacgcattttgcactaggaagaatcagtaatcacttttcagaagacttctatggaccacaaatatattacggaggaacagattttgctaagacataatctagttttataactcaatcatgaatgaaccatgtgtggcaaacttgcagtttaaaggggtcccatcagtgaaagaaactgattttttttaacggactgcttttagttaaattgaagaaagtcagctcttgtcaaaaggtctaaactttcccgcctcaatcctaaaagcatgtcaacaatccacatcagatgccataaatatgaactgcaggataaaatggtacaatcttagtgaatgggaattggaatcaaaagagtttgctgtccttcttagaatgttctaaaatgtcaaggcagttgcttgtgtttaactgtgaacaaataaaaatttattgttttgcact

SEQ ID NO: 4323 - DNA, 6156 bp, Homo sapiens
  source 1..6156: mol_type = genomic DNA
cgttttcttgcttggggcgaaagggggcagcggagcggagcgcccgaaacccagcccctgcggaccgcaatctttgggaaaaaggcgcaaggtgggaacgcagggccgcacgtgggaaccgttcgcggctgccgggtttgcagcccctgcccgcgcagctgggagccgcaggaggcggcccgggactccagcctgcagcccctatcccgcctcctcccacgctccagccacggcgcggcgctacctgctgcagcctctcttctccggagaggcccgggctcctccctacacccccgcggcccagccccgggtcccaggctccggctccgggtcagcatcctcgcgctcaaggcggtcatgccggactcctgcggactacacatcccggcggcccatgcggccccgtcacgtgatgcaaggatcgccggcctttccgccagagggcggcacagaactacaactcccagcaagctcccaaggcggccctccgcgcaatgccgctaccggaagtgcgggtcgcgcttccggcggcgtcccggggccaggggggtgcgcctttctccgcgtcggggcggcccggagcgcggtggcgcggcgcgggaggggttttctggtgcgtcctggtccaccatggccaaaccaacaagcaaagattcaggcttgaaggagaagtttaagattctgttgggactgggaacaccgaggccaaatcccaggtctgcagagggtaaacagacggagtttatcatcaccgcggaaatactgagagaactgagcatggaatgtggcctcaacaatcgcatccggatgatagggcagatttgtgaagtcgcaaaaaccaagaaatttgaagagcacgcagtggaagcactctggaaggcggtcgcggatctgttgcagccggagcggccgctggaggcccggcacgcggtgctggctctgctgaaggccatcgtgcaggggcagggcgagcgtttgggggtcctcagagccctcttctttaaggtcatcaaggattacccttccaacgaagaccttcacgaaaggctggaggttttcaaggccctcacagacaatgggagacacatcacctacttggaggaagagctggctgactttgtcctgcagtggatggatgttggcttgtcctcggaattccttctggtgctggtgaacttggtcaaattcaatagctgttacctcgacgagtacatcgcaaggatggttcagatgatctgtctgctgtgcgtccggaccgcgtcctctgtggacatagaggtctccctgcaggtgctggacgccgtggtctgctacaactgcctgccggctgagagcctcccgctgttcatcgttaccctctgtcgcaccatcaacgtcaaggagctctgcgagccttgctggaagctgatgcggaacctccttggcacccacctgggccacagcgccatctacaacatgtgccacctcatggaggacagagcctacatggaggacgcgcccctgctgagaggagccgtgttttttgtgggcatggctctctggggagcccaccggctctattctctcaggaactcgccgacatctgtgttgccatcattttaccaggccatggcatgtccgaacgaggtggtgtcctatgagatcgtcctgtccatcaccaggctcatcaagaagtataggaaggagctccaggtggtggcgtgggacattctgctgaacatcatcgaacggctccttcagcagctccagaccttggacagcccggagctcaggaccatcgtccatgacctgttgaccacggtggaggagctgtgtgaccagaacgagttccacgggtctcaggagagatactttgaactggtggagagatgtgcggaccagaggcctgagtcctccctcctgaacctgatctcctatagagcgcagtccatccacccggccaaggacggctggattcagaacctgcaggcgctgatggagagattcttcaggagcgagtcccgaggcgccgtgcgcatcaaggtgctggacgtgctgtcctttgtgctgctcatcaacaggcagttctatgaggaggagctgattaactcagtggtcatctcgcagctctcccacatccccgaggataaagaccaccaggtccgaaagctggccacccagttgctggtggacctggcagagggctgccacacacaccacttcaacagcctgctggacatcatcgagaaggtgatggcccgctccctctccccacccccggagctggaagaaagggatgtggccgcatactcggcctccttggaggatgtgaagacagccgtcctggggcttctggtcatccttcagaccaagctgtacaccctgcctgcaagccacgccacgcgtgtgtatgagatgctggtcagccacattcagctccactacaagcacagctacaccctgccaatcgcgagcagcatccggctgcaggcctttgacttcctgttgctgctgcgggccgactcactgcaccgcctgggcctgcccaacaaggatggagtcgtgcggttcagcccctactgcgtctgcgactacatggagccagagagaggctctgagaagaagaccagcggccccctttctcctcccacagggcctcctggcccggcgcctgcaggccccgccgtgcggctggggtccgtgccctactccctgctcttccgcgtcctgctgcagtgcttgaagcaggagtctgactggaaggtgctgaagctggttctgggcaggctgcctgagtccctgcgctataaagtgctcatctttacttccccttgcagtgtggaccagctgtgctctgctctctgctccatgctttcaggcccaaagacactggagcggctccgaggcgccccagaaggcttctccagaactgacttgcacctggccgtggttccagtgctgacagcattaatctcttaccataactacctggacaaaaccaaacagcgcgagatggtctactgcctggagcagggcctcatccaccgctgtgccagccagtgcgtcgtggccttgtccatctgcagcgtggagatgcctgacatcatcatcaaggcgctgcctgttctggtggtgaagctcacgcacatctcagccacagccagcatggccgtcccactgctggagttcctgtccactctggccaggctgccgcacctctacaggaactttgccgcggagcagtatgccagtgtgttcgccatctccctgccgtacaccaacccctccaagtttaatcagtacatcgtgtgtctggcccatcacgtcatagccatgtggttcatcaggtgccgcctgcccttccggaaggattttgtccctttcatcactaagggcctgcggtccaatgtcctcttgtcttttgatgacacccccgagaaggacagcttcagggcccggagtactagtctcaacgagagacccaagagtctgaggatagccagaccccccaaacaaggcttgaataactctccacccgtgaaagaattcaaggagagctctgcagccgaggccttccggtgccgcagcatcagtgtgtctgaacatgtggtccgcagcaggatacagacgtccctcaccagtgccagcttggggtctgcagatgagaactccgtggcccaggctgacgatagcctgaaaaacctccacctggagctcacggaaacctgtctggacatgatggctcgatacgtcttctccaacttcacggctgtcccgaagaggtctcctgtgggcgagttcctcctagcgggtggcaggaccaaaacctggctggttgggaacaagcttgtcactgtgacgacaagcgtgggaaccgggacccggtcgttactaggcctggactcgggggagctgcagtccggcccggagtcgagctccagccccggggtgcatgtgagacagaccaaggaggcgccggccaagctggagtcccaggctgggcagcaggtgtcccgtggggcccgggatcgggtccgttccatgtcggggggccatggtcttcgagttggcgccctggacgtgccggcctcccagttcctgggcagtgccacttctccaggaccacggactgcaccagccgcgaaacctgagaaggcctcagctggcacccgggttcctgtgcaggagaagacgaacctggcggcctatgtgcccctgctgacccagggctgggcggagatcctggtccggaggcccacagggaacaccagctggctgatgagcctggagaacccgctcagccctttctcctcggacatcaacaacatgcccctgcaggagctgtctaacgccctcatggcggctgagcgcttcaaggagcaccgggacacagccctgtacaagtcactgtcggtgccggcagccagcacggccaaaccccctcctctgcctcgctccaacacagtggcctctttctcctccctgtaccagtccagctgccaaggacagctgcacaggagcgtttcctgggcagactccgccgtggtcatggaggagggaagtccgggcgaggttcctgtgctggtggagcccccagggttggaggacgttgaggcagcgctaggcatggacaggcgcacggatgcctacagcaggtcgtcctcagtctccagccaggaggagaagtcgctccacgcggaggagctggttggcaggggcatccccatcgagcgagtcgtctcctcggagggtggccggccctctgtggacctctccttccagccctcgcagcccctgagcaagtccagctcctctcccgagctgcagactctgcaggacatcctcggggaccctggggacaaggccgacgtgggccggctgagccctgaggttaaggcccggtcacagtcagggaccctggacggggaaagtgctgcctggtcggcctcgggcgaagacagtcggggccagcccgagggtcccttgccttccagctccccccgctcgcccagtggcctccggccccgaggttacaccatctccgactcggccccatcacgcaggggcaagagagtagagagggacgccttaaagagcagagccacagcctccaatgcagagaaagtgccaggcatcaaccccagtttcgtgttcctgcagctctaccattcccccttctttggcgacgagtcaaacaagccaatcctgctgcccaatgagtcacagtcctttgagcggtcggtgcagctcctcgaccagatcccatcatacgacacccacaagatcgccgtcctgtatgttggagaaggccagagcaacagcgagctcgccatcctgtccaatgagcatggctcctacaggtacacggagttcctgacgggcctgggccggctcatcgagctgaaggactgccagccggacaaggtgtacctgggaggcctggacgtgtgtggtgaggacggccagttcacctactgctggcacgatgacatcatgcaagccgtcttccacatcgccaccctgatgcccaccaaggacgtggacaagcaccgctgcgacaagaagcgccacctgggcaacgactttgtgtccattgtctacaatgactccggtgaggacttcaagcttggcaccatcaagggccagttcaactttgtccacgtgatcgtcaccccgctggactacgagtgcaacctggtgtccctgcagtgcaggaaagacatggagggccttgtggacaccagcgtggccaagatcgtgtctgaccgcaacctgcccttcgtggcccgccagatggccctgcacgcaaatatggcctcacaggtgcatcatagccgctccaaccccaccgatatctacccctccaagtggattgcccggctccgccacatcaagcggctccgccagcggatctgcgaggaagccgcctactccaaccccagcctacctctggtgcaccctccgtcccatagcaaagcccctgcacagactccagccgagcccacacctggctatgaggtgggccagcggaagcgcctcatctcctcggtggaggacttcaccgagtttgtgtgaggccggggccctccctcctgcactggccttggacggtattgcctgtcagtgaaataaataaagtcctgaccccagtgcacagacatagaggcacagattgca

SEQ ID NO: 4324 - DNA, 5532 bp, Homo sapiens
  source 1..5532: mol_type = genomic DNA
ctttctccgcgtcggggcggcccggagcgcggtggcgcggcgcgggaggggttttctggtgcgtcctggtccaccatggccaaaccaacaagcaaagattcaggcttgaaggagaagtttaagattctgttgggactgggaacaccgaggccaaatcccaggtctgcagagggtaaacagacggagtttatcatcaccgcggaaatactgagagaactgagcatggaatgtggcctcaacaatcgcatccggatgatagggcagatttgtgaagtcgcaaaaaccaagaaatttgaagagcacgcagtggaagcactctggaaggcggtcgcggatctgttgcagccggagcggccgctggaggcccggcacgcggtgctggctctgctgaaggccatcgtgcaggggcagggcgagcgtttgggggtcctcagagccctcttctttaaggtcatcaaggattacccttccaacgaagaccttcacgaaaggctggaggttttcaaggccctcacagacaatgggagacacatcacctacttggaggaagagctggctgactttgtcctgcagtggatggatgttggcttgtcctcggaattccttctggtgctggtgaacttggtcaaattcaatagctgttacctcgacgagtacatcgcaaggatggttcagatgatctgtctgctgtgcgtccggaccgcgtcctctgtggacatagaggtctccctgcaggtgctggacgccgtggtctgctacaactgcctgccggctgagagcctcccgctgttcatcgttaccctctgtcgcaccatcaacgtcaaggagctctgcgagccttgctggaagctgatgcggaacctccttggcacccacctgggccacagcgccatctacaacatgtgccacctcatggaggacagagcctacatggaggacgcgcccctgctgagaggagccgtgttttttgtgggcatggctctctggggagcccaccggctctattctctcaggaactcgccgacatctgtgttgccatcattttaccaggccatggcatgtccgaacgaggtggtgtcctatgagatcgtcctgtccatcaccaggctcatcaagaagtataggaaggagctccaggtggtggcgtgggacattctgctgaacatcatcgaacggctccttcagcagctccagaccttggacagcccggagctcaggaccatcgtccatgacctgttgaccacggtggaggagctgtgtgaccagaacgagttccacgggtctcaggagagatactttgaactggtggagagatgtgcggaccagaggcctgagtcctccctcctgaacctgatctcctatagagcgcagtccatccacccggccaaggacggctggattcagaacctgcaggcgctgatggagagattcttcaggagcgagtcccgaggcgccgtgcgcatcaaggtgctggacgtgctgtcctttgtgctgctcatcaacaggcagttctatgaggaggagctgattaactcagtggtcatctcgcagctctcccacatccccgaggataaagaccaccaggtccgaaagctggccacccagttgctggtggacctggcagagggctgccacacacaccacttcaacagcctgctggacatcatcgagaaggtgatggcccgctccctctccccacccccggagctggaagaaagggatgtggccgcatactcggcctccttggaggatgtgaagacagccgtcctggggcttctggtcatccttcagaccaagctgtacaccctgcctgcaagccacgccacgcgtgtgtatgagatgctggtcagccacattcagctccactacaagcacagctacaccctgccaatcgcgagcagcatccggctgcaggcctttgacttcctgttgctgctgcgggccgactcactgcaccgcctgggcctgcccaacaaggatggagtcgtgcggttcagcccctactgcgtctgcgactacatggagccagagagaggctctgagaagaagaccagcggccccctttctcctcccacagggcctcctggcccggcgcctgcaggccccgccgtgcggctggggtccgtgccctactccctgctcttccgcgtcctgctgcagtgcttgaagcaggagtctgactggaaggtgctgaagctggttctgggcaggctgcctgagtccctgcgctataaagtgctcatctttacttccccttgcagtgtggaccagctgtgctctgctctctgctccatgctttcaggcccaaagacactggagcggctccgaggcgccccagaaggcttctccagaactgacttgcacctggccgtggttccagtgctgacagcattaatctcttaccataactacctggacaaaaccaaacagcgcgagatggtctactgcctggagcagggcctcatccaccgctgtgccagccagtgcgtcgtggccttgtccatctgcagcgtggagatgcctgacatcatcatcaaggcgctgcctgttctggtggtgaagctcacgcacatctcagccacagccagcatggccgtcccactgctggagttcctgtccactctggccaggctgccgcacctctacaggaactttgccgcggagcagtatgccagtgtgttcgccatctccctgccgtacaccaacccctccaagtttaatcagtacatcgtgtgtctggcccatcacgtcatagccatgtggttcatcaggtgccgcctgcccttccggaaggattttgtccctttcatcactaagggcctgcggtccaatgtcctcttgtcttttgatgacacccccgagaaggacagcttcagggcccggagtactagtctcaacgagagacccaagagtctgaggatagccagaccccccaaacaaggcttgaataactctccacccgtgaaagaattcaaggagagctctgcagccgaggccttccggtgccgcagcatcagtgtgtctgaacatgtggtccgcagcaggatacagacgtccctcaccagtgccagcttggggtctgcagatgagaactccgtggcccaggctgacgatagcctgaaaaacctccacctggagctcacggaaacctgtctggacatgatggctcgatacgtcttctccaacttcacggctgtcccgaagaggtctcctgtgggcgagttcctcctagcgggtggcaggaccaaaacctggctggttgggaacaagcttgtcactgtgacgacaagcgtgggaaccgggacccggtcgttactaggcctggactcgggggagctgcagtccggcccggagtcgagctccagccccggggtgcatgtgagacagaccaaggaggcgccggccaagctggagtcccaggctgggcagcaggtgtcccgtggggcccgggatcgggtccgttccatgtcggggggccatggtcttcgagttggcgccctggacgtgccggcctcccagttcctgggcagtgccacttctccaggaccacggactgcaccagccgcgaaacctgagaaggcctcagctggcacccgggttcctgtgcaggagaagacgaacctggcggcctatgtgcccctgctgacccagggctgggcggagatcctggtccggaggcccacagggaacaccagctggctgatgagcctggagaacccgctcagccctttctcctcggacatcaacaacatgcccctgcaggagctgtctaacgccctcatggcggctgagcgcttcaaggagcaccgggacacagccctgtacaagtcactgtcggtgccggcagccagcacggccaaaccccctcctctgcctcgctccaacacagactccgccgtggtcatggaggagggaagtccgggcgaggttcctgtgctggtggagcccccagggttggaggacgttgaggcagcgctaggcatggacaggcgcacggatgcctacagcaggtcgtcctcagtctccagccaggaggagaagtcgctccacgcggaggagctggttggcaggggcatccccatcgagcgagtcgtctcctcggagggtggccggccctctgtggacctctccttccagccctcgcagcccctgagcaagtccagctcctctcccgagctgcagactctgcaggacatcctcggggaccctggggacaaggccgacgtgggccggctgagccctgaggttaaggcccggtcacagtcagggaccctggacggggaaagtgctgcctggtcggcctcgggcgaagacagtcggggccagcccgagggtcccttgccttccagctccccccgctcgcccagtggcctccggccccgaggttacaccatctccgactcggccccatcacgcaggggcaagagagtagagagggacgccttaaagagcagagccacagcctccaatgcagagaaagtgccaggcatcaaccccagtttcgtgttcctgcagctctaccattcccccttctttggcgacgagtcaaacaagccaatcctgctgcccaatgagtcacagtcctttgagcggtcggtgcagctcctcgaccagatcccatcatacgacacccacaagatcgccgtcctgtatgttggagaaggccagagcaacagcgagctcgccatcctgtccaatgagcatggctcctacaggtacacggagttcctgacgggcctgggccggctcatcgagctgaaggactgccagccggacaaggtgtacctgggaggcctggacgtgtgtggtgaggacggccagttcacctactgctggcacgatgacatcatgcaagccgtcttccacatcgccaccctgatgcccaccaaggacgtggacaagcaccgctgcgacaagaagcgccacctgggcaacgactttgtgtccattgtctacaatgactccggtgaggacttcaagcttggcaccatcaagggccagttcaactttgtccacgtgatcgtcaccccgctggactacgagtgcaacctggtgtccctgcagtgcaggaaagacatggagggccttgtggacaccagcgtggccaagatcgtgtctgaccgcaacctgcccttcgtggcccgccagatggccctgcacgcaaatatggcctcacaggtgcatcatagccgctccaaccccaccgatatctacccctccaagtggattgcccggctccgccacatcaagcggctccgccagcggatctgcgaggaagccgcctactccaaccccagcctacctctggtgcaccctccgtcccatagcaaagcccctgcacagactccagccgagcccacacctggctatgaggtgggccagcggaagcgcctcatctcctcggtggaggacttcaccgagtttgtgtgaggccggggccctccctcctgcactggccttggacggtattgcctgtcagtgaaataaataaagtcctgaccccagtgcacagacatagaggcacagattgca

SEQ ID NO: 4325 - DNA, 5502 bp, Homo sapiens
  source 1..5502: mol_type = genomic DNA
ccggcggcgtcccggggccaggggggtgcgcctttctccgcgtcggggcggcccggagcgcggtggcgcggcgcgggaggggttttctggtgcgtcctggtccaccatggccaaaccaacaagcaaagattcaggcttgaaggagaagtttaagattctgttgggactgggaacaccgaggccaaatcccaggtctgcagagggtaaacagacggagtttatcatcaccgcggaaatactgagagaactgagcatggaatgtggcctcaacaatcgcatccggatgatagggcagatttgtgaagtcgcaaaaaccaagaaatttgaagagcacgcagtggaagcactctggaaggcggtcgcggatctgttgcagccggagcggccgctggaggcccggcacgcggtgctggctctgctgaaggccatcgtgcaggggcagggcgagcgtttgggggtcctcagagccctcttctttaaggtcatcaaggattacccttccaacgaagaccttcacgaaaggctggaggttttcaaggccctcacagacaatgggagacacatcacctacttggaggaagagctggctgactttgtcctgcagtggatggatgttggcttgtcctcggaattccttctggtgctggtgaacttggtcaaattcaatagctgttacctcgacgagtacatcgcaaggatggttcagatgatctgtctgctgtgcgtccggaccgcgtcctctgtggacatagaggtctccctgcaggtgctggacgccgtggtctgctacaactgcctgccggctgagagcctcccgctgttcatcgttaccctctgtcgcaccatcaacgtcaaggagctctgcgagccttgctggaagctgatgcggaacctccttggcacccacctgggccacagcgccatctacaacatgtgccacctcatggaggacagagcctacatggaggacgcgcccctgctgagaggagccgtgttttttgtgggcatggctctctggggagcccaccggctctattctctcaggaactcgccgacatctgtgttgccatcattttaccaggccatggcatgtccgaacgaggtggtgtcctatgagatcgtcctgtccatcaccaggctcatcaagaagtataggaaggagctccaggtggtggcgtgggacattctgctgaacatcatcgaacggctccttcagcagctccagaccttggacagcccggagctcaggaccatcgtccatgacctgttgaccacggtggaggagctgtgtgaccagaacgagttccacgggtctcaggagagatactttgaactggtggagagatgtgcggaccagaggcctgagtcctccctcctgaacctgatctcctatagagcgcagtccatccacccggccaaggacggctggattcagaacctgcaggcgctgatggagagattcttcaggagcgagtcccgaggcgccgtgcgcatcaaggtgctggacgtgctgtcctttgtgctgctcatcaacaggcagttctatgaggaggagctgattaactcagtggtcatctcgcagctctcccacatccccgaggataaagaccaccaggtccgaaagctggccacccagttgctggtggacctggcagagggctgccacacacaccacttcaacagcctgctggacatcatcgagaaggtgatggcccgctccctctccccacccccggagctggaagaaagggatgtggccgcatactcggcctccttggaggatgtgaagacagccgtcctggggcttctggtcatccttcagaccaagctgtacaccctgcctgcaagccacgccacgcgtgtgtatgagatgctggtcagccacattcagctccactacaagcacagctacaccctgccaatcgcgagcagcatccggctgcaggcctttgacttcctgttgctgctgcgggccgactcactgcaccgcctgggcctgcccaacaaggatggagtcgtgcggttcagcccctactgcgtctgcgactacatggagccagagagaggctctgagaagaagaccagcggccccctttctcctcccacagggcctcctggcccggcgcctgcaggccccgccgtgcggctggggtccgtgccctactccctgctcttccgcgtcctgctgcagtgcttgaagcaggagtctgactggaaggtgctgaagctggttctgggcaggctgcctgagtccctgcgctataaagtgctcatctttacttccccttgcagtgtggaccagctgtgctctgctctctgctccatgctttcaggcccaaagacactggagcggctccgaggcgccccagaaggcttctccagaactgacttgcacctggccgtggttccagtgctgacagcattaatctcttaccataactacctggacaaaaccaaacagcgcgagatggtctactgcctggagcagggcctcatccaccgctgtgccagccagtgcgtcgtggccttgtccatctgcagcgtggagatgcctgacatcatcatcaaggcgctgcctgttctggtggtgaagctcacgcacatctcagccacagccagcatggccgtcccactgctggagttcctgtccactctggccaggctgccgcacctctacaggaactttgccgcggagcagtatgccagtgtgttcgccatctccctgccgtacaccaacccctccaagtttaatcagtacatcgtgtgtctggcccatcacgtcatagccatgtggttcatcaggtgccgcctgcccttccggaaggattttgtccctttcatcactaagggcctgcggtccaatgtcctcttgtcttttgatgacacccccgagaaggacagcttcagggcccggagtactagtctcaacgagagacccaagagcaggatacagacgtccctcaccagtgccagcttggggtctgcagatgagaactccgtggcccaggctgacgatagcctgaaaaacctccacctggagctcacggaaacctgtctggacatgatggctcgatacgtcttctccaacttcacggctgtcccgaagaggtctcctgtgggcgagttcctcctagcgggtggcaggaccaaaacctggctggttgggaacaagcttgtcactgtgacgacaagcgtgggaaccgggacccggtcgttactaggcctggactcgggggagctgcagtccggcccggagtcgagctccagccccggggtgcatgtgagacagaccaaggaggcgccggccaagctggagtcccaggctgggcagcaggtgtcccgtggggcccgggatcgggtccgttccatgtcggggggccatggtcttcgagttggcgccctggacgtgccggcctcccagttcctgggcagtgccacttctccaggaccacggactgcaccagccgcgaaacctgagaaggcctcagctggcacccgggttcctgtgcaggagaagacgaacctggcggcctatgtgcccctgctgacccagggctgggcggagatcctggtccggaggcccacagggaacaccagctggctgatgagcctggagaacccgctcagccctttctcctcggacatcaacaacatgcccctgcaggagctgtctaacgccctcatggcggctgagcgcttcaaggagcaccgggacacagccctgtacaagtcactgtcggtgccggcagccagcacggccaaaccccctcctctgcctcgctccaacacagtggcctctttctcctccctgtaccagtccagctgccaaggacagctgcacaggagcgtttcctgggcagactccgccgtggtcatggaggagggaagtccgggcgaggttcctgtgctggtggagcccccagggttggaggacgttgaggcagcgctaggcatggacaggcgcacggatgcctacagcaggtcgtcctcagtctccagccaggaggagaagtcgctccacgcggaggagctggttggcaggggcatccccatcgagcgagtcgtctcctcggagggtggccggccctctgtggacctctccttccagccctcgcagcccctgagcaagtccagctcctctcccgagctgcagactctgcaggacatcctcggggaccctggggacaaggccgacgtgggccggctgagccctgaggttaaggcccggtcacagtcagggaccctggacggggaaagtgctgcctggtcggcctcgggcgaagacagtcggggccagcccgagggtcccttgccttccagctccccccgctcgcccagtggcctccggccccgaggttacaccatctccgactcggccccatcacgcaggggcaagagagtagagagggacgccttaaagagcagagccacagcctccaatgcagagaaagtgccaggcatcaaccccagtttcgtgttcctgcagctctaccattcccccttctttggcgacgagtcaaacaagccaatcctgctgcccaatgagtcacagtcctttgagcggtcggtgcagctcctcgaccagatcccatcatacgacacccacaagatcgccgtcctgtatgttggagaaggccagagcaacagcgagctcgccatcctgtccaatgagcatggctcctacaggtacacggagttcctgacgggcctgggccggctcatcgagctgaaggactgccagccggacaaggtgtacctgggaggcctggacgtgtgtggtgaggacggccagttcacctactgctggcacgatgacatcatgcaagccgtcttccacatcgccaccctgatgcccaccaaggacgtggacaagcaccgctgcgacaagaagcgccacctgggcaacgactttgtgtccattgtctacaatgactccggtgaggacttcaagcttggcaccatcaagggccagttcaactttgtccacgtgatcgtcaccccgctggactacgagtgcaacctggtgtccctgcagtgcaggaaagacatggagggccttgtggacaccagcgtggccaagatcgtgtctgaccgcaacctgcccttcgtggcccgccagatggccctgcacgcaaatatggcctcacaggtgcatcatagccgctccaaccccaccgatatctacccctccaagtggattgcccggctccgccacatcaagcggctccgccagcggatctgcgaggaagccgcctactccaaccccagcctacctctggtgcaccctccgtcccatagcaaagcccctgcacagactccagccgagcccacacctggctatgaggtgggccagcggaagcgcctcatctcctcggtggaggacttcaccgagtttgtgtgaggccggggccctccctcctgcactggccttggacggtattgcctgtcagtgaaataaataaagtcctgaccccagtgcacagacatagaggcacagattgc

SEQ ID NO: 4326 - DNA, 5236 bp, Homo sapiens
  source 1..5236: mol_type = genomic DNA
aggggggtgcgcctttctccgcgtcggggcggcccggagcgcggtggcgcggcgcggggaactgagcatggaatgtggcctcaacaatcgcatccggatgatagggcagatttgtgaagtcgcaaaaaccaagaaatttgaagagcacgcagtggaagcactctggaaggcggtcgcggatctgttgcagccggagcggccgctggaggcccggcacgcggtgctggctctgctgaaggccatcgtgcaggggcagggcgagcgtttgggggtcctcagagccctcttctttaaggtcatcaaggattacccttccaacgaagaccttcacgaaaggctggaggttttcaaggccctcacagacaatgggagacacatcacctacttggaggaagagctggctgactttgtcctgcagtggatggatgttggcttgtcctcggaattccttctggtgctggtgaacttggtcaaattcaatagctgttacctcgacgagtacatcgcaaggatggttcagatgatctgtctgctgtgcgtccggaccgcgtcctctgtggacatagaggtctccctgcaggtgctggacgccgtggtctgctacaactgcctgccggctgagagcctcccgctgttcatcgttaccctctgtcgcaccatcaacgtcaaggagctctgcgagccttgctggaagctgatgcggaacctccttggcacccacctgggccacagcgccatctacaacatgtgccacctcatggaggacagagcctacatggaggacgcgcccctgctgagaggagccgtgttttttgtgggcatggctctctggggagcccaccggctctattctctcaggaactcgccgacatctgtgttgccatcattttaccaggccatggcatgtccgaacgaggtggtgtcctatgagatcgtcctgtccatcaccaggctcatcaagaagtataggaaggagctccaggtggtggcgtgggacattctgctgaacatcatcgaacggctccttcagcagctccagaccttggacagcccggagctcaggaccatcgtccatgacctgttgaccacggtggaggagctgtgtgaccagaacgagttccacgggtctcaggagagatactttgaactggtggagagatgtgcggaccagaggcctgagtcctccctcctgaacctgatctcctatagagcgcagtccatccacccggccaaggacggctggattcagaacctgcaggcgctgatggagagattcttcaggagcgagtcccgaggcgccgtgcgcatcaaggtgctggacgtgctgtcctttgtgctgctcatcaacaggcagttctatgaggaggagctgattaactcagtggtcatctcgcagctctcccacatccccgaggataaagaccaccaggtccgaaagctggccacccagttgctggtggacctggcagagggctgccacacacaccacttcaacagcctgctggacatcatcgagaaggtgatggcccgctccctctccccacccccggagctggaagaaagggatgtggccgcatactcggcctccttggaggatgtgaagacagccgtcctggggcttctggtcatccttcagaccaagctgtacaccctgcctgcaagccacgccacgcgtgtgtatgagatgctggtcagccacattcagctccactacaagcacagctacaccctgccaatcgcgagcagcatccggctgcaggcctttgacttcctgttgctgctgcgggccgactcactgcaccgcctgggcctgcccaacaaggatggagtcgtgcggttcagcccctactgcgtctgcgactacatggagccagagagaggctctgagaagaagaccagcggccccctttctcctcccacagggcctcctggcccggcgcctgcaggccccgccgtgcggctggggtccgtgccctactccctgctcttccgcgtcctgctgcagtgcttgaagcaggagtctgactggaaggtgctgaagctggttctgggcaggctgcctgagtccctgcgctataaagtgctcatctttacttccccttgcagtgtggaccagctgtgctctgctctctgctccatgctttcaggcccaaagacactggagcggctccgaggcgccccagaaggcttctccagaactgacttgcacctggccgtggttccagtgctgacagcattaatctcttaccataactacctggacaaaaccaaacagcgcgagatggtctactgcctggagcagggcctcatccaccgctgtgccagccagtgcgtcgtggccttgtccatctgcagcgtggagatgcctgacatcatcatcaaggcgctgcctgttctggtggtgaagctcacgcacatctcagccacagccagcatggccgtcccactgctggagttcctgtccactctggccaggctgccgcacctctacaggaactttgccgcggagcagtatgccagtgtgttcgccatctccctgccgtacaccaacccctccaagtttaatcagtacatcgtgtgtctggcccatcacgtcatagccatgtggttcatcaggtgccgcctgcccttccggaaggattttgtccctttcatcactaagggcctgcggtccaatgtcctcttgtcttttgatgacacccccgagaaggacagcttcagggcccggagtactagtctcaacgagagacccaagagcaggatacagacgtccctcaccagtgccagcttggggtctgcagatgagaactccgtggcccaggctgacgatagcctgaaaaacctccacctggagctcacggaaacctgtctggacatgatggctcgatacgtcttctccaacttcacggctgtcccgaagaggtctcctgtgggcgagttcctcctagcgggtggcaggaccaaaacctggctggttgggaacaagcttgtcactgtgacgacaagcgtgggaaccgggacccggtcgttactaggcctggactcgggggagctgcagtccggcccggagtcgagctccagccccggggtgcatgtgagacagaccaaggaggcgccggccaagctggagtcccaggctgggcagcaggtgtcccgtggggcccgggatcgggtccgttccatgtcggggggccatggtcttcgagttggcgccctggacgtgccggcctcccagttcctgggcagtgccacttctccaggaccacggactgcaccagccgcgaaacctgagaaggcctcagctggcacccgggttcctgtgcaggagaagacgaacctggcggcctatgtgcccctgctgacccagggctgggcggagatcctggtccggaggcccacagggaacaccagctggctgatgagcctggagaacccgctcagccctttctcctcggacatcaacaacatgcccctgcaggagctgtctaacgccctcatggcggctgagcgcttcaaggagcaccgggacacagccctgtacaagtcactgtcggtgccggcagccagcacggccaaaccccctcctctgcctcgctccaacacagactccgccgtggtcatggaggagggaagtccgggcgaggttcctgtgctggtggagcccccagggttggaggacgttgaggcagcgctaggcatggacaggcgcacggatgcctacagcaggtcgtcctcagtctccagccaggaggagaagtcgctccacgcggaggagctggttggcaggggcatccccatcgagcgagtcgtctcctcggagggtggccggccctctgtggacctctccttccagccctcgcagcccctgagcaagtccagctcctctcccgagctgcagactctgcaggacatcctcggggaccctggggacaaggccgacgtgggccggctgagccctgaggttaaggcccggtcacagtcagggaccctggacggggaaagtgctgcctggtcggcctcgggcgaagacagtcggggccagcccgagggtcccttgccttccagctccccccgctcgcccagtggcctccggccccgaggttacaccatctccgactcggccccatcacgcaggggcaagagagtagagagggacgccttaaagagcagagccacagcctccaatgcagagaaagtgccaggcatcaaccccagtttcgtgttcctgcagctctaccattcccccttctttggcgacgagtcaaacaagccaatcctgctgcccaatgagtcacagtcctttgagcggtcggtgcagctcctcgaccagatcccatcatacgacacccacaagatcgccgtcctgtatgttggagaaggccagagcaacagcgagctcgccatcctgtccaatgagcatggctcctacaggtacacggagttcctgacgggcctgggccggctcatcgagctgaaggactgccagccggacaaggtgtacctgggaggcctggacgtgtgtggtgaggacggccagttcacctactgctggcacgatgacatcatgcaagccgtcttccacatcgccaccctgatgcccaccaaggacgtggacaagcaccgctgcgacaagaagcgccacctgggcaacgactttgtgtccattgtctacaatgactccggtgaggacttcaagcttggcaccatcaagggccagttcaactttgtccacgtgatcgtcaccccgctggactacgagtgcaacctggtgtccctgcagtgcaggaaagacatggagggccttgtggacaccagcgtggccaagatcgtgtctgaccgcaacctgcccttcgtggcccgccagatggccctgcacgcaaatatggcctcacaggtgcatcatagccgctccaaccccaccgatatctacccctccaagtggattgcccggctccgccacatcaagcggctccgccagcggatctgcgaggaagccgcctactccaaccccagcctacctctggtgcaccctccgtcccatagcaaagcccctgcacagactccagccgagcccacacctggctatgaggtgggccagcggaagcgcctcatctcctcggtggaggacttcaccgagtttgtgtgaggccggggccctccctcctgcactggccttggacggtattgcctgtcagtgaaataaataaagtcctgaccccagtgcacagacatagag

SEQ ID NO: 4327 - DNA, 5424 bp, Homo sapiens
  source 1..5424: mol_type = genomic DNA
ccggcggcgtcccggggccaggggggtgcgcctttctccgcgtcggggcggcccggagcgcggtggcgcggcgcgggaggggttttctggtgcgtcctggtccaccatggccaaaccaacaagcaaagattcaggcttgaaggagaagtttaagattctgttgggactgggaacaccgaggccaaatcccaggtctgcagagggtaaacagacggagtttatcatcaccgcggaaatactgagagaactgagcatggaatgtggcctcaacaatcgcatccggatgatagggcagatttgtgaagtcgcaaaaaccaagaaatttgaagagcacgcagtggaagcactctggaaggcggtcgcggatctgttgcagccggagcggccgctggaggcccggcacgcggtgctggctctgctgaaggccatcgtgcaggggcagggcgagcgtttgggggtcctcagagccctcttctttaaggtcatcaaggattacccttccaacgaagaccttcacgaaaggctggaggttttcaaggccctcacagacaatgggagacacatcacctacttggaggaagagctggctgactttgtcctgcagtggatggatgttggcttgtcctcggaattccttctggtgctggtgaacttggtcaaattcaatagctgttacctcgacgagtacatcgcaaggatggttcagatgatctgtctgctgtgcgtccggaccgcgtcctctgtggacatagaggtctccctgcaggtgctggacgccgtggtctgctacaactgcctgccggctgagagcctcccgctgttcatcgttaccctctgtcgcaccatcaacgtcaaggagctctgcgagccttgctggaagctgatgcggaacctccttggcacccacctgggccacagcgccatctacaacatgtgccacctcatggaggacagagcctacatggaggacgcgcccctgctgagaggagccgtgttttttgtgggcatggctctctggggagcccaccggctctattctctcaggaactcgccgacatctgtgttgccatcattttaccaggccatggcatgtccgaacgaggtggtgtcctatgagatcgtcctgtccatcaccaggctcatcaagaagtataggaaggagctccaggtggtggcgtgggacattctgctgaacatcatcgaacggctccttcagcagctccagaccttggacagcccggagctcaggaccatcgtccatgacctgttgaccacggtggaggagctgtgtgaccagaacgagttccacgggtctcaggagagatactttgaactggtggagagatgtgcggaccagaggcctgagtcctccctcctgaacctgatctcctatagagcgcagtccatccacccggccaaggacggctggattcagaacctgcaggcgctgatggagagattcttcaggagcgagtcccgaggcgccgtgcgcatcaaggtgctggacgtgctgtcctttgtgctgctcatcaacaggcagttctatgaggaggagctgattaactcagtggtcatctcgcagctctcccacatccccgaggataaagaccaccaggtccgaaagctggccacccagttgctggtggacctggcagagggctgccacacacaccacttcaacagcctgctggacatcatcgagaaggtgatggcccgctccctctccccacccccggagctggaagaaagggatgtggccgcatactcggcctccttggaggatgtgaagacagccgtcctggggcttctggtcatccttcagaccaagctgtacaccctgcctgcaagccacgccacgcgtgtgtatgagatgctggtcagccacattcagctccactacaagcacagctacaccctgccaatcgcgagcagcatccggctgcaggcctttgacttcctgttgctgctgcgggccgactcactgcaccgcctgggcctgcccaacaaggatggagtcgtgcggttcagcccctactgcgtctgcgactacatggagccagagagaggctctgagaagaagaccagcggccccctttctcctcccacagggcctcctggcccggcgcctgcaggccccgccgtgcggctggggtccgtgccctactccctgctcttccgcgtcctgctgcagtgcttgaagcaggagtctgactggaaggtgctgaagctggttctgggcaggctgcctgagtccctgcgctataaagtgctcatctttacttccccttgcagtgtggaccagctgtgctctgctctctgctccatgctttcaggcccaaagacactggagcggctccgaggcgccccagaaggcttctccagaactgacttgcacctggccgtggttccagtgctgacagcattaatctcttaccataactacctggacaaaaccaaacagcgcgagatggtctactgcctggagcagggcctcatccaccgctgtgccagccagtgcgtcgtggccttgtccatctgcagcgtggagatgcctgacatcatcatcaaggcgctgcctgttctggtggtgaagctcacgcacatctcagccacagccagcatggccgtcccactgctggagttcctgtccactctggccaggctgccgcacctctacaggaactttgccgcggagcagtatgccagtgtgttcgccatctccctgccgtacaccaacccctccaagtttaatcagtacatcgtgtgtctggcccatcacgtcatagccatgtggttcatcaggtgccgcctgcccttccggaaggattttgtccctttcatcactaagggcctgcggtccaatgtcctcttgtcttttgatgacacccccgagaaggacagcttcagggcccggagtactagtctcaacgagagacccaagagcaggatacagacgtccctcaccagtgccagcttggggtctgcagatgagaactccgtggcccaggctgacgatagcctgaaaaacctccacctggagctcacggaaacctgtctggacatgatggctcgatacgtcttctccaacttcacggctgtcccgaagaggtctcctgtgggcgagttcctcctagcgggtggcaggaccaaaacctggctggttgggaacaagcttgtcactgtgacgacaagcgtgggaaccgggacccggtcgttactaggcctggactcgggggagctgcagtccggcccggagtcgagctccagccccggggtgcatgtgagacagaccaaggaggcgccggccaagctggagtcccaggctgggcagcaggtgtcccgtggggcccgggatcgggtccgttccatgtcggggggccatggtcttcgagttggcgccctggacgtgccggcctcccagttcctgggcagtgccacttctccaggaccacggactgcaccagccgcgaaacctgagaaggcctcagctggcacccgggttcctgtgcaggagaagacgaacctggcggcctatgtgcccctgctgacccagggctgggcggagatcctggtccggaggcccacagggaacaccagctggctgatgagcctggagaacccgctcagccctttctcctcggacatcaacaacatgcccctgcaggagctgtctaacgccctcatggcggctgagcgcttcaaggagcaccgggacacagccctgtacaagtcactgtcggtgccggcagccagcacggccaaaccccctcctctgcctcgctccaacacagactccgccgtggtcatggaggagggaagtccgggcgaggttcctgtgctggtggagcccccagggttggaggacgttgaggcagcgctaggcatggacaggcgcacggatgcctacagcaggtcgtcctcagtctccagccaggaggagaagtcgctccacgcggaggagctggttggcaggggcatccccatcgagcgagtcgtctcctcggagggtggccggccctctgtggacctctccttccagccctcgcagcccctgagcaagtccagctcctctcccgagctgcagactctgcaggacatcctcggggaccctggggacaaggccgacgtgggccggctgagccctgaggttaaggcccggtcacagtcagggaccctggacggggaaagtgctgcctggtcggcctcgggcgaagacagtcggggccagcccgagggtcccttgccttccagctccccccgctcgcccagtggcctccggccccgaggttacaccatctccgactcggccccatcacgcaggggcaagagagtagagagggacgccttaaagagcagagccacagcctccaatgcagagaaagtgccaggcatcaaccccagtttcgtgttcctgcagctctaccattcccccttctttggcgacgagtcaaacaagccaatcctgctgcccaatgagtcacagtcctttgagcggtcggtgcagctcctcgaccagatcccatcatacgacacccacaagatcgccgtcctgtatgttggagaaggccagagcaacagcgagctcgccatcctgtccaatgagcatggctcctacaggtacacggagttcctgacgggcctgggccggctcatcgagctgaaggactgccagccggacaaggtgtacctgggaggcctggacgtgtgtggtgaggacggccagttcacctactgctggcacgatgacatcatgcaagccgtcttccacatcgccaccctgatgcccaccaaggacgtggacaagcaccgctgcgacaagaagcgccacctgggcaacgactttgtgtccattgtctacaatgactccggtgaggacttcaagcttggcaccatcaagggccagttcaactttgtccacgtgatcgtcaccccgctggactacgagtgcaacctggtgtccctgcagtgcaggaaagacatggagggccttgtggacaccagcgtggccaagatcgtgtctgaccgcaacctgcccttcgtggcccgccagatggccctgcacgcaaatatggcctcacaggtgcatcatagccgctccaaccccaccgatatctacccctccaagtggattgcccggctccgccacatcaagcggctccgccagcggatctgcgaggaagccgcctactccaaccccagcctacctctggtgcaccctccgtcccatagcaaagcccctgcacagactccagccgagcccacacctggctatgaggtgggccagcggaagcgcctcatctcctcggtggaggacttcaccgagtttgtgtgaggccggggccctccctcctgcactggccttggacggtattgcctgtcagtgaaataaataaagtcctgaccccagtgcacagacatagaggc

SEQ ID NO: 4328 - DNA, 5322 bp, Homo sapiens
  source 1..5322: mol_type = genomic DNA
ccggcggcgtcccggggccaggggggtgcgcctttctccgcgtcggggcggcccggagcgcggtggcgcggcgcgggaggggttttctggtgcgtcctggtccaccatggccaaaccaacaagcaaagattcaggcttgaaggagaagtttaagattctgttgggactgggaacaccgaggccaaatcccaggtctgcagagggtaaacagacggagtttatcatcaccgcggaaatactgagagaactgagcatggaatgtggcctcaacaatcgcatccggatgatagggcagatttgtgaagtcgcaaaaaccaagaaatttgaagagggcgagcgtttgggggtcctcagagccctcttctttaaggtcatcaaggattacccttccaacgaagaccttcacgaaaggctggaggttttcaaggccctcacagacaatgggagacacatcacctacttggaggaagagctggctgactttgtcctgcagtggatggatgttggcttgtcctcggaattccttctggtgctggtgaacttggtcaaattcaatagctgttacctcgacgagtacatcgcaaggatggttcagatgatctgtctgctgtgcgtccggaccgcgtcctctgtggacatagaggtctccctgcaggtgctggacgccgtggtctgctacaactgcctgccggctgagagcctcccgctgttcatcgttaccctctgtcgcaccatcaacgtcaaggagctctgcgagccttgctggaagctgatgcggaacctccttggcacccacctgggccacagcgccatctacaacatgtgccacctcatggaggacagagcctacatggaggacgcgcccctgctgagaggagccgtgttttttgtgggcatggctctctggggagcccaccggctctattctctcaggaactcgccgacatctgtgttgccatcattttaccaggccatggcatgtccgaacgaggtggtgtcctatgagatcgtcctgtccatcaccaggctcatcaagaagtataggaaggagctccaggtggtggcgtgggacattctgctgaacatcatcgaacggctccttcagcagctccagaccttggacagcccggagctcaggaccatcgtccatgacctgttgaccacggtggaggagctgtgtgaccagaacgagttccacgggtctcaggagagatactttgaactggtggagagatgtgcggaccagaggcctgagtcctccctcctgaacctgatctcctatagagcgcagtccatccacccggccaaggacggctggattcagaacctgcaggcgctgatggagagattcttcaggagcgagtcccgaggcgccgtgcgcatcaaggtgctggacgtgctgtcctttgtgctgctcatcaacaggcagttctatgaggaggagctgattaactcagtggtcatctcgcagctctcccacatccccgaggataaagaccaccaggtccgaaagctggccacccagttgctggtggacctggcagagggctgccacacacaccacttcaacagcctgctggacatcatcgagaaggtgatggcccgctccctctccccacccccggagctggaagaaagggatgtggccgcatactcggcctccttggaggatgtgaagacagccgtcctggggcttctggtcatccttcagaccaagctgtacaccctgcctgcaagccacgccacgcgtgtgtatgagatgctggtcagccacattcagctccactacaagcacagctacaccctgccaatcgcgagcagcatccggctgcaggcctttgacttcctgttgctgctgcgggccgactcactgcaccgcctgggcctgcccaacaaggatggagtcgtgcggttcagcccctactgcgtctgcgactacatggagccagagagaggctctgagaagaagaccagcggccccctttctcctcccacagggcctcctggcccggcgcctgcaggccccgccgtgcggctggggtccgtgccctactccctgctcttccgcgtcctgctgcagtgcttgaagcaggagtctgactggaaggtgctgaagctggttctgggcaggctgcctgagtccctgcgctataaagtgctcatctttacttccccttgcagtgtggaccagctgtgctctgctctctgctccatgctttcaggcccaaagacactggagcggctccgaggcgccccagaaggcttctccagaactgacttgcacctggccgtggttccagtgctgacagcattaatctcttaccataactacctggacaaaaccaaacagcgcgagatggtctactgcctggagcagggcctcatccaccgctgtgccagccagtgcgtcgtggccttgtccatctgcagcgtggagatgcctgacatcatcatcaaggcgctgcctgttctggtggtgaagctcacgcacatctcagccacagccagcatggccgtcccactgctggagttcctgtccactctggccaggctgccgcacctctacaggaactttgccgcggagcagtatgccagtgtgttcgccatctccctgccgtacaccaacccctccaagtttaatcagtacatcgtgtgtctggcccatcacgtcatagccatgtggttcatcaggtgccgcctgcccttccggaaggattttgtccctttcatcactaagggcctgcggtccaatgtcctcttgtcttttgatgacacccccgagaaggacagcttcagggcccggagtactagtctcaacgagagacccaagagcaggatacagacgtccctcaccagtgccagcttggggtctgcagatgagaactccgtggcccaggctgacgatagcctgaaaaacctccacctggagctcacggaaacctgtctggacatgatggctcgatacgtcttctccaacttcacggctgtcccgaagaggtctcctgtgggcgagttcctcctagcgggtggcaggaccaaaacctggctggttgggaacaagcttgtcactgtgacgacaagcgtgggaaccgggacccggtcgttactaggcctggactcgggggagctgcagtccggcccggagtcgagctccagccccggggtgcatgtgagacagaccaaggaggcgccggccaagctggagtcccaggctgggcagcaggtgtcccgtggggcccgggatcgggtccgttccatgtcggggggccatggtcttcgagttggcgccctggacgtgccggcctcccagttcctgggcagtgccacttctccaggaccacggactgcaccagccgcgaaacctgagaaggcctcagctggcacccgggttcctgtgcaggagaagacgaacctggcggcctatgtgcccctgctgacccagggctgggcggagatcctggtccggaggcccacagggaacaccagctggctgatgagcctggagaacccgctcagccctttctcctcggacatcaacaacatgcccctgcaggagctgtctaacgccctcatggcggctgagcgcttcaaggagcaccgggacacagccctgtacaagtcactgtcggtgccggcagccagcacggccaaaccccctcctctgcctcgctccaacacagactccgccgtggtcatggaggagggaagtccgggcgaggttcctgtgctggtggagcccccagggttggaggacgttgaggcagcgctaggcatggacaggcgcacggatgcctacagcaggtcgtcctcagtctccagccaggaggagaagtcgctccacgcggaggagctggttggcaggggcatccccatcgagcgagtcgtctcctcggagggtggccggccctctgtggacctctccttccagccctcgcagcccctgagcaagtccagctcctctcccgagctgcagactctgcaggacatcctcggggaccctggggacaaggccgacgtgggccggctgagccctgaggttaaggcccggtcacagtcagggaccctggacggggaaagtgctgcctggtcggcctcgggcgaagacagtcggggccagcccgagggtcccttgccttccagctccccccgctcgcccagtggcctccggccccgaggttacaccatctccgactcggccccatcacgcaggggcaagagagtagagagggacgccttaaagagcagagccacagcctccaatgcagagaaagtgccaggcatcaaccccagtttcgtgttcctgcagctctaccattcccccttctttggcgacgagtcaaacaagccaatcctgctgcccaatgagtcacagtcctttgagcggtcggtgcagctcctcgaccagatcccatcatacgacacccacaagatcgccgtcctgtatgttggagaaggccagagcaacagcgagctcgccatcctgtccaatgagcatggctcctacaggtacacggagttcctgacgggcctgggccggctcatcgagctgaaggactgccagccggacaaggtgtacctgggaggcctggacgtgtgtggtgaggacggccagttcacctactgctggcacgatgacatcatgcaagccgtcttccacatcgccaccctgatgcccaccaaggacgtggacaagcaccgctgcgacaagaagcgccacctgggcaacgactttgtgtccattgtctacaatgactccggtgaggacttcaagcttggcaccatcaagggccagttcaactttgtccacgtgatcgtcaccccgctggactacgagtgcaacctggtgtccctgcagtgcaggaaagacatggagggccttgtggacaccagcgtggccaagatcgtgtctgaccgcaacctgcccttcgtggcccgccagatggccctgcacgcaaatatggcctcacaggtgcatcatagccgctccaaccccaccgatatctacccctccaagtggattgcccggctccgccacatcaagcggctccgccagcggatctgcgaggaagccgcctactccaaccccagcctacctctggtgcaccctccgtcccatagcaaagcccctgcacagactccagccgagcccacacctggctatgaggtgggccagcggaagcgcctcatctcctcggtggaggacttcaccgagtttgtgtgaggccggggccctccctcctgcactggccttggacggtattgcctgtcagtgaaataaataaagtcctgaccccagtgcacagacatagaggcacagattgc

SEQ ID NO: 4329 - DNA, 1315 bp, Homo sapiens
  source 1..1315: mol_type = genomic DNA
ttccccagggacctctctctaatcagccctctggcccaggcagtcagatcatcttctcgaaccccgagtgacaagcctgtagcccatgttgtagcaaaccctcaagctgaggggcagctccagtggctgaaccgccgggccaatgccctcctggccaatggcgtggagctgagagataaccagctggtggtgccatcagagggcctgtacctcatctactcccaggtcctcttcaagggccaaggctgcccctccacccatgtgctcctcacccacaccatcagccgcatcgccgtctcctaccagaccaaggtcaacctcctctctgccatcaagagcccctgccagagggagaccccagagggggctgaggccaagccctggtatgagcccatctatctgggaggggtcttccagctggagaagggtgaccgactcagcgctgagatcaatcggcccgactatctcgactttgccgagtctgggcaggtctactttgggatcattgccctgtgaggaggacgaacatccaaccttcccaaacgcctcccctgccccaatccctttattaccccctccttcagacaccctcaacctcttctggctcaaaaagagaattgggggcttagggtcggaacccaagcttagaactttaagcaacaagaccaccacttcgaaacctgggattcaggaatgtgtggcctgcacagtgaagtgctggcaaccactaagaattcaaactggggcctccagaactcactggggcctacagctttgatccctgacatctggaatctggagaccagggagcctttggttctggccagaatgctgcaggacttgagaagacctcacctagaaattgacacaagtggaccttaggccttcctctctccagatgtttccagacttccttgagacacggagcccagccctccccatggagccagctccctctatttatgtttgcacttgtgattatttattatttatttattatttatttatttacagatgaatgtatttatttgggagaccggggtatcctgggggacccaatgtaggagctgccttggctcagacatgttttccgtgaaaacggagctgaacaataggctgttcccatgtagccccctggcctctgtgccttcttttgattatgttttttaaaatatttatctgattaagttgtctaaacaatgctgatttggtgaccaactgtcactcattgctgagcctctgctccccaggggagttgtgtctgtaatcgccctactattcagtggcgagaaataaagtttgcttagaaaagaaa

SEQ ID NO: 4330 - DNA, 1619 bp, Homo sapiens
  source 1..1619: mol_type = genomic DNA
atttcctcactgactataaaagaatagagaaggaagggcttcagtgaccggctgcctggctgacttacagcagtcagactctgacaggatcatggctatgatggaggtccaggggggacccagcctgggacagacctgcgtgctgatcgtgatcttcacagtgctcctgcagtctctctgtgtggctgtaacttacgtgtactttaccaacgagctgaagcagatgcaggacaagtactccaaaagtggcattgcttgtttcttaaaagaagatgacagttattgggaccccaatgacgaagagagtatgaacagcccctgctggcaagtcaagtggcaactccgtcagctcgttagaaagactccaagaatgaaaaggctctgggccgcaaaataaactcctgggaatcatcaaggagtgggcattcattcctgagcaacttgcacttgaggaatggtgaactggtcatccatgaaaaagggttttactacatctattcccaaacatactttcgatttcaggaggaaataaaagaaaacacaaagaacgacaaacaaatggtccaatatatttacaaatacacaagttatcctgaccctatattgttgatgaaaagtgctagaaatagttgttggtctaaagatgcagaatatggactctattccatctatcaagggggaatatttgagcttaaggaaaatgacagaatttttgtttctgtaacaaatgagcacttgatagacatggaccatgaagccagtttttttggggcctttttagttggctaactgacctggaaagaaaaagcaataacctcaaagtgactattcagttttcaggatgatacactatgaagatgtttcaaaaaatctgaccaaaacaaacaaacagaaaacagaaaacaaaaaaacctctatgcaatctgagtagagcagccacaaccaaaaaattctacaacacacactgttctgaaagtgactcacttatcccaagagaatgaaattgctgaaagatctttcaggactctacctcatatcagtttgctagcagaaatctagaagactgtcagcttccaaacattaatgcaatggttaacatcttctgtctttataatctactccttgtaaagactgtagaagaaagagcaacaatccatctctcaagtagtgtatcacagtagtagcctccaggtttccttaagggacaacatccttaagtcaaaagagagaagaggcaccactaaaagatcgcagtttgcctggtgcagtggctcacacctgtaatcccaacattttgggaacccaaggtgggtagatcacgagatcaagagatcaagaccatagtgaccaacatagtgaaaccccatctctactgaaagtacaaaaattagctgggtgtgttggcacatgcctgtagtcccagctacttgagaggctgaggcaagagaattgtttgaacccgggaggcagaggttgcagtgtggtgagatcatgccactacactccagcctggcgacagagcgagacttggtttcaaaaaaaaaaaaaaaaaaaacttcagtaagtacgtgttatttttttcaataaaattctattacagtatgtcatgtttgctgtag

SEQ ID NO: 4331 - DNA, 1953 bp, Homo sapiens
  source 1..1953: mol_type = genomic DNA
acagaacccagaaaaacaactcattcgctttcatttcctcactgactataaaagaatagagaaggaagggcttcagtgaccggctgcctggctgacttacagcagtcagactctgacaggatcatggctatgatggaggtccaggggggacccagcctgggacagacctgcgtgctgatcgtgatcttcacagtgctcctgcagtctctctgtgtggctgtaacttacgtgtactttaccaacgagctgaagcagatgcaggacaagtactccaaaagtggcattgcttgtttcttaaaagaagatgacagttattgggaccccaatgacgaagagagtatgaacagcccctgctggcaagtcaagtggcaactccgtcagctcgttagaaagatgattttgagaacctctgaggaaaccatttctacagttcaagaaaagcaacaaaatatttctcccctagtgagagaaagaggtcctcagagagtagcagctcacataactgggaccagaggaagaagcaacacattgtcttctccaaactccaagaatgaaaaggctctgggccgcaaaataaactcctgggaatcatcaaggagtgggcattcattcctgagcaacttgcacttgaggaatggtgaactggtcatccatgaaaaagggttttactacatctattcccaaacatactttcgatttcaggaggaaataaaagaaaacacaaagaacgacaaacaaatggtccaatatatttacaaatacacaagttatcctgaccctatattgttgatgaaaagtgctagaaatagttgttggtctaaagatgcagaatatggactctattccatctatcaagggggaatatttgagcttaaggaaaatgacagaatttttgtttctgtaacaaatgagcacttgatagacatggaccatgaagccagtttttttggggcctttttagttggctaactgacctggaaagaaaaagcaataacctcaaagtgactattcagttttcaggatgatacactatgaagatgtttcaaaaaatctgaccaaaacaaacaaacagaaaacagaaaacaaaaaaacctctatgcaatctgagtagagcagccacaaccaaaaaattctacaacacacactgttctgaaagtgactcacttatcccaagagaatgaaattgctgaaagatctttcaggactctacctcatatcagtttgctagcagaaatctagaagactgtcagcttccaaacattaatgcaatggttaacatcttctgtctttataatctactccttgtaaagactgtagaagaaagagcaacaatccatctctcaagtagtgtatcacagtagtagcctccaggtttccttaagggacaacatccttaagtcaaaagagagaagaggcaccactaaaagatcgcagtttgcctggtgcagtggctcacacctgtaatcccaacattttgggaacccaaggtgggtagatcacgagatcaagagatcaagaccatagtgaccaacatagtgaaaccccatctctactgaaagtacaaaaattagctgggtgtgttggcacatgcctgtagtcccagctacttgagaggctgaggcaagagaattgtttgaacccgggaggcagaggttgcagtgtggtgagatcatgccactacactccagcctggcgacagagcgagacttggtttcaaaaaaaaaaaaaaaaaaaacttcagtaagtacgtgttatttttttcaataaaattctattacagtatgtcatgtttgctgtagtgctcatatttattgttgtttttgttttagtactcacttgtttcataatatcaagattactaaaaatgggggaaaagacttctaatctttttttcataatatctttgacacatattacagaagaaataaatttcttacttttaatttaatatga

SEQ ID NO: 4332 - DNA, 1135 bp, Homo sapiens
  source 1..1135: mol_type = genomic DNA
aggggtagagatgcagaaaggcagaaaggagaaaattcaggataactctcctgaggggtgagccaagccctgccatgtagtgcacgcaggacatcaacaaacacagataacaggaaatgatccattccctgtggtcacttattctaaaggccccaaccttcaaagttcaagtagtgatatggatgactccacagaaagggagcagtcacgccttacttcttgccttaagaaaagagaagaaatgaaactgaaggagtgtgtttccatcctcccacggaaggaaagcccctctgtccgatcctccaaagacggaaagctgctggctgcaaccttgctgctggcactgctgtcttgctgcctcacggtggtgtctttctaccaggtggccgccctgcaaggggacctggccagcctccgggcagagctgcagggccaccacgcggagaagctgccagcaggagcaggagcccccaaggccggcctggaggaagctccagctgtcaccgcgggactgaaaatctttgaaccaccagctccaggagaaggcaactccagtcagaacagcagaaataagcgtgccgttcagggtccagaagaaacagtcactcaagactgcttgcaactgattgcagacagtgaaacaccaactatacaaaaaggatcttacacatttgttccatggcttctcagctttaaaaggggaagtgccctagaagaaaaagagaataaaatattggtcaaagaaactggttacttttttatatatggtcaggttttatatactgataagacctacgccatgggacatctaattcagaggaagaaggtccatgtctttggggatgaattgagtctggtgactttgtttcgatgtattcaaaatatgcctgaaacactacccaataattcctgctattcagctggcattgcaaaactggaagaaggagatgaactccaacttgcaataccaagagaaaatgcacaaatatcactggatggagatgtcacattttttggtgcattgaaactgctgtgacctacttacaccatgtctgtagctattttcctccctttctctgtacctctaagaagaaagaatctaactgaaaataccaaaaaaaaaaaaaaaaaaaaa

SEQ ID NO: 4333 - DNA, 1147 bp, Homo sapiens
  source 1..1147: mol_type = genomic DNA
gaaattcttacaaaaactgaaagtgaaatgaggaagacagattgagcaatccaatcggagggtaaatgccagcaaacctactgtacagtaggggtagagatgcagaaaggcagaaaggagaaaattcaggataactctcctgaggggtgagccaagccctgccatgtagtgcacgcaggacatcaacaaacacagataacaggaaatgatccattccctgtggtcacttattctaaaggccccaaccttcaaagttcaagtagtgatatggatgactccacagaaagggagcagtcacgccttacttcttgccttaagaaaagagaagaaatgaaactgaaggagtgtgtttccatcctcccacggaaggaaagcccctctgtccgatcctccaaagacggaaagctgctggctgcaaccttgctgctggcactgctgtcttgctgcctcacggtggtgtctttctaccaggtggccgccctgcaaggggacctggccagcctccgggcagagctgcagggccaccacgcggagaagctgccagcaggagcaggagcccccaaggccggcctggaggaagctccagctgtcaccgcgggactgaaaatctttgaaccaccagctccaggagaaggcaactccagtcagaacagcagaaataagcgtgccgttcagggtccagaagaaacaggatcttacacatttgttccatggcttctcagctttaaaaggggaagtgccctagaagaaaaagagaataaaatattggtcaaagaaactggttacttttttatatatggtcaggttttatatactgataagacctacgccatgggacatctaattcagaggaagaaggtccatgtctttggggatgaattgagtctggtgactttgtttcgatgtattcaaaatatgcctgaaacactacccaataattcctgctattcagctggcattgcaaaactggaagaaggagatgaactccaacttgcaataccaagagaaaatgcacaaatatcactggatggagatgtcacattttttggtgcattgaaactgctgtgacctacttacaccatgtctgtagctattttcctccctttctctgtacctctaagaagaaagaatctaactgaaaatacca

SEQ ID NO: 4334 - DNA, 495 bp, Homo sapiens
  source 1..495: mol_type = genomic DNA
atggatgactccacagaaagggagcagtcacgccttacttcttgccttaagaaaagagaagaaatgaaactgaaggagtgtgtttccatcctcccacggaaggaaagcccctctgtccgatcctccaaagacggaaagctgctggctgcaaccttgctgctggcactgctgtcttgctgcctcacggtggtgtctttctaccaggtggccgccctgcaaggggacctggccagcctccgggcagagctgcagggccaccacgcggagaagctgccagcaggagcaggagcccccaaggccggcctggaggaagctccagctgtcaccgcgggactgaaaatctttgaaccaccagctccaggagaaggcaactccagtcagaacagcagaaataagcgtgccgttcagggtccagaagaaacagtcactcaagactgcttgcaactgattgcagacagtgaaacaccaactatacaaaaaggttttatatactga

SEQ ID NO: 4335 - DNA, 1906 bp, Homo sapiens
  source 1..1906: mol_type = genomic DNA
ccaagtcacatgattcaggattcagggggagaatccttcttggaacagagatgggcccagaactgaatcagatgaagagagataaggtgtgatgtggggaagactatataaagaatggacccagggctgcagcaagcactcaacggaatggcccctcctggagacacagccatgcatgtgccggcgggctccgtggccagccacctggggaccacgagccgcagctatttctatttgaccacagccactctggctctgtgccttgtcttcacggtggccactattatggtgttggtcgttcagaggacggactccattcccaactcacctgacaacgtccccctcaaaggaggaaattgctcagaagacctcttatgtatcctgaaaagggctccattcaagaagtcatgggcctacctccaagtggcaaagcatctaaacaaaaccaagttgtcttggaacaaagatggcattctccatggagtcagatatcaggatgggaatctggtgatccaattccctggtttgtacttcatcatttgccaactgcagtttcttgtacaatgcccaaataattctgtcgatctgaagttggagcttctcatcaacaagcatatcaaaaaacaggccctggtgacagtgtgtgagtctggaatgcaaacgaaacacgtataccagaatctctctcaattcttgctggattacctgcaggtcaacaccaccatatcagtcaatgtggatacattccagtacatagatacaagcacctttcctcttgagaatgtgttgtccatcttcttatacagtaattcagactgaacagtttctcttggccttcaggaagaaagcgcctctctaccatacagtatttcatccctccaaacacttgggcaaaaagaaaactttagaccaagacaaactacacagggtattaaatagtatacttctccttctgtctcttggaaagatacagctccagggttaaaaagagagtttttagtgaagtatctttcagatagcaggcagggaagcaatgtagtgtggtgggcagagccccacacagaatcagaagggatgaatggatgtcccagcccaacctctaattcactgtatggtcttgatctatttcttctgttttgagagcctccagttaaaatggggctccagtaccagagcagctagcaactctgccctaatgggaaatgaaggggagctgggtgtgagtgtttacactgtgcccttcacgggatacttcttttatctgcagatggcctaatacttagttgtccaagtcgcgatcaaggactctctcacacaggaaacttccctatactggcagatacacttgtgactgaaccatgcccagtttatgcctgtctgactgtcactctggcactaggaggctgatcttgtactccatatgaccccacccctaggaacccccagggaaaaccaggctgggacagccccctgttcctgagatggaaagcacaaatttaatacaccaccacaatggaaaacaagttcaaagacttttacttacagatcctggacagaaagggcataatgagtctgaagggcagtcctccttctctaggttacatgaggcaggaataagaagtcagacagagacagcaagacagttaacaatgtaggtaaagaaatagggtgtggtcactctcaattcactggcaaatgcctgaatggtctgtctgaaggaagcaacagagaagtggggaatccagtctgctaggcaggaaagatgcctctaagttcttgtctctggccagaggtgtggtatagaaccagaaacccatatcaagggtgactaagcccggcttctggtatgagaaattaaacttgtatacaaaatggttgccaaggcaacataaaattataagaattc

SEQ ID NO: 4336 - DNA, 2714 bp, Homo sapiens
  source 1..2714: mol_type = genomic DNA
actccgaatgcgaagttctgtcttgtcatagccaagcacgctgcttcttggattgacctggcaggatggcgccaccaccagctagagtacatctaggtgcgttcctggcagtgactccgaatcccgggagcgcagcgagtgggacagaggcagccgcggccacacccagcaaagtgtggggctcttccgcggggaggattgaaccacgaggcgggggccgaggagcgctccctacctccatgggacagcacggacccagtgcccgggcccgggcagggcgcgccccaggacccaggccggcgcgggaagccagccctcggctccgggtccacaagaccttcaagtttgtcgtcgtcggggtcctgctgcaggtcgtacctagctcagctgcaaccatcaaacttcatgatcaatcaattggcacacagcaatgggaacatagccctttgggagagttgtgtccaccaggatctcatagatcagaacatcctggagcctgtaaccggtgcacagagggtgtgggttacaccaatgcttccaacaatttgtttgcttgcctcccatgtacagcttgtaaatcagatgaagaagagagaagtccctgcaccacgaccaggaacacagcatgtcagtgcaaaccaggaactttccggaatgacaattctgctgagatgtgccggaagtgcagcagagggtgccccagagggatggtcaaggtcaaggattgtacgccctggagtgacatcgagtgtgtccacaaagaatcaggcaatggacataatatatgggtgattttggttgtgactttggttgttccgttgctgttggtggctgtgctgattgtctgttgttgcatcggctcaggttgtggaggggaccccaagtgcatggacagggtgtgtttctggcgcttgggtctcctacgagggcctggggctgaggacaatgctcacaacgagattctgagcaacgcagactcgctgtccactttcgtctctgagcagcaaatggaaagccaggagccggcagatttgacaggtgtcactgtacagtccccaggggaggcacagtgtctgctgggaccggcagaagctgaagggtctcagaggaggaggctgctggttccagcaaatggtgctgaccccactgagactctgatgctgttctttgacaagtttgcaaacatcgtgccctttgactcctgggaccagctcatgaggcagctggacctcacgaaaaatgagatcgatgtggtcagagctggtacagcaggcccaggggatgccttgtatgcaatgctgatgaaatgggtcaacaaaactggacggaacgcctcgatccacaccctgctggatgccttggagaggatggaagagagacatgcaagagagaagattcaggacctcttggtggactctggaaagttcatctacttagaagatggcacaggctctgccgtgtccttggagtgaaagactctttttaccagaggtttcctcttaggtgttaggagttaatacatattaggttttttttttttttaacatgtatacaaagtaaattcttagccaggtgtagtggctcatgcctgtaatcccagcactttgggaggctgaggcgggtggatcacttgaggtcagaagttcaagaccagcctgaccaacatcgtgaaatgccgtctttacaaaaaaatacaaaaattaactggatgtgatggtgtgtgcatatattctcggctactcgggaggctgaggcaggagaatcacttgaacccacgaggcagtgagctgagattgcaccactgcactccagcctgggacacagagcaagactctgtctcaagataaaataaaataaacttgaaagaattattgcccgactgaggctcacatgccaaaggaaaatctggttctcccctgagctggcctccgtgtgtttccttatcatggtggtcaattggaggtgttaatttgaatggattaaggaacacctagaacactggtaaggcattatttctgggacattatttctgggcatgtcttcgagggtgtttccagaggggattggcatgcgatcgggtggactgagtggaaaagacctacccttaatttgggggggcaccgtccgacagactggggagcaagatagaagaaaacaaaaaaaaaaggaaaagcaaatccatctgatctcctggagctgggacactcttctgcctgtggacatcagagtctaggatttctagcccttggactccagggcatacaccagtggcctcccgaaggatctaaggattttggccttgaactaagaattacaccatcggcttccctgggtcttaggtttttgggctggattaagtcctgcttccagcatttcagggtctctgctgtgcagatggcctgttgtggaacttctcaacctccattatcagatgcattaattcctccaataagtcccatttcatatatagtcatttaccccacaacatttcagtcaagggaacagcatataagatggtggccgtccagtaagctaaggttaatttattaattatttaatttatttaccttgagttcaagtcacaattaaagtacatatacctttggaaatttggacttttgtatataaaagtacttttttttggcgggggcagtgggcagctctcatcctaaacaaatgtgttatttggtacctatgcaaagatttggttaaaa

SEQ ID NO: 4337 - DNA, 4146 bp, Homo sapiens
  source 1..4146: mol_type = genomic DNA
gcgcttgcggaggattgcgttgacgagactcttatttattgtcaccaacctgtggtggaatttgcagttgcacattggatctgattcgccccgccccgaatgacgcctgcccggaggcagtgaaagtacagccgcgccgccccaagtcagcctggacacataaatcagcacgcggccggagaaccccgcaatctctgcgcccacaaaatacaccgacgatgcccgatctactttaagggctgaaacccacgggcctgagagactataagagcgttccctaccgccatggaacaacggggacagaacgccccggccgcttcgggggcccggaaaaggcacggcccaggacccagggaggcgcggggagccaggcctgggccccgggtccccaagacccttgtgctcgttgtcgccgcggtcctgctgttggtctcagctgagtctgctctgatcacccaacaagacctagctccccagcagagagcggccccacaacaaaagaggtccagcccctcagagggattgtgtccacctggacaccatatctcagaagacggtagagattgcatctcctgcaaatatggacaggactatagcactcactggaatgacctccttttctgcttgcgctgcaccaggtgtgattcaggtgaagtggagctaagtccctgcaccacgaccagaaacacagtgtgtcagtgcgaagaaggcaccttccgggaagaagattctcctgagatgtgccggaagtgccgcacagggtgtcccagagggatggtcaaggtcggtgattgtacaccctggagtgacatcgaatgtgtccacaaagaatcaggtacaaagcacagtggggaagtcccagctgtggaggagacggtgacctccagcccagggactcctgcctctccctgttctctctcaggcatcatcataggagtcacagttgcagccgtagtcttgattgtggctgtgtttgtttgcaagtctttactgtggaagaaagtccttccttacctgaaaggcatctgctcaggtggtggtggggaccctgagcgtgtggacagaagctcacaacgacctggggctgaggacaatgtcctcaatgagatcgtgagtatcttgcagcccacccaggtccctgagcaggaaatggaagtccaggagccagcagagccaacaggtgtcaacatgttgtcccccggggagtcagagcatctgctggaaccggcagaagctgaaaggtctcagaggaggaggctgctggttccagcaaatgaaggtgatcccactgagactctgagacagtgcttcgatgactttgcagacttggtgccctttgactcctgggagccgctcatgaggaagttgggcctcatggacaatgagataaaggtggctaaagctgaggcagcgggccacagggacaccttgtacacgatgctgataaagtgggtcaacaaaaccgggcgagatgcctctgtccacaccctgctggatgccttggagacgctgggagagagacttgccaagcagaagattgaggaccacttgttgagctctggaaagttcatgtatctagaaggtaatgcagactctgccatgtcctaagtgtgattctcttcaggaagtcagaccttccctggtttaccttttttctggaaaaagcccaactggactccagtcagtaggaaagtgccacaattgtcacatgaccggtactggaagaaactctcccatccaacatcacccagtggatggaacatcctgtaacttttcactgcacttggcattatttttataagctgaatgtgataataaggacactatggaaatgtctggatcattccgtttgtgcgtactttgagatttggtttgggatgtcattgttttcacagcacttttttatcctaatgtaaatgctttatttatttatttgggctacattgtaagatccatctacacagtcgttgtccgacttcacttgatactatatgatatgaaccttttttgggtggggggtgcggggcagttcactctgtctcccaggctggagtgcaatggtgcaatcttggctcactatagccttgacctctcaggctcaagcgattctcccacctcagccatccaaatagctgggaccacaggtgtgcaccaccacgcccggctaattttttgtattttgtctagatataggggctctctatgttgctcagggtggtctcgaattcctggactcaagcagtctgcccacctcagactcccaaagcggtggaattagaggcgtgagcccccatgcttggccttacctttctacttttataattctgtatgttattattttatgaacatgaagaaactttagtaaatgtacttgtttacatagttatgtgaatagattagataaacataaaaggaggagacatacaatgggggaagaagaagaagtcccctgtaagatgtcactgtctgggttccagccctccctcagatgtactttggcttcaatgattggcaacttctacaggggccagtcttttgaactggacaaccttacaagtatatgagtattatttataggtagttgtttacatatgagtcgggaccaaagagaactggatccacgtgaagtcctgtgtgtggctggtccctacctgggcagtctcatttgcacccatagcccccatctatggacaggctgggacagaggcagatgggttagatcacacataacaatagggtctatgtcatatcccaagtgaacttgagccctgtttgggctcaggagatagaagacaaaatctgtctcccacgtctgccatggcatcaagggggaagagtagatggtgcttgagaatggtgtgaaatggttgccatctcaggagtagatggcccggctcacttctggttatctgtcaccctgagcccatgagctgccttttagggtacagattgcctacttgaggaccttggccgctctgtaagcatctgactcatctcagaaatgtcaattcttaaacactgtggcaacaggacctagaatggctgacgcattaaggttttcttcttgtgtcctgttctattattgttttaagacctcagtaaccatttcagcctctttccagcaaacccttctccatagtatttcagtcatggaaggatcatttatgcaggtagtcattccaggagtttttggtcttttctgtctcaaggcattgtgtgttttgttccgggactggtttgggtgggacaaagttagaattgcctgaagatcacacattcagactgttgtgtctgtggagttttaggagtggggggtgacctttctggtctttgcacttccatcctctcccacttccatctggcatcccacgcgttgtcccctgcacttctggaaggcacagggtgctgctgcctcctggtctttgcctttgctgggccttctgtgcaggacgctcagcctcagggctcagaaggtgccagtccggtcccaggtcccttgtcccttccacagaggccttcctagaagatgcatctagagtgtcagccttatcagtgtttaagatttttcttttatttttaatttttttgagacagaatctcactctctcgcccaggctggagtgcaacggtacgatcttggctcagtgcaacctccgcctcctgggttcaagcgattctcgtgcctcagcctccggagtagctgggattgcaggcacccgccaccacgcctggctaatttttgtatttttagtagagacggggtttcaccatgttggtcaggctggtctcgaactcctgacctcaggtgatccaccttggcctccgaaagtgctgggattacaggcgtgagccaccagccaggccaagctattcttttaaagtaagcttcctgacgacatgaaataattgggggttttgttgtttagttacattaggctttgctatatccccaggccaaatagcatgtgacacaggacagccatagtatagtgtgtcactcgtggttggtgtcctttcatgcttctgccctgtcaaaggtccctatttgaaatgtgttataatacaaacaaggaagcacattgtgtacaaaatacttatgtatttatgaatccatgaccaaattaaatatgaaaccttatataaaaa

SEQ ID NO: 4338 - DNA, 1723 bp, Homo sapiens
  source 1..1723: mol_type = genomic DNA
cataaatcagcacgcggccggagaaccccgcaatctctgcgcccacaaaatacaccgacgatgcccgatctactttaagggctgaaacccacgggcctgagagactataagagcgttccctaccgccatggaacaacggggacagaacgccccggccgcttcgggggcccggaaaaggcacggcccaggacccagggaggcgcggggagccaggcctgggccccgggtccccaagacccttgtgctcgttgtcgccgcggtcctgctgttggtctcagctgagtctgctctgatcacccaacaagacctagctccccagcagagagcggccccacaacaaaagaggtccagcccctcagagggattgtgtccacctggacaccatatctcagaagacggtagagattgcatctcctgcaaatatggacaggactatagcactcactggaatgacctccttttctgcttgcgctgcaccaggtgtgattcaggtgaagtggagctaagtccctgcaccacgaccagaaacacagtgtgtcagtgcgaagaaggcaccttccgggaagaagattctcctgagatgtgccggaagtgccgcacagggtgtcccagagggatggtcaaggtcggtgattgtacaccctggagtgacatcgaatgtgtccacaaagaatcaggcatcatcataggagtcacagttgcagccgtagtcttgattgtggctgtgtttgtttgcaagtctttactgtggaagaaagtccttccttacctgaaaggcatctgctcaggtggtggtggggaccctgagcgtgtggacagaagctcacaacgacctggggctgaggacaatgtcctcaatgagatcgtgagtatcttgcagcccacccaggtccctgagcaggaaatggaagtccaggagccagcagagccaacaggtgtcaacatgttgtcccccggggagtcagagcatctgctggaaccggcagaagctgaaaggtctcagaggaggaggctgctggttccagcaaatgaaggtgatcccactgagactctgagacagtgcttcgatgactttgcagacttggtgccctttgactcctgggagccgctcatgaggaagttgggcctcatggacaatgagataaaggtggctaaagctgaggcagcgggccacagggacaccttgtacacgatgctgataaagtgggtcaacaaaaccgggcgagatgcctctgtccacaccctgctggatgccttggagacgctgggagagagacttgccaagcagaagattgaggaccacttgttgagctctggaaagttcatgtatctagaaggtaatgcagactctgccatgtcctaagtgtgattctcttcaggaagtcagaccttccctggtttaccttttttctggaaaaagcccaactggactccagtcagtaggaaagtgccacaattgtcacatgaccggtactggaagaaactctcccatccaacatcacccagtggatggaacatcctgtaacttttcactgcacttggcattatttttataagctgaatgtgataataaggacactatggaaatgtctggatcattccgtttgtgcgtactttgagatttggtttgggatgtcattgttttcacagcacttttttatcctaatgtaaatgctttatttatttatttgggctacattgtaagatccatctacacagtcgt

SEQ ID NO: 4339 - DNA, 1464 bp, Homo sapiens
  source 1..1464: mol_type = genomic DNA
agcctggacacataaatcagcacgcggccggagaaccccgcaatctctgcgcccacaaaatacaccgacgatgcccgatctactttaagggctgaaacccacgggcctgagagactataagagcgttccctaccgccatggaacaacggggacagaacgccccggccgcttcgggggcccggaaaaggcacggcccaggacccagggaggcgcggggagccaggcctgggccccgggtccccaagacccttgtgctcgttgtcgccgcggtcctgctgttggacaccatatctcagaagacggtagagattgcatctcctgcaaatatggacaggactatagcactcactggaatgacctccttttctgcttgcgctgcaccaggtgtgattcaggtgaagtggagctaagtccctgcaccacgaccagaaacacagtgtgtcagtgcgaagaaggcaccttccgggaagaagattctcctgagatgtgccggaagtgccgcacagggtgtcccagagggatggtcaaggtcggtgattgtacaccctggagtgacatcgaatgtgtccacaaagaatcaggcatcatcataggagtcacagttgcagccgtagtcttgattgtggctgtgtttgtttgcaagtctttactgtggaagaaagtccttccttacctgaaaggcatctgctcaggtggtggtggggaccctgagcgtgtggacagaagctcacaacgacctggggctgaggacaatgtcctcaatgagatcgtgagtatcttgcagcccacccaggtccctgagcaggaaatggaagtccaggagccagcagagccaacaggtgtcaacatgttgtcccccggggagtcagagcatctgctggaaccggcagaagctgaaaggtctcagaggaggaggctgctggttccagcaaatgaaggtgatcccactgagactctgagacagtgcttcgatgactttgcagacttggtgccctttgactcctgggagccgctcatgaggaagttgggcctcatggacaatgagataaaggtggctaaagctgaggcagcgggccacagggacaccttgtacacgatgctgataaagtgggtcaacaaaaccgggcgagatgcctctgtccacaccctgctggatgccttggagacgctgggagagagacttgccaagcagaagattgaggaccacttgttgagctctggaaagttcatgtatctagaaggtaatgcagactctgccatgtcctaagtgtgattctcttcaggaagtcagaccttccctggtttaccttttttctggaaaaagcccaactggactccagtcagtaggaaagtgccacaattgtcacatgaccggtactggaagaaactctcccatccaacatcacccagtggatggaacatcctgtaacttttcactgcacttggcattatttttataagctg

SEQ ID NO: 4340 - DNA, 3538 bp, Homo sapiens
  source 1..3538: mol_type = genomic DNA
ggcagtgtagctgcgagaacctttgcacgcgcacaaactacggggacgatttctgattgatttttggcgctttcgatccaccctcctcccttctcatgggactttggggacaaagcgtcccgaccgcctcgagcgctcgagcagggcgctatccaggagccaggacagcgtcgggaaccagaccatggctcctggaccccaagatccttaagttcgtcgtcttcatcgtcgcggttctgctgccggtccgggttgactctgccaccatcccccggcaggacgaagttccccagcagacagtggccccacagcaacagaggcgcagcctcaaggaggaggagtgtccagcaggatctcatagatcagaatatactggagcctgtaacccgtgcacagagggtgtggattacaccattgcttccaacaatttgccttcttgcctgctatgtacagtttgtaaatcaggtcaaacaaataaaagttcctgtaccacgaccagagacaccgtgtgtcagtgtgaaaaaggaagcttccaggataaaaactcccctgagatgtgccggacgtgtagaacagggtgtcccagagggatggtcaaggtcagtaattgtacgccccggagtgacatcaagtgcaaaaatgaatcagctgccagttccactgggaaaaccccagcagcggaggagacagtgaccaccatcctggggatgcttgcctctccctatcactaccttatcatcatagtggttttagtcatcattttagctgtggttgtggttggcttttcatgtcggaagaaattcatttcttacctcaaaggcatctgctcaggtggtggaggaggtcccgaacgtgtgcacagagtccttttccggcggcgttcatgtccttcacgagttcctggggcggaggacaatgcccgcaacgagaccctgagtaacagatacttgcagcccacccaggtctctgagcaggaaatccaaggtcaggagctggcagagctaacaggtgtgactgtagagttgccagaggagccacagcgtctgctggaacaggcagaagctgaagggtgtcagaggaggaggctgctggttccagtgaatgacgctgactccgctgacatcagcaccttgctggatgcctcggcaacactggaagaaggacatgcaaaggaaacaattcaggaccaactggtgggctccgaaaagctcttttatgaagaagatgaggcaggctctgctacgtcctgcctgtgaaagaatctcttcaggaaaccagagcttccctcatttaccttttctcctacaaagggaagcagcctggaagaaacagtccagtacttgacccatgccccaacaaactctactatccaatatggggcagcttaccaatggtcctagaactttgttaacgcacttggagtaatttttatgaaatactgcgtgtgataagcaaacgggagaaatttatatcagattcttggctgcatagttatacgattgtgtattaagggtcgttttaggccacatgcggtggctcatgcctgtaatcccagcactttgataggctgaggcaggtggattgcttgagctcgggagtttgagaccagcctcatcaacacagtgaaactccatctcaatttaaaaagaaaaaaagtggttttaggatgtcattctttgcagttcttcatcatgagacaagtctttttttctgcttcttatattgcaagctccatctctactggtgtgtgcatttaatgacatctaactacagatgccgcacagccacaatgctttgccttatagttttttaactttagaacgggattatcttgttattacctgtattttcagtttcggatatttttgacttaatgatgagattatcaagacgtagccctatgctaagtcatgagcatatggacttacgagggttcgacttagagttttgagctttaagataggattattggggcttacccccaccttaattagagaaacatttatattgcttactactgtaggctgtacatctcttttccgatttttgtataatgatgtaaacatggaaaaactttaggaaatgcacttattaggctgtttacatgggttgcctggatacaaatcagcagtcaaaaatgactaaaaatataactagtgacggagggagaaatcctccctctgtgggaggcacttactgcattccagttctccctcctgcgccctgagactggaccagggtttgatggctggcagcttctcaaggggcagcttgtcttacttgttaattttagaggtatatagccatatttatttataaataaatatttatttatttatttataagtagatgtttacatatgcccaggattttgaagagcctggtatctttgggaagccatgtgtctggtttgtcgtgctgggacagtcatgggactgcatcttccgacttgtccacagcagatgaggacagtgagaattaagttagatccgagactgcgaagagcttctctttcaagcgccattacagttgaacgttagtgaatcttgagcctcatttgggctcagggcagagcaggtgtttatctgccccggcatctgccatggcatcaagagggaagagtggacggtgcttgggaatggtgtgaaatggttgccgactcaggcatggatgggcccctctcgcttctggtggtctgtgaactgagtccctgggatgccttttagggcagagattcctgagctgcgttttagggtacagattccctgtttgaggagcttggcccctctgtaagcatctgactcatctcagagatatcaattcttaaacactgtgacaacaggatctaaaatggctgacacatttgtccttgtgtcacgttccattattttatttaaaaacctcagtaatcgttttagcttctttccagcaaactcttctccacagtagcccagtcgtggtaggataaattacggatatagtcattctaggggtttcagtcttttccatctcaaggcattgtgtgttttgttccgggactggtttggctgggacaaagttagaactgcctgaagttcgcacattcagattgttgtgtccatggagttttaggaggggatggcctttccggtcttcgcacttccatcctctcccacttccatctggcgtcccacaccttgtcccctgcacttctggatgacacagggtgctgctgcctcctagtctttgcctttgctgggccttctgtgcaggagacttggtctcaaagctcagagagagccagtccggtcccagctcctttgtcccttcctcagaggccttccttgaagatgcatctagactaccagccttatcagtgtttaagcttattcctttaacataagcttcctgacaacatgaaattgttggggttttttggcgttggttgatttgtttaggttttgctttatacccgggccaaatagcacataacacctggttatatatgaaatactcatatgtttatgaccaaaataaatatgaaacctcatattaaaaa

SEQ ID NO: 4341 - DNA, 2223 bp, Homo sapiens
  source 1..2223: mol_type = genomic DNA
ctccagctcttcctgtcccgctgttgcaacactgcctcactcttcccctcccaccttctctcccctcctctctgctttaattttctcagaattctctggactgaggctccagttctggcctttggggttcaagatcactgggaccaggccgtgatctctatgcccgagtctcaaccctcaactgtcaccccaaggcacttgggacgtcctggacagaccgagtcccgggaagccccagcactgccgctgccacactgccctgagcccaaatgggggagtgagaggccatagctgtctggcatgggcctctccaccgtgcctgacctgctgctgccactggtgctcctggagctgttggtgggaatatacccctcaggggttattggactggtccctcacctaggggacagggagaagagagatagtgtgtgtccccaaggaaaatatatccaccctcaaaataattcgatttgctgtaccaagtgccacaaaggaacctacttgtacaatgactgtccaggcccggggcaggatacggactgcagggagtgtgagagcggctccttcaccgcttcagaaaaccacctcagacactgcctcagctgctccaaatgccgaaaggaaatgggtcaggtggagatctcttcttgcacagtggaccgggacaccgtgtgtggctgcaggaagaaccagtaccggcattattggagtgaaaaccttttccagtgcttcaattgcagcctctgcctcaatgggaccgtgcacctctcctgccaggagaaacagaacaccgtgtgcacctgccatgcaggtttctttctaagagaaaacgagtgtgtctcctgtagtaactgtaagaaaagcctggagtgcacgaagttgtgcctaccccagattgagaatgttaagggcactgaggactcaggcaccacagtgctgttgcccctggtcattttctttggtctttgccttttatccctcctcttcattggtttaatgtatcgctaccaacggtggaagtccaagctctactccattgtttgtgggaaatcgacacctgaaaaagagggggagcttgaaggaactactactaagcccctggccccaaacccaagcttcagtcccactccaggcttcacccccaccctgggcttcagtcccgtgcccagttccaccttcacctccagctccacctatacccccggtgactgtcccaactttgcggctccccgcagagaggtggcaccaccctatcagggggctgaccccatccttgcgacagccctcgcctccgaccccatccccaacccccttcagaagtgggaggacagcgcccacaagccacagagcctagacactgatgaccccgcgacgctgtacgccgtggtggagaacgtgcccccgttgcgctggaaggaattcgtgcggcgcctagggctgagcgaccacgagatcgatcggctggagctgcagaacgggcgctgcctgcgcgaggcgcaatacagcatgctggcgacctggaggcggcgcacgccgcggcgcgaggccacgctggagctgctgggacgcgtgctccgcgacatggacctgctgggctgcctggaggacatcgaggaggcgctttgcggccccgccgccctcccgcccgcgcccagtcttctcagatgaggctgcgcccctgcgggcagctctaaggaccgtcctgcgagatcgccttccaaccccacttttttctggaaaggaggggtcctgcaggggcaagcaggagctagcagccgcctacttggtgctaacccctcgatgtacatagcttttctcagctgcctgcgcgccgccgacagtcagcgctgtgcgcgcggagagaggtgcgccgtgggctcaagagcctgagtgggtggtttgcgaggatgagggacgctatgcctcatgcccgttttgggtgtcctcaccagcaaggctgctcgggggcccctggttcgtccctgagcctttttcacagtgcataagcagttttttttgtttttgttttgttttgttttgtttttaaatcaatcatgttacactaatagaaacttggcactcctgtgccctctgcctggacaagcacatagcaagctgaactgtcctaaggcaggggcgagcacggaacaatggggccttcagctggagctgtggacttttgtacatacactaaaattctgaagttaaagctctgctcttgga

SEQ ID NO: 4342 - DNA, 1339 bp, Homo sapiens
  source 1..1339: mol_type = genomic DNA
caaatgggggagtgagaggccatagctgtctggcatgggcctctccaccgtgcctgacctgctgctgccactggtgctcctggagctgttggtgggaatatacccctcaggggttattggactggtccctcacctaggggacagggagaagagagatagtgtgtgtccccaaggaaaatatatccaccctcaaaataattcgatttgctgtaccaagtgccacaaaggaacctacttgtacaatgactgtccaggcccggggcaggatacggactgcagggagtgtgagagcggctccttcaccgcttcagaaaaccacctcagacactgcctcagctgctccaaatgccgaaaggaaatgggtcaggtggagatctcttcttgcacagtggaccgggacaccgtgtgtggctgcaggaagaaccagtaccggcattattggagtgaaaaccttttccagtgcttcaattgcagcctctgcctcaatgggaccgtgcacctctcctgccaggagaaacagaacaccgtgtgcacctgccatgcaggtttctttctaagagaaaacgagtgtgtctcctgtagtaaagtcctgctctgtcgcccaggctggaatgcagtggcgcgatctcggctcactgcaacctctgcctcccagattcaagcaattctcctgcttcagcctcccaagtagctgggattacaggcacgtgccaccatgcctggctaatttttgtatttttagtagagatggggtttcaccatcttggtcaggctggtctcaaactcctggtgatccacctgcctctgcctcccaaagtgctgggattacagccgtgagccactgcacccagccggcttcatctcttcttgaaatcacttttataccattctatgtggttctcaccatgagcttgagtggtgggctaaagtgcctctccctgctttcagcttcctgctgggaactcactctctcaagttccttccagcaccaccccatagagttcccatcactccacactgtccagtgacaactcccaacatggaagatctgctagttctacagggtgctctctggctgccccagtaacatgtgtttttaaatttttcacatgcatgtttgaccccgactccccgaagtcaggtactgtaactagcagtgtcatttaagaaaaagccctttaacctctctttgccaaaggattcttatcagcaaaacagtgatgaaacaacaatcccataacagctagctggctaccttctcaagcacttattaaatgaggcataatgattttgcttaatcctcaatcctgagaggtgggcgatccctgtggtgatgagg

SEQ ID NO: 4343 - DNA, 3683 bp, Homo sapiens
  source 1..3683: mol_type = genomic DNA
gcgagcgcagcggagcctggagagaaggcgctgggctgcgagggcgcgagggcgcgagggcagggggcaaccggaccccgcccgcacccatggcgcccgtcgccgtctgggccgcgctggccgtcggactggagctctgggctgcggcgcacgccttgcccgcccaggtggcatttacaccctacgccccggagcccgggagcacatgccggctcagagaatactatgaccagacagctcagatgtgctgcagcaaatgctcgccgggccaacatgcaaaagtcttctgtaccaagacctcggacaccgtgtgtgactcctgtgaggacagcacatacacccagctctggaactgggttcccgagtgcttgagctgtggctcccgctgtagctctgaccaggtggaaactcaagcctgcactcgggaacagaaccgcatctgcacctgcaggcccggctggtactgcgcgctgagcaagcaggaggggtgccggctgtgcgcgccgctgcgcaagtgccgcccgggcttcggcgtggccagaccaggaactgaaacatcagacgtggtgtgcaagccctgtgccccggggacgttctccaacacgacttcatccacggatatttgcaggccccaccagatctgtaacgtggtggccatccctgggaatgcaagcatggatgcagtctgcacgtccacgtcccccacccggagtatggccccaggggcagtacacttaccccagccagtgtccacacgatcccaacacacgcagccaactccagaacccagcactgctccaagcacctccttcctgctcccaatgggccccagccccccagctgaagggagcactggcgacttcgctcttccagttggactgattgtgggtgtgacagccttgggtctactaataataggagtggtgaactgtgtcatcatgacccaggtgaaaaagaagcccttgtgcctgcagagagaagccaaggtgcctcacttgcctgccgataaggcccggggtacacagggccccgagcagcagcacctgctgatcacagcgccgagctccagcagcagctccctggagagctcggccagtgcgttggacagaagggcgcccactcggaaccagccacaggcaccaggcgtggaggccagtggggccggggaggcccgggccagcaccgggagctcagattcttcccctggtggccatgggacccaggtcaatgtcacctgcatcgtgaacgtctgtagcagctctgaccacagctcacagtgctcctcccaagccagctccacaatgggagacacagattccagcccctcggagtccccgaaggacgagcaggtccccttctccaaggaggaatgtgcctttcggtcacagctggagacgccagagaccctgctggggagcaccgaagagaagcccctgccccttggagtgcctgatgctgggatgaagcccagttaaccaggccggtgtgggctgtgtcgtagccaaggtgggctgagccctggcaggatgaccctgcgaaggggccctggtccttccaggcccccaccactaggactctgaggctctttctgggccaagttcctctagtgccctccacagccgcagcctccctctgacctgcaggccaagagcagaggcagcgagttgtggaaagcctctgctgccatggcgtgtccctctcggaaggctggctgggcatggacgttcggggcatgctggggcaagtccctgactctctgtgacctgccccgcccagctgcacctgccagcctggcttctggagcccttgggttttttgtttgtttgtttgtttgtttgtttgtttctccccctgggctctgccccagctctggcttccagaaaaccccagcatccttttctgcagaggggctttctggagaggagggatgctgcctgagtcacccatgaagacaggacagtgcttcagcctgaggctgagactgcgggatggtcctggggctctgtgcagggaggaggtggcagccctgtagggaacggggtccttcaagttagctcaggaggcttggaaagcatcacctcaggccaggtgcagtggctcacgcctatgatcccagcactttgggaggctgaggcgggtggatcacctgaggttaggagttcgagaccagcctggccaacatggtaaaaccccatctctactaaaaatacagaaattagccgggcgtggtggcgggcacctatagtcccagctactcagaagcctgaggctgggaaatcgtttgaacccgggaagcggaggttgcagggagccgagatcacgccactgcactccagcctgggcgacagagcgagagtctgtctcaaaagaaaaaaaaaagcaccgcctccaaatgccaacttgtccttttgtaccatggtgtgaaagtcagatgcccagagggcccaggcaggccaccatattcagtgctgtggcctgggcaagataacgcacttctaactagaaatctgccaattttttaaaaaagtaagtaccactcaggccaacaagccaacgacaaagccaaactctgccagccacatccaaccccccacctgccatttgcaccctccgccttcactccggtgtgcctgcagccccgcgcctccttccttgctgtcctaggccacaccatctcctttcagggaatttcaggaactagagatgactgagtcctcgtagccatctctctactcctacctcagcctagaccctcctcctcccccagaggggtgggttcctcttccccactccccaccttcaattcctgggccccaaacgggctgccctgccactttggtacatggccagtgtgatcccaagtgccagtcttgtgtctgcgtctgtgttgcgtgtcgtgggtgtgtgtagccaaggtcggtaagttgaatggcctgccttgaagccactgaagctgggattcctccccattagagtcagccttccccctcccagggccagggccctgcagaggggaaaccagtgtagccttgcccggattctgggaggaagcaggttgaggggctcctggaaaggctcagtctcaggagcatggggataaaggagaaggcatgaaattgtctagcagagcaggggcagggtgataaattgttgataaattccactggacttgagcttggcagctgaactattggagggtgggagagcccagccattaccatggagacaagaagggttttccaccctggaatcaagatgtcagactggctggctgcagtgacgtgcacctgtactcaggaggctgaggggaggatcactggagcccaggagtttgaggctgcagcgagctatgatcgcgccactacactccagcctgagcaacagagtgagaccctgtctcttaaagaaaaaaaaagtcagactgctgggactggccaggtttctgcccacattggacccacatgaggacatgatggagcgcacctgccccctggtggacagtcctgggagaacctcaggcttccttggcatcacagggcagagccgggaagcgatgaatttggagactctgtggggccttggttcccttgtgtgtgtgtgttgatcccaagacaatgaaagtttgcactgtatgctggacggcattcctgcttatcaataaacctgtttgttttacacgtcga

SEQ ID NO: 4344 - DNA, 893 bp, Homo sapiens
  source 1..893: mol_type = genomic DNA
gcgagcgcagcggagcctggagagaaggcgctgggctgcgagggcgcgagggcgcgagggcagggggcaaccggaccccgcccgcacccatggcgcccgtcgccgtctgggccgcgctggccgtcggactggagctctgggctgcggcgcacgccttgcccgcccaggtggcatttacaccctacgccccggagcccgggagcacatgccggctcagagaatactatgaccagacagctcagatgtgctgcagcaaatgctcgccgggccaacatgcaaaagtcttctgtaccaagacctcggacaccgtgtgtgactcctgtgaggacagcacatacacccagctctggaactgggttcccgagtgcttgagctgtggctcccgctgtagctctgaccaggtggaaactcaagcctgcactcgggaacagaaccgcatctgcacctgcaggcccggctggtactgcgcgctgagcaagcaggaggggtgccggctgtgcgcgccgctgcgcaagtgccgcccgggcttcggcgtggccagaccaggaactgaaacatcagacgtggtgtgcaagccctgtgccccggggacgttctccaacacgacttcatccacggatatttgcaggccccaccagatctgtaacgtggtggccatccctgggaatgcaagcatggatgcagtctgcacgtccacgtcccccacccggagtatggccccaggggcagtacacttaccccagccagtgtccacacgatcccaacacacgcagccaactccagaacccagcactgctccaagcacctccttcctgctcccaatgggccccagccccccagctgaagggagcactggcgacttcgctcttccagttgtctctctttcttcctct

SEQ ID NO: 4345 - DNA, 557 bp, Homo sapiens
  source 1..557: mol_type = genomic DNA
gcgagcgcagcggagcctggagagaaggcgctgggctgcgagggcgcgagggcgcgagggcagggggcaaccggaccccgcccgcacccatggcgcccgtcgccgtctgggccgcgctggccgtcggactggagctctgggctgcggcgcacgccttgcccgcccaggtggcatttacaccctacgccccggagcccgggagcacatgccggctcagagaatactatgaccagacagctcagatgtgctgcagcaaatgctcgccgggccaacatgcaaaagtcttctgtaccaagacctcggacaccgtgtgtgactcctgtgaggacagcacatacacccagctctggaactgggttcccgagtgcttgagctgtggctcccgctgtagctctgaccaggtggaaactcaagcctgcactcgggaacagaaccgcatctgcacctgcaggcccggctggtactgcgcgctgagcaagcaggaggggtgccggctgtgcgcgccgctgcgcaagtgccgcccgggcttcggcgtggccagaccagacctctcctag

SEQ ID NO: 4346 - DNA, 111 bp, Homo sapiens
  source 1..111: mol_type = genomic DNA
atggcgcccgtcgccgtctgggccgcgctggccgtcggactggagctctgggctgcggcgcacgccttgcccgcccaggtggacccgggacccctcttccctcaccccggc

SEQ ID NO: 4347 - DNA, 3595 bp, Homo sapiens
  source 1..3595: mol_type = genomic DNA
agtccctcgccgaccagtctgggcagcggaggagggtggttggcagtggctggaagcttcgctatgggaagtcgttcctttgctctctcgcgcccagtcctcctccctggttctcctcagccgctgtcggaggagagcacccggagacgcgggctgcagtcgcggcggcttctccccgcctgggcggccgcgccgctgggcaggtgctgagcgcccctagagcctcccttgccgcctccctcctctgcccggccgcagcagtgcacatggggtgttggaggtagatgggctcccggcccgggaggcggcggtggatgcggcgctgggcagaagcagccgccgattccagctgccccgcgcgccccgggcgcccctgcgagtccccggttcagccatggggacctctccgagcagcagcaccgccctcgcctcctgcagccgcatcgcccgccgagccacagccacgatgatcgcgggctcccttctcctgcttggattccttagcaccaccacagctcagccagaacagaaggcctcgaatctcattggcacataccgccatgttgaccgtgccaccggccaggtgctaacctgtgacaagtgtccagcaggaacctatgtctctgagcattgtaccaacacaagcctgcgcgtctgcagcagttgccctgtggggacctttaccaggcatgagaatggcatagagaaatgccatgactgtagtcagccatgcccatggccaatgattgagaaattaccttgtgctgccttgactgaccgagaatgcacttgcccacctggcatgttccagtctaacgctacctgtgccccccatacggtgtgtcctgtgggttggggtgtgcggaagaaagggacagagactgaggatgtgcggtgtaagcagtgtgctcggggtaccttctcagatgtgccttctagtgtgatgaaatgcaaagcatacacagactgtctgagtcagaacctggtggtgatcaagccggggaccaaggagacagacaacgtctgtggcacactcccgtccttctccagctccacctcaccttcccctggcacagccatctttccacgccctgagcacatggaaacccatgaagtcccttcctccacttatgttcccaaaggcatgaactcaacagaatccaactcttctgcctctgttagaccaaaggtactgagtagcatccaggaagggacagtccctgacaacacaagctcagcaagggggaaggaagacgtgaacaagaccctcccaaaccttcaggtagtcaaccaccagcaaggcccccaccacagacacatcctgaagctgctgccgtccatggaggccactgggggcgagaagtccagcacgcccatcaagggccccaagaggggacatcctagacagaacctacacaagcattttgacatcaatgagcatttgccctggatgattgtgcttttcctgctgctggtgcttgtggtgattgtggtgtgcagtatccggaaaagctcgaggactctgaaaaaggggccccggcaggatcccagtgccattgtggaaaaggcagggctgaagaaatccatgactccaacccagaaccgggagaaatggatctactactgcaatggccatggtatcgatatcctgaagcttgtagcagcccaagtgggaagccagtggaaagatatctatcagtttctttgcaatgccagtgagagggaggttgctgctttctccaatgggtacacagccgaccacgagcgggcctacgcagctctgcagcactggaccatccggggccccgaggccagcctcgcccagctaattagcgccctgcgccagcaccggagaaacgatgttgtggagaagattcgtgggctgatggaagacaccacccagctggaaactgacaaactagctctcccgatgagccccagcccgcttagcccgagccccatccccagccccaacgcgaaacttgagaattccgctctcctgacggtggagccttccccacaggacaagaacaagggcttcttcgtggatgagtcggagccccttctccgctgtgactctacatccagcggctcctccgcgctgagcaggaacggttcctttattaccaaagaaaagaaggacacagtgttgcggcaggtacgcctggacccctgtgacttgcagcctatctttgatgacatgctccactttctaaatcctgaggagctgcgggtgattgaagagattccccaggctgaggacaaactagaccggctattcgaaattattggagtcaagagccaggaagccagccagaccctcctggactctgtttatagccatcttcctgacctgctgtagaacatagggatactgcattctggaaattactcaatttagtggcagggtggttttttaattttcttctgtttctgatttttgttgtttggggtgtgtgtgtgtgtttgtgtgtgtgtgtgtgtgtgtgtgtgtgtgtgtgtttaacagagaatatggccagtgcttgagttctttctccttctctctctctcttttttttttaaataactcttctgggaagttggtttataagcctttgccaggtgtaactgttgtgaaatacccaccactaaagttttttaagttccatattttctccattttgccttcttatgtattttcaagattattctgtgcactttaaatttacttaacttaccataaatgcagtgtgacttttcccacacactggattgtgaggctcttaacttcttaaaagtataatggcatcttgtgaatcctataagcagtctttatgtctcttaacattcacacctactttttaaaaacaaatattattactatttttattattgtttgtcctttataaattttcttaaagattaagaaaatttaagaccccattgagttactgtaatgcaattcaactttgagttatcttttaaatatgtcttgtatagttcatattcatggctgaaacttgaccacactattgctgattgtatggttttcacctggacaccgtgtagaatgcttgattacttgtactcttcttatgctaatatgctctgggctggagaaatgaaatcctcaagccatcaggatttgctatttaagtggcttgacaactgggccaccaaagaacttgaacttcaccttttaggatttgagctgttctggaacacattgctgcactttggaaagtcaaaatcaagtgccagtggcgccctttccatagagaatttgcccagctttgctttaaaagatgtcttgttttttatatacacataatcaataggtccaatctgctctcaaggccttggtcctggtgggattccttcaccaattactttaattaaaaatggctgcaactgtaagaacccttgtctgatatatttgcaactatgctcccatttacaaatgtaccttctaatgctcagttgccaggttccaatgcaaaggtggcgtggactccctttgtgtgggtggggtttgtgggtagtggtgaaggaccgatatcagaaaaatgccttcaagtgtactaatttattaataaacattaggtgtttgtta

SEQ ID NO: 4348 - DNA, 2267 bp, Homo sapiens
  source 1..2267: mol_type = genomic DNA
agctgctgccgtccatggaggccactgggggcgagaagtccagcacgcccatcaaggcccaagaggggacatcctagacagaacctacacaagcattttgacatcaatgagcatttgccctggatgattgtgcttttcctgctgctggtgcttgtggtgattgtggtgtgcagtatccggaaaagctcgaggactctgaaaaaggggccccggcaggatcccagtgccattgtggaaaaggcagggctgaagaaatccatgactccaacccagaaccgggagaaatggatctactactgcaatggccatggtatcgatatcctgaagcttgtagcagcccaagtgggaagccagtggaaagatatctatcagtttctttgcaatgccagtgagagggaggttgctgctttctccaatgggtacacagccgaccacgagcgggcctacgcagctctgcagcactggaccatccggggccccgaggccagcctcgcccagctaattagcgccctgcgccagcaccggagaaacgatgttgtggagaagattcgtgggctgatggaagacaccacccagctggaaactgacaaactagctctcccgatgagccccagcccgcttagcccgagccccatccccagccccaacgcgaaacttgagaattccgctctcctgacggtggagccttccccacaggacaagaacaagggcttcttcgtggatgagtcggagccccttctccgctgtgactctacatccagcggctcctccgcgctgagcaggaacggttcctttattaccaaagaaaagaaggacacagtgttgcggcaggtacgcctggacccctgtgacttgcagcctatctttgatgacatgctccactttctaaatcctgaggagctgcgggtgattgaagagattccccaggctgaggacaaactagaccggctattcgaaattattggagtcaagagccaggaagccagccagaccctcctggactctgtttatagccatcttcctgacctgctgtagaacatagggatactgcattctggaaattactcaatttagtggcagggtggttttttaattttcttctgtttctgatttttgttgtttggggtgtgtgtgtgtgtttgtgtgtgtgtgtgtgtgtgtgtgtgtgtgtgtgtttaacagagaatatggccagtgcttgagttctttctccttctctctctctcttttttttttaaataactcttctgggaagttggtttataagcctttgccaggtgtaactgttgtgaaatacccaccactaaagttttttaagttccatattttctccattttgccttcttatgtattttcaagattattctgtgcactttaaatttacttaacttaccataaatgcagtgtgacttttcccacacactggattgtgaggctcttaacttcttaaaagtataatggcatcttgtgaatcctataagcagtctttatgtctcttaacattcacacctactttttaaaaacaaatattattactatttttattattgtttgtcctttataaattttcttaaagattaagaaaatttaagaccccattgagttactgtaatgcaattcaactttgagttatcttttaaatatgtcttgtatagttcatattcatggctgaaacttgaccacactattgctgattgtatggttttcacctggacaccgtgtagaatgcttgattacttgtactcttcttatgctaatatgctctgggctggagaaatgaaatcctcaagccatcaggatttgctatttaagtggcttgacaactgggccaccaaagaacttgaacttcaccttttaggatttgagctgttctggaacacattgctgcactttggaaagtcaaaatcaagtgccagtggcgccctttccatagagaatttgcccagctttgctttaaaagatgtcttgttttttatatacacataatcaataggtccaatctgctctcaaggccttggtcctggtgggattccttcaccaattactttaattaaaaatggctgcaactgtaagaacccttgtctgatatatttgcaactatgctcccatttacaaatgtaccttctaatgctcagttgccaggttccaatgcaaaggtggcgtggactccctttgtgtgggtggggtttgtgggtagtggtgaaggaccgatatcagaaaaatgccttcaagtgtactaatttattaataaacattaggtgtttgtt

SEQ ID NO: 4349 - DNA, 1119 bp, Homo sapiens
  source 1..1119: mol_type = genomic DNA
atggagcagcggccgcggggctgcgcggcggtggcggcggcgctcctcctggtgctgctgggggcccgggcccagggcggcactcgtagccccaggtgtgactgtgccggtgacttccacaagaagattggtctgttttgttgcagaggctgcccagcggcctcccaggtggcgctggagaactgttcagcagtggccgacacccgctgtggctgtaagccaggctggtttgtggagtgccaggtcagccaatgtgtcagcagttcacccttctactgccaaccatgcctagactgcggggccctgcaccgccacacacggctactctgttcccgcagagatactgactgtgggacctgcctgcctggcttctatgaacatggcgatggctgcgtgtcctgccccacgagcaccctggggagctgtccagagcgctgtgccgctgtctgtggctggaggcagatgttctgggtccaggtgctcctggctggccttgtggtccccctcctgcttggggccaccctgacctacacataccgccactgctggcctcacaagcccctggttactgcagatgaagctgggatggaggctctgaccccaccaccggccacccatctgtcacccttggacagcgcccacacccttctagcacctcctgacagcagtgagaagatctgcaccgtccagttggtgggtaacagctggacccctggctaccccgagacccaggaggcgctctgcccgcaggtgacatggtcctgggaccagttgcccagcagagctcttggccccgctgctgcgcccacactctcgccagagtccccagccggctcgccagccatgatgctgcagccgggcccgcagctctacgacgtgatggacgcggtcccagcgcggcgctggaaggagttcgtgcgcacgctggggctgcgcgaggcagagatcgaagccgtggaggtggagatcggccgcttccgagaccagcagtacgagatgctcaagcgctggcgccagcagcagcccgcgggcctcggagccgtttacgcggccctggagcgcatggggctggacggctgcgtggaagacttgcgcagccgcctgcagcgcggcccgtga

SEQ ID NO: 4350 - DNA, 705 bp, Homo sapiens
  source 1..705: mol_type = genomic DNA
atggagcagcggccgcggggctgcgcggcggtggcggcggcgctcctcctggtgctgctgggggcccgggcccagggcggcactcgtagccccaggtgtgactgtgccggtgacttccacaagaagattggtctgttttgttgcagaggctgcccagcggatgaagctgggatggaggctctgaccccaccaccggccacccatctgtcacccttggacagcgcccacacccttctagcacctcctgacagcagtgagaagatctgcaccgtccagttggtgggtaacagctggacccctggctaccccgagacccaggaggcgctctgcccgcaggtgacatggtcctgggaccagttgcccagcagagctcttggccccgctgctgcgcccacactctcgccagagtccccagccggctcgccagccatgatgctgcagccgggcccgcagctctacgacgtgatggacgcggtcccagcgcggcgctggaaggagttcgtgcgcacgctggggctgcgcgaggcagagatcgaagccgtggaggtggagatcggccgcttccgagaccagcagtacgagatgctcaagcgctggcgccagcagcagcccgcgggcctcggagccgtttacgcggccctggagcgcatggggctggacggctgcgtggaagacttgcgcagccgcctgcagcgcggcccgtga

SEQ ID NO: 4351 - DNA, 1441 bp, Homo sapiens
  source 1..1441: mol_type = genomic DNA
ctgaaggcggaaccacgacgggcagagagcacggagccgggaagcccctgggcgcccgtcggagggctatggagcagcggccgcggggctgcgcggcggtggcggcggcgctcctcctggtgctgctgggggcccgggcccagggcggcactcgtagccccaggtgtgactgtgccggtgacttccacaagaagattggtctgttttgttgcagaggctgcccagcggggcactacctgaaggccccttgcacggagccctgcggcaactccacctgccttgtgtgtccccaagacaccttcttggcctgggagaaccaccataattctgaatgtgcccgctgccaggcctgtgatgagcaggcctcccaggtggcgctggagaactgttcagcagtggccgacacccgctgtggctgtaagccaggctggtttgtggagtgccaggtcagccaatgtgtcagcagttcacccttctactgccaaccatgcctagactgcggggccctgcaccgccacacacggctactctgttcccgcagagatactgactgtgggacctgcctgcctggcttctatgaacatggcgatggctgcgtgtcctgccccacgagcaccctggggagctgtccagagcgctgtgccgctgtctgtggctggaggcagaatgaagctgggatggaggctctgaccccaccaccggccacccatctgtcacccttggacagcgcccacacccttctagcacctcctgacagcagtgagaagatctgcaccgtccagttggtgggtaacagctggacccctggctaccccgagacccaggaggcgctctgcccgcaggtgacatggtcctgggaccagttgcccagcagagctcttggccccgctgctgcgcccacactctcgccagagtccccagccggctcgccagccatgatgctgcagccgggcccgcagctctacgacgtgatggacgcggtcccagcgcggcgctggaaggagttcgtgcgcacgctggggctgcgcgaggcagagatcgaagccgtggaggtggagatcggccgcttccgagaccagcagtacgagatgctcaagcgctggcgccagcagcagcccgcgggcctcggagccgtttacgcggccctggagcgcatggggctggacggctgcgtggaagacttgcgcagccgcctgcagcgcggcccgtgacacggcgcccacttgccacctaggcgctctggtggcccttgcagaagccctaagtacggttacttatgcgtgtagacattttatgtcacttattaagccgctggcacggccctgcgtagcagcaccagccggccccacccctgctcgcccctatcgctccagccaaggcgaagaagcacgaacgaatgtcgagagggggtgaagacatttctcaacttctcggccggagt

SEQ ID NO: 4352 - DNA, 1625 bp, Homo sapiens
  source 1..1625: mol_type = genomic DNA
cgggccctgcgggcgcggggctgaaggcggaaccacgacgggcagagagcacggagccgggaagcccctgggcgcccgtcggagggctatggagcagcggccgcggggctgcgcggcggtggcggcggcgctcctcctggtgctgctgggggcccgggcccagggcggcactcgtagccccaggtgtgactgtgccggtgacttccacaagaagattggtctgttttgttgcagaggctgcccagcggggcactacctgaaggccccttgcacggagccctgcggcaactccacctgccttgtgtgtccccaagacaccttcttggcctgggagaaccaccataattctgaatgtgcccgctgccaggcctgtgatgagcaggcctcccaggtggcgctggagaactgttcagcagtggccgacacccgctgtggctgtaagccaggctggtttgtggagtgccaggtcagccaatgtgtcagcagttcacccttctactgccaaccatgcctagactgcggggccctgcaccgccacacacggctactctgttcccgcagagatactgactgtgggacctgcctgcctggcttctatgaacatggcgatggctgcgtgtcctgccccacgagcaccctggggagctgtccagagcgctgtgccgctgtctgtggctggaggcagatgttctgggtccaggtgctcctggctggccttgtggtccccctcctgcttggggccaccctgacctacacataccgccactgctggcctcacaagcccctggttactgcagatgaagctgggatggaggctctgaccccaccaccggccacccatctgtcacccttggacagcgcccacacccttctagcacctcctgacagcagtgagaagatctgcaccgtccagttggtgggtaacagctggacccctggctaccccgagacccaggaggcgctctgcccgcaggtgacatggtcctgggaccagttgcccagcagagctcttggccccgctgctgcgcccacactctcgccagagtccccagccggctcgccagccatgatgctgcagccgggcccgcagctctacgacgtgatggacgcggtcccagcgcggcgctggaaggagttcgtgcgcacgctggggctgcgcgaggcagagatcgaagccgtggaggtggagatcggccgcttccgagaccagcagtacgagatgctcaagcgctggcgccagcagcagcccgcgggcctcggagccgtttacgcggccctggagcgcatggggctggacggctgcgtggaagacttgcgcagccgcctgcagcgcggcccgtgacacggcgcccacttgccacctaggcgctctggtggcccttgcagaagccctaagtacggttacttatgcgtgtagacattttatgtcacttattaagccgctggcacggccctgcgtagcagcaccagccggccccacccctgctcgcccctatcgctccagccaaggcgaagaagcacgaacgaatgtcgagagggggtgaagacatttctcaacttctcggccggagtttggctgagatcgcggtattaaatctgtgaaagaaaacaaaacaaaacaaaaa

SEQ ID NO: 4353 - DNA, 1632 bp, Homo sapiens
  source 1..1632: mol_type = genomic DNA
ctgaaggcggaaccacgacgggcagagagcacggagccgggaagcccctgggcgcccgtcggagggctatggagcagcggccgcggggctgcgcggcggtggcggcggcgctcctcctggtgctgctgggggcccgggcccagggcggcactcgtagccccaggtgtgactgtgccggtgacttccacaagaagattggtctgttttgttgcagaggctgcccagcggggcactacctgaaggccccttgcacggagccctgcggcaactccacctgccttgtgtgtccccaagacaccttcttggcctgggagaaccaccataattctgaatgtgcccgctgccaggcctgtgatgagcaggcctcccaggtggcgctggagaactgttcagcagtggccgacacccgctgtggctgtaagccaggctggtttgtggagtgccaggtcagccaatgtgtcagcagttcacccttctactgccaaccatgcctagactgcggggccctgcaccgccacacacggctactctgttcccgcagagatactgactgtgggacctgcctgcctggcttctatgaacatggcgatggctgcgtgtcctgccccacgccacccccgtcccttgcaggagcaccctggggagctgtccagagcgctgtgccgctgtctgtggctggaggcagagtaggtgtgttctgggtccaggtgctcctggctggccttgtggtccccctcctgcttggggccaccctgacctacacataccgccactgctggcctcacaagcccctggttactgcagatgaagctgggatggaggctctgaccccaccaccggccacccatctgtcacccttggacagcgcccacacccttctagcacctcctgacagcagtgagaagatctgcaccgtccagttggtgggtaacagctggacccctggctaccccgagacccaggaggcgctctgcccgcaggtgacatggtcctgggaccagttgcccagcagagctcttggccccgctgctgcgcccacactctcgccagagtccccagccggctcgccagccatgatgctgcagccgggcccgcagctctacgacgtgatggacgcggtcccagcgcggcgctggaaggagttcgtgcgcacgctggggctgcgcgaggcagagatcgaagccgtggaggtggagatcggccgcttccgagaccagcagtacgagatgctcaagcgctggcgccagcagcagcccgcgggcctcggagccgtttacgcggccctggagcgcatggggctggacggctgcgtggaagacttgcgcagccgcctgcagcgcggcccgtgacacggcgcccacttgccacctaggcgctctggtggcccttgcagaagccctaagtacggttacttatgcgtgtagacattttatgtcacttattaagccgctggcacggccctgcgtagcagcaccagccggccccacccctgctcgcccctatcgctccagccaaggcgaagaagcacgaacgaatgtcgagagggggtgaagacatttctcaacttctcggccggagtttggctgagatcgcggtattaaatctgtgaaagaaaacaaaacaaaacaaaaa

SEQ ID NO: 4354 - DNA, 1923 bp, Homo sapiens
  source 1..1923: mol_type = genomic DNA
gtgtttgacctgaagtcctctcgagctgcagaagcctgaagaccaaggagtggaaagttctccggcagccctgagatctcaagagtgacatttgtgagaccagctaatttgattaaaattctcttggaatcagctttgctagtatcatacctgtgccagatttcatcatgggaaacagctgttacaacatagtagccactctgttgctggtcctcaactttgagaggacaagatcattgcaggatccttgtagtaactgcccagctggtacattctgtgataataacaggaatcagatttgcagtccctgtcctccaaatagtttctccagcgcaggtggacaaaggacctgtgacatatgcaggcagtgtaaaggtgttttcaggaccaggaaggagtgttcctccaccagcaatgcagagtgtgactgcactccagggtttcactgcctgggggcaggatgcagcatgtgtgaacaggattgtaaacaaggtcaagaactgacaaaaaaaggttgtaaagactgttgctttgggacatttaacgatcagaaacgtggcatctgtcgaccctggacaaactgttctttggatggaaagtctgtgcttgtgaatgggacgaaggagagggacgtggtctgtggaccatctccagccgacctctctccgggagcatcctctgtgaccccgcctgcccctgcgagagagccaggacactctccgcagatcatctccttctttcttgcgctgacgtcgactgcgttgctcttcctgctgttcttcctcacgctccgtttctctgttgttaaacggggcagaaagaaactcctgtatatattcaaacaaccatttatgagaccagtacaaactactcaagaggaagatggctgtagctgccgatttccagaagaagaagaaggaggatgtgaactgtgaaatggaagtcaatagggctgttgggactttcttgaaaagaagcaaggaaatatgagtcatccgctatcacagctttcaaaagcaagaacaccatcctacataatacccaggattcccccaacacacgttcttttctaaatgccaatgagttggcctttaaaaatgcaccactttttttttttttttgacagggtctcactctgtcacccaggctggagtgcagtggcaccaccatggctctctgcagccttgacctctgggagctcaagtgatcctcctgcctcagtctcctgagtagctggaactacaaggaagggccaccacacctgactaacttttttgttttttgtttggtaaagatggcatttcaccatgttgtacaggctggtctcaaactcctaggttcactttggcctcccaaagtgctgggattacagacatgaactgccaggcccggccaaaataatgcaccacttttaacagaacagacagatgaggacagagctggtgataaaaaaaaaaaaaaaaaagcattttctagataccacttaacaggtttgagctagtttttttgaaatccaaagaaaattatagtttaaattcaattacatagtccagtggtccaactataattataatcaaaatcaatgcaggtttgttttttggtgctaatatgacatatgacaataagccacgaggtgcagtaagtacccgactaaagtttccgtgggttctgtcatgtaacacgacatgctccaccgtcaggggggagtatgagcagagtgcctgagtttagggtcaaggacaaaaaacctcaggcctggaggaagttttggaaagagttcaagtgtctgtatatcctatggtcttctccatcctcacaccttctgcctttgtcctgctcccttttaagccaggttacattctaaaaattcttaacttttaacataatattttataccaaagccaataaatgaactgcatatga

SEQ ID NO: 4355 - DNA, 6346 bp, Homo sapiens
  source 1..6346: mol_type = genomic DNA
gaggggagccatcttgtccctctctgcctccgagtttgtatcgttgcctccatctgtgtctgtgtgtctgtattatcgttgtttggcgtgtttttttttttttttgttttttgtcactgcctgcctgggtcctgcccgaggtctccatcctcggtttccctgtccttgccccgggccctgggagtgctctggaaggctgcgcagtattggaggggacagaatgaccttccggccttgagtccctggggagcagatggaccctactggaagtcagttggattcagatttctctcagcaagatactccttgcctgataattgaagattctcagcctgaaagccaggttctagaggatgattctggttctcacttcagtatgctatctcgacaccttcctaatctccagacgcacaaagaaaatcctgtgttggatgttgtgtccaatcctgaacaaacagctggagaagaacgaggagacggtaatagtgggttcaatgaacatttgaaagaaaacaaggttgcagaccctgtggattcttctaacttggacacatgtggttccatcagtcaggtcattgagcagttacctcagccaaacaggacaagcagtgttctgggaatgtcagtggaatctgctcctgctgtggaggaagagaagggagaagagttggaacagaaggagaaagagaaggaagaagatacttcaggcaatactacacattcccttggtgctgaagatactgcctcatcacagttgggttttggggttctggaactctcccagagccaggatgttgaggaaaatactgtgccatatgaagtggacaaagagcagctacaatcagtaaccaccaactctggttataccaggctgtctgatgtggatgctaatactgcaattaagcatgaagaacagtccaacgaagatatccccatagcagaacagtccagcaaggacatccctgtgacagcacagcccagtaaggatgtacatgttgtaaaagagcaaaatccaccacctgcaaggtcagaggacatgccttttagccccaaagcatctgttgctgctatggaagcaaaagaacagttgtctgcacaagaacttatggaaagtggactgcagattcagaagtcaccagagcctgaggttttgtcaactcaggaagacttgtttgaccagagcaataaaacagtatcttctgatggttgctctactccttcaagggaggaaggtgggtgttctttggcttccactcctgccaccactctgcatctcctgcagctctctggtcagaggtcccttgttcaggacagtctttccacgaattcttcagatcttgttgctccttctcctgatgctttccgatctactccttttatcgttcctagcagtcccacagagcaagaagggagacaagataagccaatggacacgtcagtgttatctgaagaaggaggagagccttttcagaagaaacttcaaagtggtgaaccagtggagttagaaaacccccctctcctgcctgagtccactgtatcaccacaagcctcaacaccaatatctcagagcacaccagtcttccctcctgggtcacttcctatcccatcccagcctcagttttctcatgacatttttattccttccccaagtctggaagaacaatcaaatgatgggaagaaagatggagatatgcatagttcatctttgacagttgagtgttctaaaacttcagagattgaaccaaagaattcccctgaggatcttgggctatctttgacaggggattcttgcaagttgatgctttctacaagtgaatatagtcagtccccaaagatggagagcttgagttctcacagaattgatgaagatggagaaaacacacagattgaggatacggaacccatgtctccagttctcaattctaaatttgttcctgctgaaaatgatagtatcctgatgaatccagcacaggatggtgaagtacaactgagtcagaatgatgacaaaacaaagggagatgatacagacaccagggatgacattagtattttagccactggttgcaagggcagagaagaaacggtagcagaagatgtttgtattgatctcacttgtgattcggggagtcaggcagttccgtcaccagctactcgatctgaggcactttctagtgtgttagatcaggaggaagctatggaaattaaagaacaccatccagaggaggggtcttcagggtctgaggtggaagaaatccctgagacaccttgtgaaagtcaaggagaggaactcaaagaagaaaatatggagagtgttccgttgcacctttctctgactgaaactcagtcccaagggttgtgtcttcaaaaggaaatgccaaaaaaagaatgctcagaagctatggaagttgaaaccagtgtgattagtattgattcccctcaaaagttggcaatacttgaccaagaattggaacataaggaacaggaagcttgggaagaagctacttcagaggactccagtgttgtcattgtagatgtgaaagagccatctcccagagttgatgtttcttgtgaacctttggagggagtggagaagtgctcagattcccagtcatgggaggatattgctccagaaatagaaccatgtgctgagaatagattagacaccaaggaagaaaagagtgtagaatatgaaggagatctgaaatcagggactgcagaaacagaacctgtagagcaagattcttcacagccttccttacctttagtgagagcagatgatcctttaagacttgaccaggagttgcagcagccccaaactcaggagaaaacaagtaattcattaacagaagactcaaaaatggctaatgcaaagcagctaagctcagatgcagaggcccagaagctggggaagccctctgcccatgcctcacaaagcttctgtgaaagttctagtgaaaccccatttcatttcactttgcctaaagaaggtgatatcatcccaccattgactggtgcaaccccacctcttattgggcacctaaaattggagcccaagagacacagtactcctattggtattagcaactatccagaaagcaccatagcaaccagtgatgtcatgtctgaaagcatggtggagacccatgatcccatacttgggagtggaaaaggggattctggggctgccccagacgtggatgataaattatgtctaagaatgaaactggttagtcctgagactgaggcgagtgaagagtctttgcagttcaacctggaaaagcctgcaactggtgaaagaaaaaatggatctactgctgttgctgagtctgttgccagtccccagaagaccatgtctgtgttgagctgtatctgtgaagccaggcaagagaatgaggctcgaagtgaggatccccccaccacacccatcagggggaacttgctccactttccaagttctcaaggagaagaggagaaagaaaaattggagggtgaccatacaatcaggcagagtcaacagcctatgaagcccattagtcctgtcaaggaccctgtttctcctgcttcccagaagatggtcatacaagggccatccagtcctcaaggagaggcaatggtgacagatgtgctagaagaccagaaagaaggacggagtactaataaggaaaatcctagtaaggccttgattgaaaggcccagccaaaataacataggaatccaaaccatggagtgttccttgagggtcccagaaactgtttcagcagcaacccagactataaagaatgtgtgtgagcaggggaccagtacagtggaccagaactttggaaagcaagatgccacagttcagactgagagggggagtggtgagaaaccagtcagtgctcctggggatgatacagagtcgctccatagccagggagaagaagagtttgatatgcctcagcctccacatggccatgtcttacatcgtcacatgagaacaatccgggaagtacgcacacttgtcactcgtgtcattacagatgtgtattatgtggatggaacagaagtagaaagaaaagtaactgaggagactgaagagccaattgtagagtgtcaggagtgtgaaactgaagtttccccttcacagactgggggctcctcaggtgacctgggggatatcagctccttctcctccaaggcatccagcttacaccgcacatcaagtgggacaagtctctcagctatgcacagcagtggaagctcagggaaaggagccggaccactcagagggaaaaccagcgggacagaacccgcagattttgccttacccagctcccgaggaggcccaggaaaactgagtcctagaaaaggggtcagtcagacagggacgccagtgtgtgaggaggatggtgatgcaggccttggcatcagacagggagggaaggctccagtcacgcctcgtgggcgtgggcgaaggggccgcccaccttctcggaccactggaaccagagaaacagctgtgcctggccccttgggcatagaggacatttcacctaacttgtcaccagatgataaatccttcagccgtgtcgtgccccgagtgccagactccaccagacgaacagatgtgggtgctggtgctttgcgtcgtagtgactctccagaaattcctttccaggctgctgctggcccttctgatggcttagatgcctcctctccaggaaatagctttgtagggctccgtgttgtagccaagtggtcatccaatggctacttttactctgggaaaatcacacgagatgtcggagctgggaagtataaattgctctttgatgatgggtacgaatgtgatgtgttgggcaaagacattctgttatgtgaccccatcccgctggacactgaagtgacggccctctcggaggatgagtatttcagtgcaggagtggtgaaaggacataggaaggagtctggggaactgtactacagcattgaaaaagaaggccaaagaaagtggtataagcgaatggctgtcatcctgtccttggagcaaggaaacagactgagagagcagtatgggcttggcccctatgaagcagtaacacctcttacaaaggcagcagatatcagcttagacaatttggtggaagggaagcggaaacggcgcagtaacgtcagctccccagccacccctactgcctccagtagcagcagcacaacccctacccgaaagatcacagaaagtcctcgtgcctccatgggagttctctcaggcaaaagaaaacttatcacttctgaagaggaacggtcccctgccaagcgaggtcgcaagtctgccacagtaaaacctggtgcagtaggggcaggagagtttgtgagcccctgtgagagtggagacaacaccggtgaaccctctgccctggaagagcagagagggcctttgcctctcaacaagaccttgtttctgggctacgcatttctccttaccatggccacaaccagtgacaagttggccagccgctccaaactgccagatggtcctacaggaagcagtgaagaagaggaggaatttttggaaattcctcctttcaacaagcagtatacagaatcccagcttcgagcaggagctggctatatccttgaagatttcaatgaagcccagtgtaacacagcttaccagtgtcttctaattgcggatcagcattgtcgaacccggaagtacttcctgtgccttgccagtgggattccttgtgtgtctcatgtctgggtccatgatagttgccatgccaaccagctccagaactaccgtaattatctgttgccagctgggtacagccttgaggagcaaagaattctggactggcaaccccgtgaaaatcctttccagaatctgaaggtactcttggtatcagaccaacagcagaacttcctggagctctggtctgagatcctcatgactggtggtgcagcctctgtgaagcagcaccattcaagtgcccataacaaagatattgctttaggggtatttgatgtggtggtgacggacccctcatgcccagcctcggtgctgaagtgtgctgaagcattgcagctgcctgtggtgtcacaagagtgggtgatccagtgcctcattgttggggagagaattggattcaagcagcatccaaaatataaacacgattatgtttctcactaaagatacttggtcttactggttttattccctgctatcgtggagattgtgttttaaccaggttttaaatgtgtcttgtgtgtaactggattccttgcatggatcttgtatatagttttatttgctgaacttttatgataaaataaatgttgaatctctttggttgtagtaactggg

SEQ ID NO: 4356 - DNA, 6015 bp, Homo sapiens
  source 1..6015: mol_type = genomic DNA
ctggagggacttggggagcgtgcagagacctctagctcgagcgcgagggacctcccgccgggatgcctggggagcagatggaccctactggaagtcagttggattcagatttctctcagcaagatactccttgcctgataattgaagattctcagcctgaaagccaggttctagaggatgattctggttctcacttcagtatgctatctcgacaccttcctaatctccagacgcacaaagaaaatcctgtgttggatgttgtgtccaatcctgaacaaacagctggagaagaacgaggagacggtaatagtgggttcaatgaacatttgaaagaaaacaaggttgcagaccctgtggattcttctaacttggacacatgtggttccatcagtcaggtcattgagcagttacctcagccaaacaggacaagcagtgttctgggaatgtcagtggaatctgctcctgctgtggaggaagagaagggagaagagttggaacagaaggagaaagagaaggaagaagatacttcaggcaatactacacattcccttggtgctgaagatactgcctcatcacagttgggttttggggttctggaactctcccagagccaggatgttgaggaaaatactgtgccatatgaagtggacaaagagcagctacaatcagtaaccaccaactctggttataccaggctgtctgatgtggatgctaatactgcaattaagcatgaagaacagtccaacgaagatatccccatagcagaacagtccagcaaggacatccctgtgacagcacagcccagtaaggatgtacatgttgtaaaagagcaaaatccaccacctgcaaggtcagaggacatgccttttagccccaaagcatctgttgctgctatggaagcaaaagaacagttgtctgcacaagaacttatggaaagtggactgcagattcagaagtcaccagagcctgaggttttgtcaactcaggaagacttgtttgaccagagcaataaaacagtatcttctgatggttgctctactccttcaagggaggaaggtgggtgttctttggcttccactcctgccaccactctgcatctcctgcagctctctggtcagaggtcccttgttcaggacagtctttccacgaattcttcagatcttgttgctccttctcctgatgctttccgatctactccttttatcgttcctagcagtcccacagagcaagaagggagacaagataagccaatggacacgtcagtgttatctgaagaaggaggagagccttttcagaagaaacttcaaagtggtgaaccagtggagttagaaaacccccctctcctgcctgagtccactgtatcaccacaagcctcaacaccaatatctcagagcacaccagtcttccctcctgggtcacttcctatcccatcccagcctcagttttctcatgacatttttattccttccccaagtctggaagaacaatcaaatgatgggaagaaagatggagatatgcatagttcatctttgacagttgagtgttctaaaacttcagagattgaaccaaagaattcccctgaggatcttgggctatctttgacaggggattcttgcaagttgatgctttctacaagtgaatatagtcagtccccaaagatggagagcttgagttctcacagaattgatgaagatggagaaaacacacagattgaggatacggaacccatgtctccagttctcaattctaaatttgttcctgctgaaaatgatagtatcctgatgaatccagcacaggatggtgaagtacaactgagtcagaatgatgacaaaacaaagggagatgatacagacaccagggatgacattagtattttagccactggttgcaagggcagagaagaaacggtagcagaagatgtttgtattgatctcacttgtgattcggggagtcaggcagttccgtcaccagctactcgatctgaggcactttctagtgtgttagatcaggaggaagctatggaaattaaagaacaccatccagaggaggggtcttcagggtctgaggtggaagaaatccctgagacaccttgtgaaagtcaaggagaggaactcaaagaagaaaatatggagagtgttccgttgcacctttctctgactgaaactcagtcccaagggttgtgtcttcaaaaggaaatgccaaaaaaagaatgctcagaagctatggaagttgaaaccagtgtgattagtattgattcccctcaaaagttggcaatacttgaccaagaattggaacataaggaacaggaagcttgggaagaagctacttcagaggactccagtgttgtcattgtagatgtgaaagagccatctcccagagttgatgtttcttgtgaacctttggagggagtggagaagtgctcagattcccagtcatgggaggatattgctccagaaatagaaccatgtgctgagaatagattagacaccaaggaagaaaagagtgtagaatatgaaggagatctgaaatcagggactgcagaaacagaacctgtagagcaagattcttcacagccttccttacctttagtgagagcagatgatcctttaagacttgaccaggagttgcagcagccccaaactcaggagaaaacaagtaattcattaacagaagactcaaaaatggctaatgcaaagcagctaagctcagatgcagaggcccagaagctggggaagccctctgcccatgcctcacaaagcttctgtgaaagttctagtgaaaccccatttcatttcactttgcctaaagaaggtgatatcatcccaccattgactggtgcaaccccacctcttattgggcacctaaaattggagcccaagagacacagtactcctattggtattagcaactatccagaaagcaccatagcaaccagtgatgtcatgtctgaaagcatggtggagacccatgatcccatacttgggagtggaaaaggggattctggggctgccccagacgtggatgataaattatgtctaagaatgaaactggttagtcctgagactgaggcgagtgaagagtctttgcagttcaacctggaaaagcctgcaactggtgaaagaaaaaatggatctactgctgttgctgagtctgttgccagtccccagaagaccatgtctgtgttgagctgtatctgtgaagccaggcaagagaatgaggctcgaagtgaggatccccccaccacacccatcagggggaacttgctccactttccaagttctcaaggagaagaggagaaagaaaaattggagggtgaccatacaatcaggcagagtcaacagcctatgaagcccattagtcctgtcaaggaccctgtttctcctgcttcccagaagatggtcatacaagggccatccagtcctcaaggagaggcaatggtgacagatgtgctagaagaccagaaagaaggacggagtactaataaggaaaatcctagtaaggccttgattgaaaggcccagccaaaataacataggaatccaaaccatggagtgttccttgagggtcccagaaactgtttcagcagcaacccagactataaagaatgtgtgtgagcaggggaccagtacagtggaccagaactttggaaagcaagatgccacagttcagactgagagggggagtggtgagaaaccagtcagtgctcctggggatgatacagagtcgctccatagccagggagaagaagagtttgatatgcctcagcctccacatggccatgtcttacatcgtcacatgagaacaatccgggaagtacgcacacttgtcactcgtgtcattacagatgtgtattatgtggatggaacagaagtagaaagaaaagtaactgaggagactgaagagccaattgtagagtgtcaggagtgtgaaactgaagtttccccttcacagactgggggctcctcaggtgacctgggggatatcagctccttctcctccaaggcatccagcttacaccgcacatcaagtgggacaagtctctcagctatgcacagcagtggaagctcagggaaaggagccggaccactcagagggaaaaccagcgggacagaacccgcagattttgccttacccagctcccgaggaggcccaggaaaactgagagaaacagctgtgcctggccccttgggcatagaggacatttcacctaacttgtcaccagatgataaatccttcagccgtgtcgtgccccgagtgccagactccaccagacgaacagatgtgggtgctggtgctttgcgtcgtagtgactctccagaaattcctttccaggctgctgctggcccttctgatggcttagatgcctcctctccaggaaatagctttgtagggctccgtgttgtagccaagtggtcatccaatggctacttttactctgggaaaatcacacgagatgtcggagctgggaagtataaattgctctttgatgatgggtacgaatgtgatgtgttgggcaaagacattctgttatgtgaccccatcccgctggacactgaagtgacggccctctcggaggatgagtatttcagtgcaggagtggtgaaaggacataggaaggagtctggggaactgtactacagcattgaaaaagaaggccaaagaaagtggtataagcgaatggctgtcatcctgtccttggagcaaggaaacagactgagagagcagtatgggcttggcccctatgaagcagtaacacctcttacaaaggcagcagatatcagcttagacaatttggtggaagggaagcggaaacggcgcagtaacgtcagctccccagccacccctactgcctccagtagcagcagcacaacccctacccgaaagatcacagaaagtcctcgtgcctccatgggagttctctcaggcaaaagaaaacttatcacttctgaagaggaacggtcccctgccaagcgaggtcgcaagtctgccacagtaaaacctggtgcagtaggggcaggagagtttgtgagcccctgtgagagtggagacaacaccggtgaaccctctgccctggaagagcagagagggcctttgcctctcaacaagaccttgtttctgggctacgcatttctccttaccatggccacaaccagtgacaagttggccagccgctccaaactgccagatggtcctacaggaagcagtgaagaagaggaggaatttttggaaattcctcctttcaacaagcagtatacagaatcccagcttcgagcaggagctggctatatccttgaagatttcaatgaagcccagtgtaacacagcttaccagtgtcttctaattgcggatcagcattgtcgaacccggaagtacttcctgtgccttgccagtgggattccttgtgtgtctcatgtctgggtccatgatagttgccatgccaaccagctccagaactaccgtaattatctgttgccagctgggtacagccttgaggagcaaagaattctggactggcaaccccgtgaaaatcctttccagaatctgaaggtactcttggtatcagaccaacagcagaacttcctggagctctggtctgagatcctcatgactggtggtgcagcctctgtgaagcagcaccattcaagtgcccataacaaagatattgctttaggggtatttgatgtggtggtgacggacccctcatgcccagcctcggtgctgaagtgtgctgaagcattgcagctgcctgtggtgtcacaagagtgggtgatccagtgcctcattgttggggagagaattggattcaagcagcatccaaaatataaacacgattatgtttctcactaaagatacttggtcttactggttttattccctgctatcgtggagattgtgttttaaccaggttttaaatgtgtcttgtgtgtaactggattccttgcatggatcttgtatatagttttatttgctgaacttttatgataaaataaatgttgaatctctttggttgtagtaa

SEQ ID NO: 4357 - DNA, 6231 bp, Homo sapiens
  source 1..6231: mol_type = genomic DNA
gtgacgggaaagggggagttcgcggccggtggcggcggtggcgacagcggcgacctagggatcgatctggagggacttggggagcgtgcagagacctctagctcgagcgcgagggacctcccgccgggatgcctggggagcagatggaccctactggaagtcagttggattcagatttctctcagcaagatactccttgcctgataattgaagattctcagcctgaaagccaggttctagaggatgattctggttctcacttcagtatgctatctcgacaccttcctaatctccagacgcacaaagaaaatcctgtgttggatgttgtgtccaatcctgaacaaacagctggagaagaacgaggagacggtaatagtgggttcaatgaacatttgaaagaaaacaaggttgcagaccctgtggattcttctaacttggacacatgtggttccatcagtcaggtcattgagcagttacctcagccaaacaggacaagcagtgttctgggaatgtcagtggaatctgctcctgctgtggaggaagagaagggagaagagttggaacagaaggagaaagagaaggaagaagatacttcaggcaatactacacattcccttggtgctgaagatactgcctcatcacagttgggttttggggttctggaactctcccagagccaggatgttgaggaaaatactgtgccatatgaagtggacaaagagcagctacaatcagtaaccaccaactctggttataccaggctgtctgatgtggatgctaatactgcaattaagcatgaagaacagtccaacgaagatatccccatagcagaacagtccagcaaggacatccctgtgacagcacagcccagtaaggatgtacatgttgtaaaagagcaaaatccaccacctgcaaggtcagaggacatgccttttagccccaaagcatctgttgctgctatggaagcaaaagaacagttgtctgcacaagaacttatggaaagtggactgcagattcagaagtcaccagagcctgaggttttgtcaactcaggaagacttgtttgaccagagcaataaaacagtatcttctgatggttgctctactccttcaagggaggaaggtgggtgttctttggcttccactcctgccaccactctgcatctcctgcagctctctggtcagaggtcccttgttcaggacagtctttccacgaattcttcagatcttgttgctccttctcctgatgctttccgatctactccttttatcgttcctagcagtcccacagagcaagaagggagacaagataagccaatggacacgtcagtgttatctgaagaaggaggagagccttttcagaagaaacttcaaagtggtgaaccagtggagttagaaaacccccctctcctgcctgagtccactgtatcaccacaagcctcaacaccaatatctcagagcacaccagtcttccctcctgggtcacttcctatcccatcccagcctcagttttctcatgacatttttattccttccccaagtctggaagaacaatcaaatgatgggaagaaagatggagatatgcatagttcatctttgacagttgagtgttctaaaacttcagagattgaaccaaagaattcccctgaggatcttgggctatctttgacaggggattcttgcaagttgatgctttctacaagtgaatatagtcagtccccaaagatggagagcttgagttctcacagaattgatgaagatggagaaaacacacagattgaggatacggaacccatgtctccagttctcaattctaaatttgttcctgctgaaaatgatagtatcctgatgaatccagcacaggatggtgaagtacaactgagtcagaatgatgacaaaacaaagggagatgatacagacaccagggatgacattagtattttagccactggttgcaagggcagagaagaaacggtagcagaagatgtttgtattgatctcacttgtgattcggggagtcaggcagttccgtcaccagctactcgatctgaggcactttctagtgtgttagatcaggaggaagctatggaaattaaagaacaccatccagaggaggggtcttcagggtctgaggtggaagaaatccctgagacaccttgtgaaagtcaaggagaggaactcaaagaagaaaatatggagagtgttccgttgcacctttctctgactgaaactcagtcccaagggttgtgtcttcaaaaggaaatgccaaaaaaagaatgctcagaagctatggaagttgaaaccagtgtgattagtattgattcccctcaaaagttggcaatacttgaccaagaattggaacataaggaacaggaagcttgggaagaagctacttcagaggactccagtgttgtcattgtagatgtgaaagagccatctcccagagttgatgtttcttgtgaacctttggagggagtggagaagtgctcagattcccagtcatgggaggatattgctccagaaatagaaccatgtgctgagaatagattagacaccaaggaagaaaagagtgtagaatatgaaggagatctgaaatcagggactgcagaaacagaacctgtagagcaagattcttcacagccttccttacctttagtgagagcagatgatcctttaagacttgaccaggagttgcagcagccccaaactcaggagaaaacaagtaattcattaacagaagactcaaaaatggctaatgcaaagcagctaagctcagatgcagaggcccagaagctggggaagccctctgcccatgcctcacaaagcttctgtgaaagttctagtgaaaccccatttcatttcactttgcctaaagaaggtgatatcatcccaccattgactggtgcaaccccacctcttattgggcacctaaaattggagcccaagagacacagtactcctattggtattagcaactatccagaaagcaccatagcaaccagtgatgtcatgtctgaaagcatggtggagacccatgatcccatacttgggagtggaaaaggggattctggggctgccccagacgtggatgataaattatgtctaagaatgaaactggttagtcctgagactgaggcgagtgaagagtctttgcagttcaacctggaaaagcctgcaactggtgaaagaaaaaatggatctactgctgttgctgagtctgttgccagtccccagaagaccatgtctgtgttgagctgtatctgtgaagccaggcaagagaatgaggctcgaagtgaggatccccccaccacacccatcagggggaacttgctccactttccaagttctcaaggagaagaggagaaagaaaaattggagggtgaccatacaatcaggcagagtcaacagcctatgaagcccattagtcctgtcaaggaccctgtttctcctgcttcccagaagatggtcatacaagggccatccagtcctcaaggagaggcaatggtgacagatgtgctagaagaccagaaagaaggacggagtactaataaggaaaatcctagtaaggccttgattgaaaggcccagccaaaataacataggaatccaaaccatggagtgttccttgagggtcccagaaactgtttcagcagcaacccagactataaagaatgtgtgtgagcaggggaccagtacagtggaccagaactttggaaagcaagatgccacagttcagactgagagggggagtggtgagaaaccagtcagtgctcctggggatgatacagagtcgctccatagccagggagaagaagagtttgatatgcctcagcctccacatggccatgtcttacatcgtcacatgagaacaatccgggaagtacgcacacttgtcactcgtgtcattacagatgtgtattatgtggatggaacagaagtagaaagaaaagtaactgaggagactgaagagccaattgtagagtgtcaggagtgtgaaactgaagtttccccttcacagactgggggctcctcaggtgacctgggggatatcagctccttctcctccaaggcatccagcttacaccgcacatcaagtgggacaagtctctcagctatgcacagcagtggaagctcagggaaaggagccggaccactcagagggaaaaccagcgggacagaacccgcagattttgccttacccagctcccgaggaggcccaggaaaactgagtcctagaaaaggggtcagtcagacagggacgccagtgtgtgaggaggatggtgatgcaggccttggcatcagacagggagggaaggctccagtcacgcctcgtgggcgtgggcgaaggggccgcccaccttctcggaccactggaaccagagaaacagctgtgcctggccccttgggcatagaggacatttcacctaacttgtcaccagatgataaatccttcagccgtgtcgtgccccgagtgccagactccaccagacgaacagatgtgggtgctggtgctttgcgtcgtagtgactctccagaaattcctttccaggctgctgctggcccttctgatggcttagatgcctcctctccaggaaatagctttgtagggctccgtgttgtagccaagtggtcatccaatggctacttttactctgggaaaatcacacgagatgtcggagctgggaagtataaattgctctttgatgatgggtacgaatgtgatgtgttgggcaaagacattctgttatgtgaccccatcccgctggacactgaagtgacggccctctcggaggatgagtatttcagtgcaggagtggtgaaaggacataggaaggagtctggggaactgtactacagcattgaaaaagaaggccaaagaaagtggtataagcgaatggctgtcatcctgtccttggagcaaggaaacagactgagagagcagtatgggcttggcccctatgaagcagtaacacctcttacaaaggcagcagatatcagcttagacaatttggtggaagggaagcggaaacggcgcagtaacgtcagctccccagccacccctactgcctccagtagcagcagcacaacccctacccgaaagatcacagaaagtcctcgtgcctccatgggagttctctcaggcaaaagaaaacttatcacttctgaagaggaacggtcccctgccaagcgaggtcgcaagtctgccacagtaaaacctggtgcagtaggggcaggagagtttgtgagcccctgtgagagtggagacaacaccggtgaaccctctgccctggaagagcagagagggcctttgcctctcaacaagaccttgtttctgggctacgcatttctccttaccatggccacaaccagtgacaagttggccagccgctccaaactgccagatggtcctacaggaagcagtgaagaagaggaggaatttttggaaattcctcctttcaacaagcagtatacagaatcccagcttcgagcaggagctggctatatccttgaagatttcaatgaagcccagtgtaacacagcttaccagtgtcttctaattgcggatcagcattgtcgaacccggaagtacttcctgtgccttgccagtgggattccttgtgtgtctcatgtctgggtccatgatagttgccatgccaaccagctccagaactaccgtaattatctgttgccagctgggtacagccttgaggagcaaagaattctggactggcaaccccgtgaaaatcctttccagaatctgaaggtactcttggtatcagaccaacagcagaacttcctggagctctggtctgagatcctcatgactggtggtgcagcctctgtgaagcagcaccattcaagtgcccataacaaagatattgctttaggggtatttgatgtggtggtgacggacccctcatgcccagcctcggtgctgaagtgtgctgaagcattgcagctgcctgtggtgtcacaagagtgggtgatccagtgcctcattgttggggagagaattggattcaagcagcatccaaaatataaacacgattatgtttctcactaaagatacttggtcttactggttttattccctgctatcgtggagattgtgttttaaccaggttttaaatgtgtcttgtgtgtaactggattccttgcatggatcttgtatatagttttatttgctgaacttttatgataaaataaatgttgaatctctttggttgtagtaa

SEQ ID NO: 4358 - DNA, 6210 bp, Homo sapiens
  source 1..6210: mol_type = genomic DNA
gagttcgcggccggtggcggcggtggcgacagcggcgacctagggatcgatctggagggacttggggagcgtgcagagacctctagctcgagcgcgagggacctcccgccgggatgcctggggagcagatggaccctactggaagtcagttggattcagatttctctcagcaagatactccttgcctgataattgaagattctcagcctgaaagccaggttctagaggatgattctggttctcacttcagtatgctatctcgacaccttcctaatctccagacgcacaaagaaaatcctgtgttggatgttgtgtccaatcctgaacaaacagctggagaagaacgaggagacggtaatagtgggttcaatgaacatttgaaagaaaacaaggttgcagaccctgtggattcttctaacttggacacatgtggttccatcagtcaggtcattgagcagttacctcagccaaacaggacaagcagtgttctgggaatgtcagtggaatctgctcctgctgtggaggaagagaagggagaagagttggaacagaaggagaaagagaaggaagaagatacttcaggcaatactacacattcccttggtgctgaagatactgcctcatcacagttgggttttggggttctggaactctcccagagccaggatgttgaggaaaatactgtgccatatgaagtggacaaagagcagctacaatcagtaaccaccaactctggttataccaggctgtctgatgtggatgctaatactgcaattaagcatgaagaacagtccaacgaagatatccccatagcagaacagtccagcaaggacatccctgtgacagcacagcccagtaaggatgtacatgttgtaaaagagcaaaatccaccacctgcaaggtcagaggacatgccttttagccccaaagcatctgttgctgctatggaagcaaaagaacagttgtctgcacaagaacttatggaaagtggactgcagattcagaagtcaccagagcctgaggttttgtcaactcaggaagacttgtttgaccagagcaataaaacagtatcttctgatggttgctctactccttcaagggaggaaggtgggtgttctttggcttccactcctgccaccactctgcatctcctgcagctctctggtcagaggtcccttgttcaggacagtctttccacgaattcttcagatcttgttgctccttctcctgatgctttccgatctactccttttatcgttcctagcagtcccacagagcaagaagggagacaagataagccaatggacacgtcagtgttatctgaagaaggaggagagccttttcagaagaaacttcaaagtggtgaaccagtggagttagaaaacccccctctcctgcctgagtccactgtatcaccacaagcctcaacaccaatatctcagagcacaccagtcttccctcctgggtcacttcctatcccatcccagcctcagttttctcatgacatttttattccttccccaagtctggaagaacaatcaaatgatgggaagaaagatggagatatgcatagttcatctttgacagttgagtgttctaaaacttcagagattgaaccaaagaattcccctgaggatcttgggctatctttgacaggggattcttgcaagttgatgctttctacaagtgaatatagtcagtccccaaagatggagagcttgagttctcacagaattgatgaagatggagaaaacacacagattgaggatacggaacccatgtctccagttctcaattctaaatttgttcctgctgaaaatgatagtatcctgatgaatccagcacaggatggtgaagtacaactgagtcagaatgatgacaaaacaaagggagatgatacagacaccagggatgacattagtattttagccactggttgcaagggcagagaagaaacggtagcagaagatgtttgtattgatctcacttgtgattcggggagtcaggcagttccgtcaccagctactcgatctgaggcactttctagtgtgttagatcaggaggaagctatggaaattaaagaacaccatccagaggaggggtcttcagggtctgaggtggaagaaatccctgagacaccttgtgaaagtcaaggagaggaactcaaagaagaaaatatggagagtgttccgttgcacctttctctgactgaaactcagtcccaagggttgtgtcttcaaaaggaaatgccaaaaaaagaatgctcagaagctatggaagttgaaaccagtgtgattagtattgattcccctcaaaagttggcaatacttgaccaagaattggaacataaggaacaggaagcttgggaagaagctacttcagaggactccagtgttgtcattgtagatgtgaaagagccatctcccagagttgatgtttcttgtgaacctttggagggagtggagaagtgctcagattcccagtcatgggaggatattgctccagaaatagaaccatgtgctgagaatagattagacaccaaggaagaaaagagtgtagaatatgaaggagatctgaaatcagggactgcagaaacagaacctgtagagcaagattcttcacagccttccttacctttagtgagagcagatgatcctttaagacttgaccaggagttgcagcagccccaaactcaggagaaaacaagtaattcattaacagaagactcaaaaatggctaatgcaaagcagctaagctcagatgcagaggcccagaagctggggaagccctctgcccatgcctcacaaagcttctgtgaaagttctagtgaaaccccatttcatttcactttgcctaaagaaggtgatatcatcccaccattgactggtgcaaccccacctcttattgggcacctaaaattggagcccaagagacacagtactcctattggtattagcaactatccagaaagcaccatagcaaccagtgatgtcatgtctgaaagcatggtggagacccatgatcccatacttgggagtggaaaaggggattctggggctgccccagacgtggatgataaattatgtctaagaatgaaactggttagtcctgagactgaggcgagtgaagagtctttgcagttcaacctggaaaagcctgcaactggtgaaagaaaaaatggatctactgctgttgctgagtctgttgccagtccccagaagaccatgtctgtgttgagctgtatctgtgaagccaggcaagagaatgaggctcgaagtgaggatccccccaccacacccatcagggggaacttgctccactttccaagttctcaaggagaagaggagaaagaaaaattggagggtgaccatacaatcaggcagagtcaacagcctatgaagcccattagtcctgtcaaggaccctgtttctcctgcttcccagaagatggtcatacaagggccatccagtcctcaaggagaggcaatggtgacagatgtgctagaagaccagaaagaaggacggagtactaataaggaaaatcctagtaaggccttgattgaaaggcccagccaaaataacataggaatccaaaccatggagtgttccttgagggtcccagaaactgtttcagcagcaacccagactataaagaatgtgtgtgagcaggggaccagtacagtggaccagaactttggaaagcaagatgccacagttcagactgagagggggagtggtgagaaaccagtcagtgctcctggggatgatacagagtcgctccatagccagggagaagaagagtttgatatgcctcagcctccacatggccatgtcttacatcgtcacatgagaacaatccgggaagtacgcacacttgtcactcgtgtcattacagatgtgtattatgtggatggaacagaagtagaaagaaaagtaactgaggagactgaagagccaattgtagagtgtcaggagtgtgaaactgaagtttccccttcacagactgggggctcctcaggtgacctgggggatatcagctccttctcctccaaggcatccagcttacaccgcacatcaagtgggacaagtctctcagctatgcacagcagtggaagctcagggaaaggagccggaccactcagagggaaaaccagcgggacagaacccgcagattttgccttacccagctcccgaggaggcccaggaaaactgagtcctagaaaaggggtcagtcagacagggacgccagtgtgtgaggaggatggtgatgcaggccttggcatcagacagggagggaaggctccagtcacgcctcgtgggcgtgggcgaaggggccgcccaccttctcggaccactggaaccagagaaacagctgtgcctggccccttgggcatagaggacatttcacctaacttgtcaccagatgataaatccttcagccgtgtcgtgccccgagtgccagactccaccagacgaacagatgtgggtgctggtgctttgcgtcgtagtgactctccagaaattcctttccaggctgctgctggcccttctgatggcttagatgcctcctctccaggaaatagctttgtagggctccgtgttgtagccaagtggtcatccaatggctacttttactctgggaaaatcacacgagatgtcggagctgggaagtataaattgctctttgatgatgggtacgaatgtgatgtgttgggcaaagacattctgttatgtgaccccatcccgctggacactgaagtgacggccctctcggaggatgagtatttcagtgcaggagtggtgaaaggacataggaaggagtctggggaactgtactacagcattgaaaaagaaggccaaagaaagtggtataagcgaatggctgtcatcctgtccttggagcaaggaaacagactgagagagcagtatgggcttggcccctatgaagcagtaacacctcttacaaaggcagcagatatcagcttagacaatttggtggaagggaagcggaaacggcgcagtaacgtcagctccccagccacccctactgcctccagtagcagcagcacaacccctacccgaaagatcacagaaagtcctcgtgcctccatgggagttctctcaggcaaaagaaaacttatcacttctgaagaggaacggtcccctgccaagcgaggtcgcaagtctgccacagtaaaacctgtaggggcaggagagtttgtgagcccctgtgagagtggagacaacaccggtgaaccctctgccctggaagagcagagagggcctttgcctctcaacaagaccttgtttctgggctacgcatttctccttaccatggccacaaccagtgacaagttggccagccgctccaaactgccagatggtcctacaggaagcagtgaagaagaggaggaatttttggaaattcctcctttcaacaagcagtatacagaatcccagcttcgagcaggagctggctatatccttgaagatttcaatgaagcccagtgtaacacagcttaccagtgtcttctaattgcggatcagcattgtcgaacccggaagtacttcctgtgccttgccagtgggattccttgtgtgtctcatgtctgggtccatgatagttgccatgccaaccagctccagaactaccgtaattatctgttgccagctgggtacagccttgaggagcaaagaattctggactggcaaccccgtgaaaatcctttccagaatctgaaggtactcttggtatcagaccaacagcagaacttcctggagctctggtctgagatcctcatgactggtggtgcagcctctgtgaagcagcaccattcaagtgcccataacaaagatattgctttaggggtatttgatgtggtggtgacggacccctcatgcccagcctcggtgctgaagtgtgctgaagcattgcagctgcctgtggtgtcacaagagtgggtgatccagtgcctcattgttggggagagaattggattcaagcagcatccaaaatataaacacgattatgtttctcactaaagatacttggtcttactggttttattccctgctatcgtggagattgtgttttaaccaggttttaaatgtgtcttgtgtgtaactggattccttgcatggatcttgtatatagttttatttgctgaacttttatgataaaataaatgttgaatctctttggttgtagtaa

SEQ ID NO: 4359 - DNA, 2557 bp, Homo sapiens
  source 1..2557: mol_type = genomic DNA
aggggacgcagcgaaaccggggcccgcgccaggccagccgggacggacgccgatgcccggggctgcgacggctgcagagcgagctgccctcggaggccggcgtggggaagatggcccagtccaccgccacctcccctgatgggggcaccacgtttgagcacctctggagctctctggaaccagacagcacctacttcgaccttccccagtcaagccgggggaataatgaggtggtgggcggaacggattccagcatggacgtcttccacctggagggcatgactacatctgtcatggcccagttcaatctgctgagcagcaccatggaccagatgagcagccgcgcggcctcggccagcccctacaccccagagcacgccgccagcgtgcccacccactcgccctacgcacaacccagctccaccttcgacaccatgtcgccggcgcctgtcatcccctccaacaccgactaccccggaccccaccactttgaggtcactttccagcagtccagcacggccaagtcagccacctggacgtactccccgctcttgaagaaactctactgccagatcgccaagacatgccccatccagatcaaggtgtccaccccgccacccccaggcaccgccatccgggccatgcctgtttacaagaaagcggagcacgtgaccgacgtcgtgaaacgctgccccaaccacgagctcgggagggacttcaacgaaggacagtctgctccagccagccacctcatccgcgtggaaggcaataatctctcgcagtatgtggatgaccctgtcaccggcaggcagagcgtcgtggtgccctatgagccaccacaggtggggacggaattcaccaccatcctgtacaacttcatgtgtaacagcagctgtgtagggggcatgaaccggcggcccatcctcatcatcatcaccctggagatgcgggatgggcaggtgctgggccgccggtcctttgagggccgcatctgcgcctgtcctggccgcgaccgaaaagctgatgaggaccactaccgggagcagcaggccctgaacgagagctccgccaagaacggggccgccagcaagcgtgccttcaagcagagcccccctgccgtccccgcccttggtgccggtgtgaagaagcggcggcatggagacgaggacacgtactaccttcaggtgcgaggccgggagaactttgagatcctgatgaagctgaaagagagcctggagctgatggagttggtgccgcagccactggtggactcctatcggcagcagcagcagctcctacagaggccttttttaacaggattggggtgtccaaactgcatcgagtatttcacctcccaagggttacagagcatttaccacctgcagaacctgaccattgaggacctgggggccctgaagatccccgagcagtaccgcatgaccatctggcggggcctgcaggacctgaagcagggccacgactacagcaccgcgcagcagctgctccgctctagcaacgcggccaccatctccatcggcggctcaggggaactgcagcgccagcgggtcatggaggccgtgcacttccgcgtgcgccacaccatcaccatccccaaccgcggcggcccaggcggcggccctgacgagtgggcggacttcggcttcgacctgcccgactgcaaggcccgcaagcagcccatcaaggaggagttcacggaggccgagatccactgagggcctcgcctggctgcagcctgcgccaccgcccagagacccaagctgcctcccctctccttcctgtgtgtccaaaactgcctcaggaggcaggaccttcgggctgtgcccggggaaaggcaaggtccggcccatccccaggcacctcacaggccccaggaaaggcccagccaccgaagccgcctgtggacagcctgagtcacctgcagaaccttctggagctgccctagtgctgggcttgtggggcgggggctggcccactctcagccctgccactgccccggcgtgctccatggcaggcgtgggtggggaccgcagcgtcggctccgacttccaggcttcatcctagagactgtcatctcccaaccaggcgaggtccttccaaaggaaaggatcctctttgctgatggactgccaaaaagtattttgcgacatcttttggttctggatagtagtgagcagccaagtgactgtgtctgaaacaccagtgtattttcagggaatgtccctaactgcgtcttgcccgcgccgggggctggggactctctctgctggacttgggactggcctctgcccccagcacgctgtattctgcaggaccgcctccttcctgcccctaacaacaaccacagtgttgctgaaattggagaaaactggggagggcgcaaccccccccaggcgcggggaagcatgtggtaccgcctcagccagtgcccctcagcctggccacagtcgcctctcctcggggacccctcagcagaaagggacagcctgtccttagaggactggaaattgtcaatatttgataaaatgatacccttttc

SEQ ID NO: 4360 - DNA, 2140 bp, Homo sapiens
  source 1..2140: mol_type = genomic DNA
aggggacgcagcgaaaccggggcccgcgccaggccagccgggacggacgccgatgcccggggctgcgacggctgcagagcgagctgccctcggaggccggcgtggggaagatggcccagtccaccgccacctcccctgatgggggcaccacgtttgagcacctctggagctctctggaaccagacagcacctacttcgaccttccccagtcaagccgggggaataatgaggtggtgggcggaacggattccagcatggacgtcttccacctggagggcatgactacatctgtcatggcccagttcaatctgctgagcagcaccatggaccagatgagcagccgcgcggcctcggccagcccctacaccccagagcacgccgccagcgtgcccacccactcgccctacgcacaacccagctccaccttcgacaccatgtcgccggcgcctgtcatcccctccaacaccgactaccccggaccccaccactttgaggtcactttccagcagtccagcacggccaagtcagccacctggacgtactccccgctcttgaagaaactctactgccagatcgccaagacatgccccatccagatcaaggtgtccaccccgccacccccaggcaccgccatccgggccatgcctgtttacaagaaagcggagcacgtgaccgacgtcgtgaaacgctgccccaaccacgagctcgggagggacttcaacgaaggacagtctgctccagccagccacctcatccgcgtggaaggcaataatctctcgcagtatgtggatgaccctgtcaccggcaggcagagcgtcgtggtgccctatgagccaccacaggtggggacggaattcaccaccatcctgtacaacttcatgtgtaacagcagctgtgtagggggcatgaaccggcggcccatcctcatcatcatcaccctggagatgcgggatgggcaggtgctgggccgccggtcctttgagggccgcatctgcgcctgtcctggccgcgaccgaaaagctgatgaggaccactaccgggagcagcaggccctgaacgagagctccgccaagaacggggccgccagcaagcgtgccttcaagcagagcccccctgccgtccccgcccttggtgccggtgtgaagaagcggcggcatggagacgaggacacgtactaccttcaggtgcgaggccgggagaactttgagatcctgatgaagctgaaagagagcctggagctgatggagttggtgccgcagccactggtggactcctatcggcagcagcagcagctcctacagaggccgagtcacctacagcccccgtcctacgggccggtcctctcgcccatgaacaaggtgcacgggggcatgaacaagctgccctccgtcaaccagctggtgggccagcctcccccgcacagttcggcagctacacccaacctggggcccgtgggccccgggatgctcaacaaccatggccacgcagtgccagccaacggcgagatgagcagcagccacagcgcccagtccatggtctcggggtcccactgcactccgccacccccctaccacgccgaccccagcctcgtcaggacctgggggccctgaagatccccgagcagtaccgcatgaccatctggcggggcctgcaggacctgaagcagggccacgactacagcaccgcgcagcagctgctccgctctagcaacgcggccaccatctccatcggcggctcaggggaactgcagcgccagcgggtcatggaggccgtgcacttccgcgtgcgccacaccatcaccatccccaaccgcggcggcccaggcggcggccctgacgagtgggcggacttcggcttcgacctgcccgactgcaaggcccgcaagcagcccatcaaggaggagttcacggaggccgagatccactgagggcctcgcctggctgcagcctgcgccaccgcccagagacccaagctgcctcccctctccttcctgtgtgtccaaaactgcctcaggaggcaggaccttcgggctgtgcccggggaaaggcaaggtccggcccatccccaggcacctcacaggccccaggaaaggcccagccaccgaagccgcctgtggacagcctgagtcacctgcagaacc

SEQ ID NO: 4361 - DNA, 2602 bp, Homo sapiens
  source 1..2602: mol_type = genomic DNA
aggggacgcagcgaaaccggggcccgcgccaggccagccgggacggacgccgatgcccggggctgcgacggctgcagagcgagctgccctcggaggccggcgtggggaagatggcccagtccaccgccacctcccctgatgggggcaccacgtttgagcacctctggagctctctggaaccagacagcacctacttcgaccttccccagtcaagccgggggaataatgaggtggtgggcggaacggattccagcatggacgtcttccacctggagggcatgactacatctgtcatggcccagttcaatctgctgagcagcaccatggaccagatgagcagccgcgcggcctcggccagcccctacaccccagagcacgccgccagcgtgcccacccactcgccctacgcacaacccagctccaccttcgacaccatgtcgccggcgcctgtcatcccctccaacaccgactaccccggaccccaccactttgaggtcactttccagcagtccagcacggccaagtcagccacctggacgtactccccgctcttgaagaaactctactgccagatcgccaagacatgccccatccagatcaaggtgtccaccccgccacccccaggcaccgccatccgggccatgcctgtttacaagaaagcggagcacgtgaccgacgtcgtgaaacgctgccccaaccacgagctcgggagggacttcaacgaaggacagtctgctccagccagccacctcatccgcgtggaaggcaataatctctcgcagtatgtggatgaccctgtcaccggcaggcagagcgtcgtggtgccctatgagccaccacaggtggggacggaattcaccaccatcctgtacaacttcatgtgtaacagcagctgtgtagggggcatgaaccggcggcccatcctcatcatcatcaccctggagatgcgggatgggcaggtgctgggccgccggtcctttgagggccgcatctgcgcctgtcctggccgcgaccgaaaagctgatgaggaccactaccgggagcagcaggccctgaacgagagctccgccaagaacggggccgccagcaagcgtgccttcaagcagagcccccctgccgtccccgcccttggtgccggtgtgaagaagcggcggcatggagacgaggacacgtactaccttcaggtgcgaggccgggagaactttgagatcctgatgaagctgaaagagagcctggagctgatggagttggtgccgcagccactggtggactcctatcggcagcagcagcagctcctacagaggccgccccgggatgctcaacaaccatggccacgcagtgccagccaacggcgagatgagcagcagccacagcgcccagtccatggtctcggggtcccactgcactccgccacccccctaccacgccgaccccagcctcgtcaggacctgggggccctgaagatccccgagcagtaccgcatgaccatctggcggggcctgcaggacctgaagcagggccacgactacagcaccgcgcagcagctgctccgctctagcaacgcggccaccatctccatcggcggctcaggggaactgcagcgccagcgggtcatggaggccgtgcacttccgcgtgcgccacaccatcaccatccccaaccgcggcggcccaggcggcggccctgacgagtgggcggacttcggcttcgacctgcccgactgcaaggcccgcaagcagcccatcaaggaggagttcacggaggccgagatccactgagggcctcgcctggctgcagcctgcgccaccgcccagagacccaagctgcctcccctctccttcctgtgtgtccaaaactgcctcaggaggcaggaccttcgggctgtgcccggggaaaggcaaggtccggcccatccccaggcacctcacaggccccaggaaaggcccagccaccgaagccgcctgtggacagcctgagtcacctgcagaaccttctggagctgccctagtgctgggcttgtggggcgggggctggcccactctcagccctgccactgccccggcgtgctccatggcaggcgtgggtggggaccgcagcgtcggctccgacttccaggcttcatcctagagactgtcatctcccaaccaggcgaggtccttccaaaggaaaggatcctctttgctgatggactgccaaaaagtattttgcgacatcttttggttctggatagtagtgagcagccaagtgactgtgtctgaaacaccagtgtattttcagggaatgtccctaactgcgtcttgcccgcgccgggggctggggactctctctgctggacttgggactggcctctgcccccagcacgctgtattctgcaggaccgcctccttcctgcccctaacaacaaccacagtgttgctgaaattggagaaaactggggagggcgcaaccccccccaggcgcggggaagcatgtggtaccgcctcagccagtgcccctcagcctggccacagtcgcctctcctcggggacccctcagcagaaagggacagcctgtccttagaggactggaaattgtcaatatttgataaaatgatacccttttc

SEQ ID NO: 4362 - DNA, 2062 bp, Homo sapiens
  source 1..2062: mol_type = genomic DNA
ggattcagccagttgacagaactaagggagatgggaaaagcgaaaatgccaacaaacggcccgcatgttccccagcatcctcggctcctgcctcactagctgcggagcctctcccgctcggtccacgctgccgggcggccacgaccgtgacccttcccctcgggccgcccagatccatgcctcgtcccacgggacaccagttccctggcgtgtgcagaccccccggcgcctaccatgctgtacgtcggtgaccccgcacggcacctcgccacggcccagttcaatctgctgagcagcaccatggaccagatgagcagccgcgcggcctcggccagcccctacaccccagagcacgccgccagcgtgcccacccactcgccctacgcacaacccagctccaccttcgacaccatgtcgccggcgcctgtcatcccctccaacaccgactaccccggaccccaccactttgaggtcactttccagcagtccagcacggccaagtcagccacctggacgtactccccgctcttgaagaaactctactgccagatcgccaagacatgccccatccagatcaaggtgtccaccccgccacccccaggcaccgccatccgggccatgcctgtttacaagaaagcggagcacgtgaccgacgtcgtgaaacgctgccccaaccacgagctcgggagggacttcaacgaaggacagtctgctccagccagccacctcatccgcgtggaaggcaataatctctcgcagtatgtggatgaccctgtcaccggcaggcagagcgtcgtggtgccctatgagccaccacaggtggggacggaattcaccaccatcctgtacaacttcatgtgtaacagcagctgtgtagggggcatgaaccggcggcccatcctcatcatcatcaccctggagatgcgggatgggcaggtgctgggccgccggtcctttgagggccgcatctgcgcctgtcctggccgcgaccgaaaagctgatgaggaccactaccgggagcagcaggccctgaacgagagctccgccaagaacggggccgccagcaagcgtgccttcaagcagagcccccctgccgtccccgcccttggtgccggtgtgaagaagcggcggcatggagacgaggacacgtactaccttcaggtgcgaggccgggagaactttgagatcctgatgaagctgaaagagagcctggagctgatggagttggtgccgcagccactggtggactcctatcggcagcagcagcagctcctacagaggccgccccgggatgctcaacaaccatggccacgcagtgccagccaacggcgagatgagcagcagccacagcgcccagtccatggtctcggggtcccactgcactccgccacccccctaccacgccgaccccagcctcgtcagttttttaacaggattggggtgtccaaactgcatcgagtatttcacctcccaagggttacagagcatttaccacctgcagaacctgaccattgaggacctgggggccctgaagatccccgagcagtaccgcatgaccatctggcggggcctgcaggacctgaagcagggccacgactacagcaccgcgcagcagctgctccgctctagcaacgcggccaccatctccatcggcggctcaggggaactgcagcgccagcgggtcatggaggccgtgcacttccgcgtgcgccacaccatcaccatccccaaccgcggcggcccaggcggcggccctgacgagtgggcggacttcggcttcgacctgcccgactgcaaggcccgcaagcagcccatcaaggaggagttcacggaggccgagatccactgagggcctcgcctggctgcagcctgcgccaccgcccagagacccaagctgcctcccctctccttcctgtgtgtccaaaactgcctcaggaggcaggaccttcgggctgtgcccggggaaaggcaaggtccggcccatccccaggcacctcacaggccccaggaaaggcccagccaccgaagccgcctgtggacagcctgagtcacctgcagaacc

SEQ ID NO: 4363 - DNA, 2117 bp, Homo sapiens
  source 1..2117: mol_type = genomic DNA
ggattcagccagttgacagaactaagggagatgggaaaagcgaaaatgccaacaaacggcccgcatgttccccagcatcctcggctcctgcctcactagctgcggagcctctcccgctcggtccacgctgccgggcggccacgaccgtgacccttcccctcgggccgcccagatccatgcctcgtcccacgggacaccagttccctggcgtgtgcagaccccccggcgcctaccatgctgtacgtcggtgaccccgcacggcacctcgccacggcccagttcaatctgctgagcagcaccatggaccagatgagcagccgcgcggcctcggccagcccctacaccccagagcacgccgccagcgtgcccacccactcgccctacgcacaacccagctccaccttcgacaccatgtcgccggcgcctgtcatcccctccaacaccgactaccccggaccccaccactttgaggtcactttccagcagtccagcacggccaagtcagccacctggacgtactccccgctcttgaagaaactctactgccagatcgccaagacatgccccatccagatcaaggtgtccaccccgccacccccaggcaccgccatccgggccatgcctgtttacaagaaagcggagcacgtgaccgacgtcgtgaaacgctgccccaaccacgagctcgggagggacttcaacgaaggacagtctgctccagccagccacctcatccgcgtggaaggcaataatctctcgcagtatgtggatgaccctgtcaccggcaggcagagcgtcgtggtgccctatgagccaccacaggtggggacggaattcaccaccatcctgtacaacttcatgtgtaacagcagctgtgtagggggcatgaaccggcggcccatcctcatcatcatcaccctggagatgcgggatgggcaggtgctgggccgccggtcctttgagggccgcatctgcgcctgtcctggccgcgaccgaaaagctgatgaggaccactaccgggagcagcaggccctgaacgagagctccgccaagaacggggccgccagcaagcgtgccttcaagcagagcccccctgccgtccccgcccttggtgccggtgtgaagaagcggcggcatggagacgaggacacgtactaccttcaggtgcgaggccgggagaactttgagatcctgatgaagctgaaagagagcctggagctgatggagttggtgccgcagccactggtggactcctatcggcagcagcagcagctcctacagaggccgagtcacctacagcccccgtcctacgggccggtcctctcgcccatgaacaaggtgcacgggggcatgaacaagctgccctccgtcaaccagctggtgggccagcctcccccgcacagttcggcagctacacccaacctggggcccgtgggccccgggatgctcaacaaccatggccacgcagtgccagccaacggcgagatgagcagcagccacagcgcccagtccatggtctcggggtcccactgcactccgccacccccctaccacgccgaccccagcctcgtcaggacctgggggccctgaagatccccgagcagtaccgcatgaccatctggcggggcctgcaggacctgaagcagggccacgactacagcaccgcgcagcagctgctccgctctagcaacgcggccaccatctccatcggcggctcaggggaactgcagcgccagcgggtcatggaggccgtgcacttccgcgtgcgccacaccatcaccatccccaaccgcggcggcccaggcggcggccctgacgagtgggcggacttcggcttcgacctgcccgactgcaaggcccgcaagcagcccatcaaggaggagttcacggaggccgagatccactgagggcctcgcctggctgcagcctgcgccaccgcccagagacccaagctgcctcccctctccttcctgtgtgtccaaaactgcctcaggaggcaggaccttcgggctgtgcccggggaaaggcaaggtccggcccatccccaggcacctcacaggccccaggaaaggcccagccaccgaagccgcctgtggacagcctgagtcacctgcagaacc

SEQ ID NO: 4364 - DNA, 5120 bp, Homo sapiens
  source 1..5120: mol_type = genomic DNA
ggattcagccagttgacagaactaagggagatgggaaaagcgaaaatgccaacaaacggcccgcatgttccccagcatcctcggctcctgcctcactagctgcggagcctctcccgctcggtccacgctgccgggcggccacgaccgtgacccttcccctcgggccgcccagatccatgcctcgtcccacgggacaccagttccctggcgtgtgcagaccccccggcgcctaccatgctgtacgtcggtgaccccgcacggcacctcgccacggcccagttcaatctgctgagcagcaccatggaccagatgagcagccgcgcggcctcggccagcccctacaccccagagcacgccgccagcgtgcccacccactcgccctacgcacaacccagctccaccttcgacaccatgtcgccggcgcctgtcatcccctccaacaccgactaccccggaccccaccactttgaggtcactttccagcagtccagcacggccaagtcagccacctggacgtactccccgctcttgaagaaactctactgccagatcgccaagacatgccccatccagatcaaggtgtccaccccgccacccccaggcaccgccatccgggccatgcctgtttacaagaaagcggagcacgtgaccgacgtcgtgaaacgctgccccaaccacgagctcgggagggacttcaacgaaggacagtctgctccagccagccacctcatccgcgtggaaggcaataatctctcgcagtatgtggatgaccctgtcaccggcaggcagagcgtcgtggtgccctatgagccaccacaggtggggacggaattcaccaccatcctgtacaacttcatgtgtaacagcagctgtgtagggggcatgaaccggcggcccatcctcatcatcatcaccctggagatgcgggatgggcaggtgctgggccgccggtcctttgagggccgcatctgcgcctgtcctggccgcgaccgaaaagctgatgaggaccactaccgggagcagcaggccctgaacgagagctccgccaagaacggggccgccagcaagcgtgccttcaagcagagcccccctgccgtccccgcccttggtgccggtgtgaagaagcggcggcatggagacgaggacacgtactaccttcaggtgcgaggccgggagaactttgagatcctgatgaagctgaaagagagcctggagctgatggagttggtgccgcagccactggtggactcctatcggcagcagcagcagctcctacagaggccgagtcacctacagcccccgtcctacgggccggtcctctcgcccatgaacaaggtgcacgggggcatgaacaagctgccctccgtcaaccagctggtgggccagcctcccccgcacagttcggcagctacacccaacctggggcccgtgggccccgggatgctcaacaaccatggccacgcagtgccagccaacggcgagatgagcagcagccacagcgcccagtccatggtctcggggtcccactgcactccgccacccccctaccacgccgaccccagcctcgtcagttttttaacaggattggggtgtccaaactgcatcgagtatttcacctcccaagggttacagagcatttaccacctgcagaacctgaccattgaggacctgggggccctgaagatccccgagcagtaccgcatgaccatctggcggggcctgcaggacctgaagcagggccacgactacagcaccgcgcagcagctgctccgctctagcaacgcggccaccatctccatcggcggctcaggggaactgcagcgccagcgggtcatggaggccgtgcacttccgcgtgcgccacaccatcaccatccccaaccgcggcggcccaggcggcggccctgacgagtgggcggacttcggcttcgacctgcccgactgcaaggcccgcaagcagcccatcaaggaggagttcacggaggccgagatccactgagggcctcgcctggctgcagcctgcgccaccgcccagagacccaagctgcctcccctctccttcctgtgtgtccaaaactgcctcaggaggcaggaccttcgggctgtgcccggggaaaggcaaggtccggcccatccccaggcacctcacaggccccaggaaaggcccagccaccgaagccgcctgtggacagcctgagtcacctgcagaaccttctggagctgccctagtgctgggcttgtggggcgggggctggcccactctcagccctgccactgccccggcgtgctccatggcaggcgtgggtggggaccgcagcgtcggctccgacttccaggcttcatcctagagactgtcatctcccaaccaggcgaggtccttccaaaggaaaggatcctctttgctgatggactgccaaaaagtattttgcgacatcttttggttctggatagtagtgagcagccaagtgactgtgtctgaaacaccagtgtattttcagggaatgtccctaactgcgtcttgcccgcgccgggggctggggactctctctgctggacttgggactggcctctgcccccagcacgctgtattctgcaggaccgcctccttcctgcccctaacaacaaccacagtgttgctgaaattggagaaaactggggagggcgcaaccccccccaggcgcggggaagcatgtggtaccgcctcagccagtgcccctcagcctggccacagtcgcctctcctcggggacccctcagcagaaagggacagcctgtccttagaggactggaaattgtcaatatttgataaaatgatacccttttctacatggtgggtcagcttttttttttttttttttaactttctttctcagcattctctttggagttcaacctagcgcccatgagccaggctgaggaagctgagtgagaagccaggtgggcgggacttgttcccaggaaggccgggtggggaggaagcctagagggaaccccaggaagggcaaatccaggcaaatctgcaggaatgctctgccatgggagcagctcctcccttgccacggccaccttctctagcactgcaaggtccacagggcattgctttcctttctaggcggtggcagtcagggaacagactgaggtaggtgtaggggggtctaggccttcgtggagcaccccagggagttagtaggccccggggagacagagtctgcacaggccctttctggggccacctccatccacgaggagcagcctgagccttggtggccgaaccttgaccgtcccggagcacagcttcagggcagggaaccggagcccctggggggcctcacgggtgtgacgaggcccttcattgcaggcaggtgggccaatgggagccctcacccacgcaagccgagacaccacccagagtgcaggctgcctggccccttctggcacggccagctccacaccccctgcctagggtatgtgtggtcctaagggctaggagcttcccctactaacatctcccagaaaaagcagttaagcccctcagggcacagcaaggttagacacagcccccatccccagatcaggactccatcttgctaagtggcatcaccgtcaccagcctccccttatttaaaagcagcgactggtgttgccgcaggtacctggtctacgaagacgcaggcatccctctcccaccgtccacctccccgggggccgctgacagcacagtcgcctgggtgcacgcttgtgggggcagcaggaacggggctgtcggctctcaggggatctggctgcagccagggcgagggcctggcccttccttccagctccttccggctccttccagctgaagggcaggaagctctggccgcttagcttctagggttccatctccctagaaaggtgcccacgcccagggcatcagtcagtagcggcagcagcagcagactcggggctttcccagggtggcgcagccaccccagctgcatgtcacctcagctctccatcttattgccattttgtagatgaggaagctgagaccagaaaggctaagacccatgccccaggcaccacacccatctcttgggggctgggcacctgctacccgaggccacctcctgaagcccccactcttcccccatgttccacttcaggagccgcgggggcccatcctgacacccggggttcctcagcccagcgcagatgtgcttcagttccagagggcttgttgatttgtttcttaggtacgttacctgtccaccctgagtccagtgaggctgtcccaagagcccctgtagtgtgctcctgggaagggctgggggggctgggggggctgggagaggcccaggggcagctgtcactggaaccccagccagatgtccaaggaagccggccagaacacggagcagccagatggccccagctgcacctgtctagggagcccatgcagcctccttgcactggagaagcagctgtgaaagtagacagagttgagacttcgccgtggtcaggagaaaatgcaaattcccaggaacaagaatcctttaagtgatatgtttttataaaactaaacaaatcaacaaataaatcttgaaggcggatggttttcccagcagtgcaggggttggagggaggctgctggcactcctggggccaagggggacaggcagtggtcctgagtctgctcagagaggcaaggcagaaggagctcgccaggcaggtcagctcacatctgtccaagtcgctctggtcagaaacagcgactctcccccattcccccagcgttcccaccaggcctgggctgctgggaagcccttgctgtacccaggagcccgacccgcagtatcctggcacagagccacttgtcactcagaacagtcagtgtctccaacgcacaaacatccactcctctgttaccagttaaagcactttaatgctttaaggtgaaaacgaaatcccatccgtgtttttcgtgtaagatcgtgcttctccgagcagtattaatggacgccctccaatgacataacaactgtttttggtaatgtaatcttgggaaaatgtgttatttttttagctgtgtttcagtggggatttttgtttttgtaacataataaagtgtatgttccaatga

SEQ ID NO: 4365 - DNA, 1831 bp, Homo sapiens
  source 1..1831: mol_type = genomic DNA
aaggtgtccaggaagccctgctaagcatctgtcagtgtctccagcacagcaggaggctgttacaggtggcgcctgattcacatctgcaggacaggcccagttcaatctgctgagcagcaccatggaccagatgagcagccgcgcggcctcggccagcccctacaccccagagcacgccgccagcgtgcccacccactcgccctacgcacaacccagctccaccttcgacaccatgtcgccggcgcctgtcatcccctccaacaccgactaccccggaccccaccactttgaggtcactttccagcagtccagcacggccaagtcagccacctggacgtactccccgctcttgaagaaactctactgccagatcgccaagacatgccccatccagatcaaggtgtccaccccgccacccccaggcaccgccatccgggccatgcctgtttacaagaaagcggagcacgtgaccgacgtcgtgaaacgctgccccaaccacgagctcgggagggacttcaacgaaggacagtctgctccagccagccacctcatccgcgtggaaggcaataatctctcgcagtatgtggatgaccctgtcaccggcaggcagagcgtcgtggtgccctatgagccaccacaggtggggacggaattcaccaccatcctgtacaacttcatgtgtaacagcagctgtgtagggggcatgaaccggcggcccatcctcatcatcatcaccctggagatgcgggatgggcaggtgctgggccgccggtcctttgagggccgcatctgcgcctgtcctggccgcgaccgaaaagctgatgaggaccactaccgggagcagcaggccctgaacgagagctccgccaagaacggggccgccagcaagcgtgccttcaagcagagcccccctgccgtccccgcccttggtgccggtgtgaagaagcggcggcatggagacgaggacacgtactaccttcaggtgcgaggccgggagaactttgagatcctgatgaagctgaaagagagcctggagctgatggagttggtgccgcagccactggtggactcctatcggcagcagcagcagctcctacagaggccgagtcacctacagcccccgtcctacgggccggtcctctcgcccatgaacaaggtgcacgggggcatgaacaagctgccctccgtcaaccagctggtgggccagcctcccccgcacagttcggcagctacacccaacctggggcccgtgggccccgggatgctcaacaaccatggccacgcagtgccagccaacggcgagatgagcagcagccacagcgcccagtccatggtctcggggtcccactgcactccgccacccccctaccacgccgaccccagcctcgtcagttttttaacaggattggggtgtccaaactgcatcgagtatttcacctcccaagggttacagagcatttaccacctgcagaacctgaccattgaggacctgggggccctgaagatccccgagcagtaccgcatgaccatctggcggggcctgcaggacctgaagcagggccacgactacagcaccgcgcagcagctgctccgctctagcaacgcggccaccatctccatcggcggctcaggggaactgcagcgccagcgggtcatggaggccgtgcacttccgcgtgcgccacaccatcaccatccccaaccgcggcggcccaggcggcggccctgacgagtgggcggacttcggcttcgacctgcccgactgcaaggcccgcaagcagcccatcaaggaggagttcacggaggccgagatccactgagggcctcgcctg

SEQ ID NO: 4366 - DNA, 5188 bp, Homo sapiens
  source 1..5188: mol_type = genomic DNA
tgcctccccgcccgcgcacccgcccggaggctcgcgcgcccgcgaaggggacgcagcgaaaccggggcccgcgccaggccagccgggacggacgccgatgcccggggctgcgacggctgcagagcgagctgccctcggaggccggcgtggggaagatggcccagtccaccgccacctcccctgatgggggcaccacgtttgagcacctctggagctctctggaaccagacagcacctacttcgaccttccccagtcaagccgggggaataatgaggtggtgggcggaacggattccagcatggacgtcttccacctggagggcatgactacatctgtcatggcccagttcaatctgctgagcagcaccatggaccagatgagcagccgcgcggcctcggccagcccctacaccccagagcacgccgccagcgtgcccacccactcgccctacgcacaacccagctccaccttcgacaccatgtcgccggcgcctgtcatcccctccaacaccgactaccccggaccccaccactttgaggtcactttccagcagtccagcacggccaagtcagccacctggacgtactccccgctcttgaagaaactctactgccagatcgccaagacatgccccatccagatcaaggtgtccaccccgccacccccaggcaccgccatccgggccatgcctgtttacaagaaagcggagcacgtgaccgacgtcgtgaaacgctgccccaaccacgagctcgggagggacttcaacgaaggacagtctgctccagccagccacctcatccgcgtggaaggcaataatctctcgcagtatgtggatgaccctgtcaccggcaggcagagcgtcgtggtgccctatgagccaccacaggtggggacggaattcaccaccatcctgtacaacttcatgtgtaacagcagctgtgtagggggcatgaaccggcggcccatcctcatcatcatcaccctggagatgcgggatgggcaggtgctgggccgccggtcctttgagggccgcatctgcgcctgtcctggccgcgaccgaaaagctgatgaggaccactaccgggagcagcaggccctgaacgagagctccgccaagaacggggccgccagcaagcgtgccttcaagcagagcccccctgccgtccccgcccttggtgccggtgtgaagaagcggcggcatggagacgaggacacgtactaccttcaggtgcgaggccgggagaactttgagatcctgatgaagctgaaagagagcctggagctgatggagttggtgccgcagccactggtggactcctatcggcagcagcagcagctcctacagaggccgagtcacctacagcccccgtcctacgggccggtcctctcgcccatgaacaaggtgcacgggggcatgaacaagctgccctccgtcaaccagctggtgggccagcctcccccgcacagttcggcagctacacccaacctggggcccgtgggccccgggatgctcaacaaccatggccacgcagtgccagccaacggcgagatgagcagcagccacagcgcccagtccatggtctcggggtcccactgcactccgccacccccctaccacgccgaccccagcctcgtcagttttttaacaggattggggtgtccaaactgcatcgagtatttcacctcccaagggttacagagcatttaccacctgcagaacctgaccattgaggacctgggggccctgaagatccccgagcagtaccgcatgaccatctggcggggcctgcaggacctgaagcagggccacgactacagcaccgcgcagcagctgctccgctctagcaacgcggccaccatctccatcggcggctcaggggaactgcagcgccagcgggtcatggaggccgtgcacttccgcgtgcgccacaccatcaccatccccaaccgcggcggcccaggcggcggccctgacgagtgggcggacttcggcttcgacctgcccgactgcaaggcccgcaagcagcccatcaaggaggagttcacggaggccgagatccactgagggcctcgcctggctgcagcctgcgccaccgcccagagacccaagctgcctcccctctccttcctgtgtgtccaaaactgcctcaggaggcaggaccttcgggctgtgcccggggaaaggcaaggtccggcccatccccaggcacctcacaggccccaggaaaggcccagccaccgaagccgcctgtggacagcctgagtcacctgcagaaccttctggagctgccctagtgctgggcttgtggggcgggggctggcccactctcagccctgccactgccccggcgtgctccatggcaggcgtgggtggggaccgcagcgtcggctccgacttccaggcttcatcctagagactgtcatctcccaaccaggcgaggtccttccaaaggaaaggatcctctttgctgatggactgccaaaaagtattttgcgacatcttttggttctggatagtagtgagcagccaagtgactgtgtctgaaacaccagtgtattttcagggaatgtccctaactgcgtcttgcccgcgccgggggctggggactctctctgctggacttgggactggcctctgcccccagcacgctgtattctgcaggaccgcctccttcctgcccctaacaacaaccacagtgttgctgaaattggagaaaactggggagggcgcaaccccccccaggcgcggggaagcatgtggtaccgcctcagccagtgcccctcagcctggccacagtcgcctctcctcggggacccctcagcagaaagggacagcctgtccttagaggactggaaattgtcaatatttgataaaatgatacccttttctacatggtgggtcagcttttttttttttttttttaactttctttctcagcattctctttggagttcaacctagcgcccatgagccaggctgaggaagctgagtgagaagccaggtgggcgggacttgttcccaggaaggccgggtggggaggaagcctagagggaaccccaggaagggcaaatccaggcaaatctgcaggaatgctctgccatgggagcagctcctcccttgccacggccaccttctctagcactgcaaggtccacagggcattgctttcctttctaggcggtggcagtcagggaacagactgaggtaggtgtaggggggtctaggccttcgtggagcaccccagggagttagtaggccccggggagacagagtctgcacaggccctttctggggccacctccatccacgaggagcagcctgagccttggtggccgaaccttgaccgtcccggagcacagcttcagggcagggaaccggagcccctggggggcctcacgggtgtgacgaggcccttcattgcaggcaggtgggccaatgggagccctcacccacgcaagccgagacaccacccagagtgcaggctgcctggccccttctggcacggccagctccacaccccctgcctagggtatgtgtggtcctaagggctaggagcttcccctactaacatctcccagaaaaagcagttaagcccctcagggcacagcaaggttagacacagcccccatccccagatcaggactccatcttgctaagtggcatcaccgtcaccagcctccccttatttaaaagcagcgactggtgttgccgcaggtacctggtctacgaagacgcaggcatccctctcccaccgtccacctccccgggggccgctgacagcacagtcgcctgggtgcacgcttgtgggggcagcaggaacggggctgtcggctctcaggggatctggctgcagccagggcgagggcctggcccttccttccagctccttccggctccttccagctgaagggcaggaagctctggccgcttagcttctagggttccatctccctagaaaggtgcccacgcccagggcatcagtcagtagcggcagcagcagcagactcggggctttcccagggtggcgcagccaccccagctgcatgtcacctcagctctccatcttattgccattttgtagatgaggaagctgagaccagaaaggctaagacccatgccccaggcaccacacccatctcttgggggctgggcacctgctacccgaggccacctcctgaagcccccactcttcccccatgttccacttcaggagccgcgggggcccatcctgacacccggggttcctcagcccagcgcagatgtgcttcagttccagagggcttgttgatttgtttcttaggtacgttacctgtccaccctgagtccagtgaggctgtcccaagagcccctgtagtgtgctcctgggaagggctgggggggctgggggggctgggagaggcccaggggcagctgtcactggaaccccagccagatgtccaaggaagccggccagaacacggagcagccagatggccccagctgcacctgtctagggagcccatgcagcctccttgcactggagaagcagctgtgaaagtagacagagttgagacttcgccgtggtcaggagaaaatgcaaattcccaggaacaagaatcctttaagtgatatgtttttataaaactaaacaaatcaacaaataaatcttgaaggcggatggttttcccagcagtgcaggggttggagggaggctgctggcactcctggggccaagggggacaggcagtggtcctgagtctgctcagagaggcaaggcagaaggagctcgccaggcaggtcagctcacatctgtccaagtcgctctggtcagaaacagcgactctcccccattcccccagcgttcccaccaggcctgggctgctgggaagcccttgctgtacccaggagcccgacccgcagtatcctggcacagagccacttgtcactcagaacagtcagtgtctccaacgcacaaacatccactcctctgttaccagttaaagcactttaatgctttaaggtgaaaacgaaatcccatccgtgtttttcgtgtaagatcgtgcttctccgagcagtattaatggacgccctccaatgacataacaactgtttttggtaatgtaatcttgggaaaatgtgttatttttttagctgtgtttcagtggggatttttgtttttgtaacataataaagtgtatgttccaatga

SEQ ID NO: 4367 - DNA, 1691 bp, Homo sapiens
  source 1..1691: mol_type = genomic DNA
agtgaggtttccgtggagacagccgagcctgcggaaggcggcggcggcggcacctgcgatcagcggctggggcaggttatggtagtgcggactgcggtgtgagcagagcggccacggggcccgccatgcgccggcggccctgacatgggcgccagcgggtccaaagctcggggcctgtggcccttcgcctcggcggccggaggcggcggctcagaggcagcaggagctgagcaagctttggtgcggcctcggggccgagctgtgccccccttcgtattcacgcgccgcggctctatgttctatgatgaggatggggatctggctcacgagttctatgaggagacaatcgtcaccaagaacgggcagaagcgggccaagctgaggcgagtgcataagaatctgattcctcagggcatcgtgaagctggatcacccccgcatccacgtggatttccctgtgatcctctatgaggtgtgaccctgggaggtggcagacagaagcaccccctgccccggcaagaaactcccaggctcaatcaaggtgtggcttccattgaggagcccaggctggggccacaaccctgaataaactctgttggcccataaccttcagctgtgagcgggtcggtcccacagtattggttgggtgttggtttgtgtgtggacaagaggtggttggtgggtggtgaaggctaatggcagagttagcaccccactctcccaagccacccctgcaagcagcacagcagggcatataccagtcaggaatgcccgttacctggttccttgcctggtctgctttcttccaagtttgcctggggcctagccctgctagaggctacagcactttacaagcaaggtatgctttcttccagcccctaggctgtgggcactgtatacaagtaggaacttcctttccttcacttcccttttaacccctagtcagagcatttcagccgtttgctacctcgattcctcctgtgttggacagaggctgggggcagtgccagcctgattcttccgacctacctgccatttgttcccgccttcagatggatggacagtttgctggctattgataggagtggggactgggtgggggcttctccctctacccagggctgggctgatccccctactgcaactaactgttgccccccaaccccgaacccccagttgaggagttgagagagtgcaggctggggtcaggacaggctgcggatgcttgtgcctatggggagttactccaacccacctattctgtctaatctccatggctttgcaccaaatcctccacccctccaattgggaggggactgttcaccaccttgtggtaagggacaacaccctaaggctggtgccagtagttatgagtagcctaccaccccctcccttacagtaacccccaccccttcaggatcagtcaagggaaagcactagaacccctgggtagggaaagaaaggagggaaaaaccataaaaggaatacttataatgtgaaggtttgtaaatagtccatgatgatgtcgtggcagagtctgatttctatatagaggtgactttttttttaagtactgtgcaagctctgtgcttctataatgtgggaaatggcttggggaggatggcccctagcttaggaagactgttgtgttatttgttcaatttcaataaaatgatttgtagatcctgcaca

SEQ ID NO: 4368 - DNA, 1666 bp, Homo sapiens
  source 1..1666: mol_type = genomic DNA
gaggtataagagcctccaagtctgcagctctcgcccaactcccagacacctcgcgggctctgcagcaccggcaccgtttccaggaggcctggcggggtgtgcgtccagccgttgggcgctttctttttggacctcggggccatccacaccgtcccctccccctcccgcctccctccccgcctcccccgcgcgccctccccgcggaggtccctcccgtccgtcctcctgctctctcctccgcgggccgcatcgcccgggccggcgccgcgcgcgggggaagctggcgggctgaggcgccccgctcttctcctctgccccgggcccgcgaggccacgcgtcgccgctcgagagatgatgcaggacgtgtccagctcgccagtctcgccggccgacgacagcctgagcaacagcgaggaagagccagaccggcagcagccgccgagcggcaagcgcgggggacgcaagcggcgcagcagcaggcgcagcgcgggcggcggcgcggggcccggcggagccgcgggtgggggcgtcggaggcggcgacgagccgggcagcccggcccagggcaagcgcggcaagaagtctgcgggctgtggcggcggcggcggcgcgggcggcggcggcggcagcagcagcggcggcgggagtccgcagtcttacgaggagctgcagacgcagcgggtcatggccaacgtgcgggagcgccagcgcacccagtcgctgaacgaggcgttcgccgcgctgcggaagatcatccccacgctgccctcggacaagctgagcaagattcagaccctcaagctggcggccaggtacatcgacttcctctaccaggtcctccagagcgacgagctggactccaagatggcaagctgcagctatgtggctcacgagcggctcagctacgccttctcggtctggaggatggagggggcctggtccatgtccgcgtcccactagcaggcggagccccccaccccctcagcagggccggagacctagatgtcattgtttccagagaaggagaaaatggacagtctagagactctggagctggataactaaaaataaaaatatatgccaaagattttcttggaaattagaagagcaaaatccaaattcaaagaaacagggcgtggggcgcacttttaaaagagaaagcgagacaggcccgtggacagtgattcccagacgggcagcggcaccatcctcacacctctgcattctgatagaagtctgaacagttgtttgtgttttttttttttttttttttgacgaagaatgtttttatttttatttttttcatgcatgcattctcaagaggtcgtgccaatcagccactgaaaggaaaggcatcactatggactttctctattttaaaatggtaacaatcagaggaactataagaacacctttagaaataaaaatactgggatcaaactggcctgcaaaaccatagtcagttaattctttttttcatccttcctctgaggggaaaaacaaaaaaaaacttaaaatacaaaaaacaacattctatttatttattgaggacccatggtaaaatgcaaatagatccggtgtctaaatgcattcatatttttatgattgttttgtaaatatctttgtatatttttctgcaataaataaatataaaaaatttagagaa

SEQ ID NO: 4369 - DNA, 1825 bp, Homo sapiens
  source 1..1825: mol_type = genomic DNA
gcaggcgtcgtcccgtcctcccatcccccagcgcggccgcgtctcctccctcggcgttgtccgcggcgcgagccacagcgcgcggggcgagccagcgagagggcgcgagcggcggcgctgcctgcagcctgcagcctgcagcctccggccggccggcgagccagtgcgcgtgcgcggcggcggcctccgcagcgaccggggagcggactgaccggcgggagggctagcgagccagcggtgtgaggcgcgaggcgaggccgagccgcgagcgacatgggggaccgggagcagctgctgcagcgggcgcggctggccgagcaggcggagcgctacgacgacatggcctccgctatgaaggcggtgacagagctgaatgaacctctctccaatgaagatcgaaatctcctctctgtggcctacaagaatgtggttggtgccaggcgatcttcctggagggtcattagcagcattgagcagaaaaccatggctgatggaaacgaaaagaaattggagaaagttaaagcttaccgggagaagattgagaaggagctggagacagtttgcaatgatgtcctgtctctgcttgacaagttcctgatcaagaactgcaatgatttccagtatgagagcaaggtgttttacctgaaaatgaagggtgattactaccgctacttagcagaggtcgcttctggggagaagaaaaacagtgtggtcgaagcttctgaagctgcctacaaggaagcctttgaaatcagcaaagagcagatgcaacccacgcatcccatccggctgggcctggccctcaacttctccgtgttctactatgagatccagaatgcacctgagcaagcctgcctcttagccaaacaagccttcgatgatgccatagctgagctggacacactaaacgaggattcctataaggactccacgctgatcatgcagttgctgcgagacaacctcaccctctggacgagcgaccagcaggatgaagaagcaggagaaggcaactgaagatccttcaggtcccctggcccttccttcacccaccacccccatcatcaccgattcttccttgccacaatcactaaatatctagtgctaaacctatctgtattggcagcacagctactcagatctgcactcctgtctcttgggaagcagtttcagataaatcatgggcattgctggactgatggttgctttgagcccacaggagctccctttttgaattgtgtggagaagtgtgttctgatgaggcattttactatgcctgttgatctatgggaaatctaggcgaaagtaatggggaagattagaaagaattagccaaccaggctacagttgatatttaaaagatccatttaaaacaagctgatagtgtttcgttaagcagtacatcttgtgcatgcaaaaatgaattcacccctcccacctctttcttcaattaatggaaaactgttaagggaagctgatacagagagacaacttgctcctttccatcagctttataataaactgtttaacgtgaggtttcagtagctccttggttttgcctctttaaattatgacgtgcacaaaccttcttttcaatgcaatgcatctgaaagttttgatacttgtaacttttttttttttttggttgcaattgtttaagaatcatggatttattttttgtaactctttggctattgtccttgtgtatcctgacagcgccatgtgtgtcagcccatgtcaatcaagatgggtgattatgaaatgccagacttctaaaataaatgttttggaattcaatgggtaaataaatgctgctttggggatatta

SEQ ID NO: 4370 - DNA, 2065 bp, Homo sapiens
  source 1..2065: mol_type = genomic DNA
catctgaccccaggcccagctcgtcctggctggcctgggtcggcctctggagtatggtctggcgggtgccccctttcttgctccccatcctcttcttgggcacccactaccagctggatgtgcagctctaccactgcaccctcctgggcccggcctcgccccctgcacacgtgcttctgccccccagtgggcctccagccccccgacacctccacgcccaggccctctcagactccgagatccagctgacatggaagcacccggaggctctgcctgggccaatatccaagtacgttgtggaggtgcaggtggctgggggtgcaggagacccactgtggatagacgtggacaggcctgaggagacaagcaccatcatccgtggcctcaacgccagcacgcgctacctcttccgcatgcgggccagcattcaggggctcggggactggagcaacacagtagaagagtccaccctgggcaacgggctgcaggctgagggcccagtccaagagagccgggcagctgaagagggcctggatcagcagctgatcctggcggtggtgggctccgtgtctgccacctgcctcaccatcctggctgcccttttaaccctggtgtgcatccgcagaagctgcctgcatcggagacgcaccttcacctaccagtcaggctcgggcgaggagaccatcctgcagttcagctcagggaccttgacacttacccggcggccaaaactgcagcccgagcccctgagctacccagtgctagagtgggaggacatcacctttgaggacctcatcggggaggggaacttcggccaggtcatccgggccatgatcaagaaggacgggctgaagatgaacgcagccatcaaaatgctgaaagagtatgcctctgaaaatgaccatcgtgactttgcgggagaactggaagttctgtgcaaattggggcatcaccccaacatcatcaacctcctgggggcctgtaagaaccgaggttacttgtatatcgctattgaatatgccccctacgggaacctgctagattttctgcggaaaagccgggtcctagagactgacccagcttttgctcgagagcatgggacagcctctacccttagctcccggcagctgctgcgtttcgccagtgatgcggccaatggcatgcagtacctgagtgagaagcagttcatccacagggacctggctgcccggaatgtgctggtcggagagaacctagcctccaagattgcagacttcggcctttctcggggagaggaggtttatgtgaagaagacgatggggcgtctccctgtgcgctggatggccattgagtccctgaactacagtgtctataccaccaagagtgatgtctggtcctttggagtccttctttgggagatagtgagccttggaggtacaccctactgtggcatgacctgtgccgagctctatgaaaagctgccccagggctaccgcatggagcagcctcgaaactgtgacgatgaagtgtacgagctgatgcgtcagtgctggcgggaccgtccctatgagcgacccccctttgcccagattgcgctacagctaggccgcatgctggaagccaggaaggcctatgtgaacatgtcgctgtttgagaacttcacttacgcgggcattgatgccacagctgaggaggcctgagctgccatccagccagaacgtggctctgctggccggagcaaactctgctgtctaacctgtgaccagtctgacccttacagcctctgacttaagctgcctcaaggaatttttttaacttaagggagaaaaaaagggatctggggatggggtgggcttaggggaactgggttcccatgctttgtaggtgtctcatagctatcctgggcatccttctttctagttcagctgccccacaggtgtgtttcccatcccactgctcccccaacacaaacccccactccagctccttcgcttaagccagcactcacaccactaacatgccctgttcagctactcccactcccggcctgtcattcagaaaaaaataaatgttctaataagctcca

SEQ ID NO: 4371 - DNA, 3882 bp, Homo sapiens
  source 1..3882: mol_type = genomic DNA
cacaggctgagcagtcaggcccacagcatctgaccccaggcccagctcgtcctggctggcctgggtcggcctctggagtatggtctggcgggtgccccctttcttgctccccatcctcttcttggcttctcatgtgggcgcggcggtggacctgacgctgctggccaacctgcggctcacggacccccagcgcttcttcctgacttgcgtgtctggggaggccggggcggggaggggctcggacgcctggggcccgcccctgctgctggagaaggacgaccgtatcgtgcgcaccccgcccgggccacccctgcgcctggcgcgcaacggttcgcaccaggtcacgcttcgcggcttctccaagccctcggacctcgtgggcgtcttctcctgcgtgggcggtgctggggcgcggcgcacgcgcgtcatctacgtgcacaacagccctggagcccacctgcttccagacaaggtcacacacactgtgaacaaaggtgacaccgctgtactttctgcacgtgtgcacaaggagaagcagacagacgtgatctggaagagcaacggatcctacttctacaccctggactggcatgaagcccaggatgggcggttcctgctgcagctcccaaatgtgcagccaccatcgagcggcatctacagtgccacttacctggaagccagccccctgggcagcgccttctttcggctcatcgtgcggggttgtggggctgggcgctgggggccaggctgtaccaaggagtgcccaggttgcctacatggaggtgtctgccacgaccatgacggcgaatgtgtatgcccccctggcttcactggcacccgctgtgaacaggcctgcagagagggccgttttgggcagagctgccaggagcagtgcccaggcatatcaggctgccggggcctcaccttctgcctcccagacccctatggctgctcttgtggatctggctggagaggaagccagtgccaagaagcttgtgcccctggtcattttggggctgattgccgactccagtgccagtgtcagaatggtggcacttgtgaccggttcagtggttgtgtctgcccctctgggtggcatggagtgcactgtgagaagtcagaccggatcccccagatcctcaacatggcctcagaactggagttcaacttagagacgatgccccggatcaactgtgcagctgcagggaaccccttccccgtgcggggcagcatagagctacgcaagccagacggcactgtgctcctgtccaccaaggccattgtggagccagagaagaccacagctgagttcgaggtgccccgcttggttcttgcggacagtgggttctgggagtgccgtgtgtccacatctggcggccaagacagccggcgcttcaaggtcaatgtgaaagtgccccccgtgcccctggctgcacctcggctcctgaccaagcagagccgccagcttgtggtctccccgctggtctcgttctctggggatggacccatctccactgtccgcctgcactaccggccccaggacagtaccatggactggtcgaccattgtggtggaccccagtgagaacgtgacgttaatgaacctgaggccaaagacaggatacagtgttcgtgtgcagctgagccggccaggggaaggaggagagggggcctgggggcctcccaccctcatgaccacagactgtcctgagcctttgttgcagccgtggttggagggctggcatgtggaaggcactgaccggctgcgagtgagctggtccttgcccttggtgcccgggccactggtgggcgacggtttcctgctgcgcctgtgggacgggacacgggggcaggagcggcgggagaacgtctcatccccccaggcccgcactgccctcctgacgggactcacgcctggcacccactaccagctggatgtgcagctctaccactgcaccctcctgggcccggcctcgccccctgcacacgtgcttctgccccccagtgggcctccagccccccgacacctccacgcccaggccctctcagactccgagatccagctgacatggaagcacccggaggctctgcctgggccaatatccaagtacgttgtggaggtgcaggtggctgggggtgcaggagacccactgtggatagacgtggacaggcctgaggagacaagcaccatcatccgtggcctcaacgccagcacgcgctacctcttccgcatgcgggccagcattcaggggctcggggactggagcaacacagtagaagagtccaccctgggcaacgggctgcaggctgagggcccagtccaagagagccgggcagctgaagagggcctggatcagcagctgatcctggcggtggtgggctccgtgtctgccacctgcctcaccatcctggctgcccttttaaccctggtgtgcatccgcagaagctgcctgcatcggagacgcaccttcacctaccagtcaggctcgggcgaggagaccatcctgcagttcagctcagggaccttgacacttacccggcggccaaaactgcagcccgagcccctgagctacccagtgctagagtgggaggacatcacctttgaggacctcatcggggaggggaacttcggccaggtcatccgggccatgatcaagaaggacgggctgaagatgaacgcagccatcaaaatgctgaaagagtatgcctctgaaaatgaccatcgtgactttgcgggagaactggaagttctgtgcaaattggggcatcaccccaacatcatcaacctcctgggggcctgtaagaaccgaggttacttgtatatcgctattgaatatgccccctacgggaacctgctagattttctgcggaaaagccgggtcctagagactgacccagcttttgctcgagagcatgggacagcctctacccttagctcccggcagctgctgcgtttcgccagtgatgcggccaatggcatgcagtacctgagtgagaagcagttcatccacagggacctggctgcccggaatgtgctggtcggagagaacctagcctccaagattgcagacttcggcctttctcggggagaggaggtttatgtgaagaagacgatggggcgtctccctgtgcgctggatggccattgagtccctgaactacagtgtctataccaccaagagtgatgtctggtcctttggagtccttctttgggagatagtgagccttggaggtacaccctactgtggcatgacctgtgccgagctctatgaaaagctgccccagggctaccgcatggagcagcctcgaaactgtgacgatgaagtgtacgagctgatgcgtcagtgctggcgggaccgtccctatgagcgacccccctttgcccagattgcgctacagctaggccgcatgctggaagccaggaaggcctatgtgaacatgtcgctgtttgagaacttcacttacgcgggcattgatgccacagctgaggaggcctgagctgccatccagccagaacgtggctctgctggccggagcaaactctgctgtctaacctgtgaccagtctgacccttacagcctctgacttaagctgcctcaaggaatttttttaacttaagggagaaaaaaagggatctggggatggggtgggcttaggggaactgggttcccatgctttgtaggtgtctcatagctatcctgggcatccttctttctagttcagctgccccacaggtgtgtttcccatcccactgctcccccaacacaaacccccactccagctccttcgcttaagccagcactcacaccactaacatgccctgttcagctactcccactcccggcctgtcattcagaaaaaaataaatgttctaataagctcca

SEQ ID NO: 4372 - DNA, 2673 bp, Homo sapiens
  source 1..2673: mol_type = genomic DNA
atgacggcgaatgtgtatgcccccctggcttcactggcacccgctgtgaacaggcctgcagagagggccgttttgggcagagctgccaggagcagtgcccaggcatatcaggctgccggggcctcaccttctgcctcccagacccctatggctgctcttgtggatctggctggagaggaagccagtgccaagaagaccggatcccccagatcctcaacatggcctcagaactggagttcaacttagagacgatgccccggatcaactgtgcagctgcagggaaccccttccccgtgcggggcagcatagagctacgcaagccagacggcactgtgctcctgtccaccaaggccattgtggagccagagaagaccacagctgagttcgaggtgccccgcttggttcttgcggacagtgggttctgggagtgccgtgtgtccacatctggcggccaagacagccggcgcttcaaggtcaatgtgaaagtgccccccgtgcccctggctgcacctcggctcctgaccaagcagagccgccagcttgtggtctccccgctggtctcgttctctggggatggacccatctccactgtccgcctgcactaccggccccaggacagtaccatggactggtcgaccattgtggtggaccccagtgagaacgtgacgttaatgaacctgaggccaaagacaggatacagtgttcgtgtgcagctgagccggccaggggaaggaggagagggggcctgggggcctcccaccctcatgaccacagactgtcctgagcctttgttgcagccgtggttggagggctggcatgtggaaggcactgaccggctgcgagtgagctggtccttgcccttggtgcccgggccactggtgggcgacggtttcctgctgcgcctgtgggacgggacacgggggcaggagcggcgggagaacgtctcatccccccaggcccgcactgccctcctgacgggactcacgcctggcacccactaccagctggatgtgcagctctaccactgcaccctcctgggcccggcctcgccccctgcacacgtgcttctgccccccagtgggcctccagccccccgacacctccacgcccaggccctctcagactccgagatccagctgacatggaagcacccggaggctctgcctgggccaatatccaagtacgttgtggaggtgcaggtggctgggggtgcaggagacccactgtggatagacgtggacaggcctgaggagacaagcaccatcatccgtggcctcaacgccagcacgcgctacctcttccgcatgcgggccagcattcaggggctcggggactggagcaacacagtagaagagtccaccctgggcaacgggctgcaggctgagggcccagtccaagagagccgggcagctgaagagggcctggatcagcagctgatcctggcggtggtgggctccgtgtctgccacctgcctcaccatcctggctgcccttttaaccctggtgtgcatccgcagaagctgcctgcatcggagacgcaccttcacctaccagtcaggctcgggcgaggagaccatcctgcagttcagctcagggaccttgacacttacccggcggccaaaactgcagcccgagcccctgagctacccagtgctagagtgggaggacatcacctttgaggacctcatcggggaggggaacttcggccaggtcatccgggccatgatcaagaaggacgggctgaagatgaacgcagccatcaaaatgctgaaagagtatgcctctgaaaatgaccatcgtgactttgcgggagaactggaagttctgtgcaaattggggcatcaccccaacatcatcaacctcctgggggcctgtaagaaccgaggttacttgtatatcgctattgaatatgccccctacgggaacctgctagattttctgcggaaaagccgggtcctagagactgacccagcttttgctcgagagcatgggacagcctctacccttagctcccggcagctgctgcgtttcgccagtgatgcggccaatggcatgcagtacctgagtgagaagcagttcatccacagggacctggctgcccggaatgtgctggtcggagagaacctagcctccaagattgcagacttcggcctttctcggggagaggaggtttatgtgaagaagacgatggggcgtctccctgtgcgctggatggccattgagtccctgaactacagtgtctataccaccaagagtgatgtctggtcctttggagtccttctttgggagatagtgagccttggaggtacaccctactgtggcatgacctgtgccgagctctatgaaaagctgccccagggctaccgcatggagcagcctcgaaactgtgacgatgaagtgtacgagctgatgcgtcagtgctggcgggaccgtccctatgagcgacccccctttgcccagattgcgctacagctaggccgcatgctggaagccaggaaggcctatgtgaacatgtcgctgtttgagaacttcacttacgcgggcattgatgccacagctgaggaggcctgagctgccatccagccagaacgtggctctgctggccggagcaaactctgctgtctaacctgtgaccagtctgacccttacagcctctgacttaagctgcctcaag

SEQ ID NO: 4373 - DNA, 954 bp, Homo sapiens
  source 1..954: mol_type = genomic DNA
atggtctggcgggtgccccctttcttgctccccatcctcttcttggcttctcatgtgggcgcggcggtggacctgacgctgctggccaacctgcggctcacggacccccagcgcttcttcctgacttgcgtgtctggggaggccggggcggggaggggctcggacgcctggggcccgcccctgctgctggagaaggacgaccgtatcgtgcgcaccccgcccgggccacccctgcgcctggcgcgcaacggttcgcaccaggtcacgcttcgcggcttctccaagccctcggacctcgtgggcgtcttctcctgcgtgggcggtgctggggcgcggcgcacgcgcgtcatctacgtgcacaacagccctggagcccacctgcttccagacaaggtcacacacactgtgaacaaaggtgacaccgctgtactttctgcacgtgtgcacaaggagaagcagacagacgtgatctggaagagcaacggatcctacttctacaccctggactggcatgaagcccaggatgggcggttcctgctgcagctcccaaatgtgcagccaccatcgagcggcatctacagtgccacttacctggaagccagccccctgggcagcgccttctttcggctcatcgtgcggggttgtggggctgggcgctgggggccaggctgtaccaaggagtgcccaggttgcctacatggaggtgtctgccacgaccatgacggcgaatgtgtatgcccccctggcttcactggcacccgctgtgaacaggcctgcagagagggccgttttgggcagagctgccaggagcagtgcccaggcatatcaggctgccggggcctcaccttctgcctcccagacccctatggctgctcttgtggatctggctggagaggaagccagtgccaagaagtccaccaaggccattgtggagccagagaagaccacagctga

SEQ ID NO: 4374 - DNA, 2063 bp, Homo sapiens
  source 1..2063: mol_type = genomic DNA
catctgaccccaggcccagctcgtcctggctggcctgggtcggcctctggagtatggtctggcgggtgccccctttcttgctccccatcctcttcttggcacccactaccagctggatgtgcagctctaccactgcaccctcctgggcccggcctcgccccctgcacacgtgcttctgccccccagtgggcctccagccccccgacacctccacgcccaggccctctcagactccgagatccagctgacatggaagcacccggaggctctgcctgggccaatatccaagtacgttgtggaggtgcaggtggctgggggtgcaggagacccactgtggatagacgtggacaggcctgaggagacaagcaccatcatccgtggcctcaacgccagcacgcgctacctcttccgcatgcgggccagcattcaggggctcggggactggagcaacacagtagaagagtccaccctgggcaacgggctgcaggctgagggcccagtccaagagagccgggcagctgaagagggcctggatcagcagctgatcctggcggtggtgggctccgtgtctgccacctgcctcaccatcctggctgcccttttaaccctggtgtgcatccgcagaagctgcctgcatcggagacgcaccttcacctaccagtcaggctcgggcgaggagaccatcctgcagttcagctcagggaccttgacacttacccggcggccaaaactgcagcccgagcccctgagctacccagtgctagagtgggaggacatcacctttgaggacctcatcggggaggggaacttcggccaggtcatccgggccatgatcaagaaggacgggctgaagatgaacgcagccatcaaaatgctgaaagagtatgcctctgaaaatgaccatcgtgactttgcgggagaactggaagttctgtgcaaattggggcatcaccccaacatcatcaacctcctgggggcctgtaagaaccgaggttacttgtatatcgctattgaatatgccccctacgggaacctgctagattttctgcggaaaagccgggtcctagagactgacccagcttttgctcgagagcatgggacagcctctacccttagctcccggcagctgctgcgtttcgccagtgatgcggccaatggcatgcagtacctgagtgagaagcagttcatccacagggacctggctgcccggaatgtgctggtcggagagaacctagcctccaagattgcagacttcggcctttctcggggagaggaggtttatgtgaagaagacgatggggcgtctccctgtgcgctggatggccattgagtccctgaactacagtgtctataccaccaagagtgatgtctggtcctttggagtccttctttgggagatagtgagccttggaggtacaccctactgtggcatgacctgtgccgagctctatgaaaagctgccccagggctaccgcatggagcagcctcgaaactgtgacgatgaagtgtacgagctgatgcgtcagtgctggcgggaccgtccctatgagcgacccccctttgcccagattgcgctacagctaggccgcatgctggaagccaggaaggcctatgtgaacatgtcgctgtttgagaacttcacttacgcgggcattgatgccacagctgaggaggcctgagctgccatccagccagaacgtggctctgctggccggagcaaactctgctgtctaacctgtgaccagtctgacccttacagcctctgacttaagctgcctcaaggaatttttttaacttaagggagaaaaaaagggatctggggatggggtgggcttaggggaactgggttcccatgctttgtaggtgtctcatagctatcctgggcatccttctttctagttcagctgccccacaggtgtgtttcccatcccactgctcccccaacacaaacccccactccagctccttcgcttaagccagcactcacaccactaacatgccctgttcagctactcccactcccggcctgtcattcagaaaaaaataaatgttctaataagctcc

SEQ ID NO: 4375 - DNA, 1140 bp, Homo sapiens
  source 1..1140: mol_type = genomic DNA
atggtctggcgggtgccccctttcttgctccccatcctcttcttggcttctcatgtgggcgcggcggtggacctgacgctgctggccaacctgcggctcacggacccccagcgcttcttcctgacttgcgtgtctggggaggccggggcggggaggggctcggacgcctggggcccgcccctgctgctggagaaggacgaccgtatcgtgcgcaccccgcccgggccacccctgcgcctggcgcgcaacggttcgcaccaggtcacgcttcgcggcttctccaagccctcggacctcgtgggcgtcttctcctgcgtgggcggtgctggggcgcggcgcacgcgcgtcatctacgtgcacaacagccctggagcccacctgcttccagacaaggtcacacacactgtgaacaaaggtgacaccgctgtactttctgcacgtgtgcacaaggagaagcagacagacgtgatctggaagagcaacggatcctacttctacaccctggactggcatgaagcccaggatgggcggttcctgctgcagctcccaaatgtgcagccaccatcgagcggcatctacagtgccacttacctggaagccagccccctgggcagcgccttctttcggctcatcgtgcggggttgtggggctgggcgctgggggccaggctgtaccaaggagtgcccaggttgcctacatggaggtgtctgccacgaccatgacggcgaatgtgtatgcccccctggcttcactggcacccgctgtgaacaggcctgcagagagggccgttttgggcagagctgccaggagcagtgcccaggcatatcaggctgccggggcctcaccttctgcctcccagacccctatggctgctcttgtggatctggctggagaggaagccagtgccaagaagcttgtgcccctggtcattttggggctgattgccgactccagtgccagtgtcagaatggtggcacttgtgaccggttcagtggttgtgtctgcccctctgggtggcatggagtgcactgtgagaagtcaggctggagggactgggtagatacctccactgagaaacagaacacggatgaggggcgctttggtggtcacgtgtctgcccctgtgggagctccaggatga

SEQ ID NO: 4376 - DNA, 2188 bp, Homo sapiens
  source 1..2188: mol_type = genomic DNA
atggcgttgctggtgcgagtccttaggaaccagactagcatttctcagtgggttccagtatgcagccgattgatacctgtgtctcctacccaaggacagggggacagggctctgtctcgcacttcccagtggccccagatgagccagtcccgagcatgtggtggatcagaacagattcctggaatagacatacagctgaataggaagtatcacaccacacgtaagctttctactaccaaagattccccacagcctgttgaggagaaggttggtgctttcacaaagataatagaagccatgggattcacgggacctttgaaatacaggtgtcagatgcctgatacattcaattcatggtttcttataaccctactccacgtctggatgtgtctagtccgaatgaagcaggaaggccggagtgggaagtacatgtgtcgtatcatagttcattttatgtgggaggatgttcagcagcgcggcagagtcatgggggttaatccctatatcctgaagaagaacatgatcctcatgacaaatcatttctatgcagcgatcttgggatatgatgaggggatcctttcagatgatcatgggctggccgctgccctctggagaaccttcttcaaccggaaatgtgaagaccctcgacatcttgaattgctggtagagtatgtgaggaaacagatacagtacctggactccatgaacggggaggatctgcttctgacaggggaggtgagctggcgccctctagtggagaagaatcctcagagcatcctgaagccccattctccgacttacaacgacgagggactttgatgggctgggccctccgcacggcccgccagctggcttcgaggaacctccaggagagaagtgcctgttggtccaggaccctgcagaaagtggcctgaactgacctctgaacagcatctgtcaaatacctggccccatttgtgttgagtttcctcttagtgtgcccaggagtctgatctgctggggtacagggctgggagaacccctagctctcccggggtgtcctctcccttaggggaagccccgagtgagagtcccccagcacacactccccaaccccctccagcaactacatgtgactgatagcttttcccaaaggccaaggaagggatggtgtaggttcaaaagggaaaccccccagggcctgctgtggcctaggagcagattgtaatgctgccgagtccggtcggtgaccacgcgttgtccctcggctttcagccatggggttgagttggccattaaaagaaacagagacttctctctgccatggcccttctttattccagggacttagaaacttgcctgagatggtggacgcagtaatgagggcaccgcgcagctcagttagagacggagaaagggaagaggctgggatggtctctgctgctcttgcctctagttcatggagatgtgtctctgttcaggccaagatacagccagccaggcctgtcgtctgggacccaggaggcctctgatgaccaagggctttcacatcctaagtcatttggaaggaggccttgagaacaaagtcacctttgtcactcccagtgaactgaatgaggaacatgctgtctcctgtcttggcctcccctttcatgagatactggggagaagagaacattcctcctggcttagttgtagcagacccagacctgtgcccagctttggtcccccttcccaacttctgaagcacgtgctgcagagccaccttggtctgagcacctgaggaccagcccctcctccctcagtgcgggtcatctcttgggggattttcttaaagtgaagaaagggggtggggaaccatattgcccctccctcccccatcaaacttccttcatttaacttgctataaaatgagtcatataaagaaactctatatgggtgaggtatatcccacttctgtgaaaacattacaaatcaaaccgcttctctcagtttatttaagatgcttttgttgcgagcggagctctagagtgaagcctcctgtgtgtgtgtgagataataacaccttgtaactcattacagctgggcactatttacataaaccagagctgagccaggcaggaatttgctgattaatttatttttaatggagtgaagtataccatgcaccaaaataaactttactgtgtgtacctaactgctcctggaa

SEQ ID NO: 4377 - DNA, 1988 bp, Homo sapiens
  source 1..1988: mol_type = genomic DNA
attgaggaacatggcgttgctggtgcgagtccttaggaaccagactagcatttctcagtgggttccagtatgcagccgattgatacctgtgtctcctacccaaggacagggggacagggctctgtctcgcacttcccagggtgtcagatgcctgatacattcaattcatggtttcttataaccctactccacgtctggatgtgtctagtccgaatgaagcaggaaggccggagtgggaagtacatgtgtcgtatcatagttcattttatgtgggaggatgttcagcagcgcggcagagtcatgggggttaatccctatatcctgaagaagaacatgatcctcatgacaaatcatttctatgcagcgatcttgggatatgatgaggggatcctttcagatgatcatgggctggccgctgccctctggagaaccttcttcaaccggaaatgtgaagaccctcgacatcttgaattgctggtagagtatgtgaggaaacagatacagtacctggactccatgaacggggaggatctgcttctgacaggggaggtgagctggcgccctctagtggagaagaatcctcagagcatcctgaagccccattctccgacttacaacgacgagggactttgatgggctgggccctccgcacggcccgccagctggcttcgaggaacctccaggagagaagtgcctgttggtccaggaccctgcagaaagtggcctgaactgacctctgaacagcatctgtcaaatacctggccccatttgtgttgagtttcctcttagtgtgcccaggagtctgatctgctggggtacagggctgggagaacccctagctctcccggggtgtcctctcccttaggggaagccccgagtgagagtcccccagcacacactccccaaccccctccagcaactacatgtgactgatagcttttcccaaaggccaaggaagggatggtgtaggttcaaaagggaaaccccccagggcctgctgtggcctaggagcagattgtaatgctgccgagtccggtcggtgaccacgcgttgtccctcggctttcagccatggggttgagttggccattaaaagaaacagagacttctctctgccatggcccttctttattccagggacttagaaacttgcctgagatggtggacgcagtaatgagggcaccgcgcagctcagttagagacggagaaagggaagaggctgggatggtctctgctgctcttgcctctagttcatggagatgtgtctctgttcaggccaagatacagccagccaggcctgtcgtctgggacccaggaggcctctgatgaccaagggctttcacatcctaagtcatttggaaggaggccttgagaacaaagtcacctttgtcactcccagtgaactgaatgaggaacatgctgtctcctgtcttggcctcccctttcatgagatactggggagaagagaacattcctcctggcttagttgtagcagacccagacctgtgcccagctttggtcccccttcccaacttctgaagcacgtgctgcagagccaccttggtctgagcacctgaggaccagcccctcctccctcagtgcgggtcatctcttgggggattttcttaaagtgaagaaagggggtggggaaccatattgcccctccctcccccatcaaacttccttcatttaacttgctataaaatgagtcatataaagaaactctatatgggtgaggtatatcccacttctgtgaaaacattacaaatcaaaccgcttctctcagtttatttaagatgcttttgttgcgagcggagctctagagtgaagcctcctgtgtgtgtgtgagataataacaccttgtaactcattacagctgggcactatttacataaaccagagctgagccaggcaggaatttgctgattaatttatttttaatggagtgaagtataccatgcaccaaaataaactttactgtgtgtacct

SEQ ID NO: 4378 - DNA, 2133 bp, Homo sapiens
  source 1..2133: mol_type = genomic DNA
caaaaggaggacgtagaaaaggggacaccggaaactcactcttcacccggaaatggttattgaggaacatggcgttgctggtgcgagtccttaggaaccagactagcatttctcagtgggttccagtatgcagccgattgatacctgtgtctcctacccaaggacagggggacagggctctgtctcgcacttcccagaagattaagattgcggccctgcgcatgtatactagctgtgtggagaaaactgacttcgaggaattctttctaaggtgtcagatgcctgatacattcaattcatggtttcttataaccctactccacgtctggatgtgtctagtccgaatgaagcaggaaggccggagtgggaagtacatgtgtcgtatcatagttcattttatgtgggaggatgttcagcagcgcggcagagtcatgggggttaatccctatatcctgaagaagaacatgatcctcatgacaaatcatttctatgcagcgatcttgggatatgatgaggggatcctttcagatgatcatgggctggccgctgccctctggagaaccttcttcaaccggaaatgtgaagaccctcgacatcttgaattgctggtagagtatgtgaggaaacagatacagtacctggactccatgaacggggaggatctgcttctgacaggggaggtgagctggcgccctctagtggagaagaatcctcagagcatcctgaagccccattctccgacttacaacgacgagggactttgatgggctgggccctccgcacggcccgccagctggcttcgaggaacctccaggagagaagtgcctgttggtccaggaccctgcagaaagtggcctgaactgacctctgaacagcatctgtcaaatacctggccccatttgtgttgagtttcctcttagtgtgcccaggagtctgatctgctggggtacagggctgggagaacccctagctctcccggggtgtcctctcccttaggggaagccccgagtgagagtcccccagcacacactccccaaccccctccagcaactacatgtgactgatagcttttcccaaaggccaaggaagggatggtgtaggttcaaaagggaaaccccccagggcctgctgtggcctaggagcagattgtaatgctgccgagtccggtcggtgaccacgcgttgtccctcggctttcagccatggggttgagttggccattaaaagaaacagagacttctctctgccatggcccttctttattccagggacttagaaacttgcctgagatggtggacgcagtaatgagggcaccgcgcagctcagttagagacggagaaagggaagaggctgggatggtctctgctgctcttgcctctagttcatggagatgtgtctctgttcaggccaagatacagccagccaggcctgtcgtctgggacccaggaggcctctgatgaccaagggctttcacatcctaagtcatttggaaggaggccttgagaacaaagtcacctttgtcactcccagtgaactgaatgaggaacatgctgtctcctgtcttggcctcccctttcatgagatactggggagaagagaacattcctcctggcttagttgtagcagacccagacctgtgcccagctttggtcccccttcccaacttctgaagcacgtgctgcagagccaccttggtctgagcacctgaggaccagcccctcctccctcagtgcgggtcatctcttgggggattttcttaaagtgaagaaagggggtggggaaccatattgcccctccctcccccatcaaacttccttcatttaacttgctataaaatgagtcatataaagaaactctatatgggtgaggtatatcccacttctgtgaaaacattacaaatcaaaccgcttctctcagtttatttaagatgcttttgttgcgagcggagctctagagtgaagcctcctgtgtgtgtgtgagataataacaccttgtaactcattacagctgggcactatttacataaaccagagctgagccaggcaggaatttgctgattaatttatttttaatggagtgaagtataccatgcaccaaaataaactttactgtgtgtacctaactgctcctggaa

SEQ ID NO: 4379 - DNA, 2201 bp, Homo sapiens
  source 1..2201: mol_type = genomic DNA
attgaggaacatggcgttgctggtgcgagtccttaggaaccagactagcatttctcagtgggttccagtatgcagccgattgatacctgtgtctcctacccaaggacagggggacagggctctgtctcgcacttcccagtggccccagatgagccagtcccgagcatgtggtggatcagaacagattcctggaatagacatacagctgaataggaagtatcacaccacacgtaagctttctactaccaaagattccccacagcctgttgaggagaaggttggtgctttcacaaagataatagaagccatgggattcacgggacctttgaaatacagtaaatggaagattaagattgcggccctgcgcatgtatactagctgtgtggagaaaactgacttcgaggaattctttctaaggtgtcagatgcctgatacattcaattcatggtttcttataaccctactccacgtctggatgtgtctagtccgaatgaagcaggaaggccggagtgggaagtacatgtgtcgtatcatagttcattttatgtgggaggatgttcagcagcgcggcagagtcatgggggggatcctttcagatgatcatgggctggccgctgccctctggagaaccttcttcaaccggaaatgtgaagaccctcgacatcttgaattgctggtagagtatgtgaggaaacagatacagtacctggactccatgaacggggaggatctgcttctgacaggggaggtgagctggcgccctctagtggagaagaatcctcagagcatcctgaagccccattctccgacttacaacgacgagggactttgatgggctgggccctccgcacggcccgccagctggcttcgaggaacctccaggagagaagtgcctgttggtccaggaccctgcagaaagtggcctgaactgacctctgaacagcatctgtcaaatacctggccccatttgtgttgagtttcctcttagtgtgcccaggagtctgatctgctggggtacagggctgggagaacccctagctctcccggggtgtcctctcccttaggggaagccccgagtgagagtcccccagcacacactccccaaccccctccagcaactacatgtgactgatagcttttcccaaaggccaaggaagggatggtgtaggttcaaaagggaaaccccccagggcctgctgtggcctaggagcagattgtaatgctgccgagtccggtcggtgaccacgcgttgtccctcggctttcagccatggggttgagttggccattaaaagaaacagagacttctctctgccatggcccttctttattccagggacttagaaacttgcctgagatggtggacgcagtaatgagggcaccgcgcagctcagttagagacggagaaagggaagaggctgggatggtctctgctgctcttgcctctagttcatggagatgtgtctctgttcaggccaagatacagccagccaggcctgtcgtctgggacccaggaggcctctgatgaccaagggctttcacatcctaagtcatttggaaggaggccttgagaacaaagtcacctttgtcactcccagtgaactgaatgaggaacatgctgtctcctgtcttggcctcccctttcatgagatactggggagaagagaacattcctcctggcttagttgtagcagacccagacctgtgcccagctttggtcccccttcccaacttctgaagcacgtgctgcagagccaccttggtctgagcacctgaggaccagcccctcctccctcagtgcgggtcatctcttgggggattttcttaaagtgaagaaagggggtggggaaccatattgcccctccctcccccatcaaacttccttcatttaacttgctataaaatgagtcatataaagaaactctatatgggtgaggtatatcccacttctgtgaaaacattacaaatcaaaccgcttctctcagtttatttaagatgcttttgttgcgagcggagctctagagtgaagcctcctgtgtgtgtgtgagataataacaccttgtaactcattacagctgggcactatttacataaaccagagctgagccaggcaggaatttgctgattaatttatttttaatggagtgaagtataccatgcaccaaaataaactttactgtgtgtacctaactgctcctggaa

SEQ ID NO: 4380 - DNA, 2447 bp, Homo sapiens
  source 1..2447: mol_type = genomic DNA
cagggagagcgtgcccgggcacgacagcctggtgcacagccgagaaaacaacagcgcgtgcgcgtagcgacctctttgcgcctgcgccccccttgccagtctttcgccggcaaaaggaggacgtagaaaaggggacaccggaaactcactcttcacccggaaatggttattgaggaacatggcgttgctggtgcgagtccttaggaaccagactagcatttctcagtgggttccagtatgcagccgattgatacctgtgtctcctacccaaggacagggggacagggctctgtctcgcacttcccagtggccccagatgagccagtcccgagcatgtggtggatcagaacagattcctggaatagacatacagctgaataggaagtatcacaccacacgtaagctttctactaccaaagattccccacagcctgttgaggagaaggttggtgctttcacaaagataatagaagccatgggattcacgggacctttgaaatacagtaaatggaagattaagattgcggccctgcgcatgtatactagctgtgtggagaaaactgacttcgaggaattctttctaaggtgtcagatgcctgatacattcaattcatggtttcttataaccctactccacgtctggatgtgtctagtccgaatgaagcaggaaggccggagtgggaagtacatgtgtcgtatcatagttcattttatgtgggaggatgttcagcagcgcggcagagtcatgggggttaatccctatatcctgaagaagaacatgatcctcatgacaaatcatttctatgcagcgatcttgggatatgatgaggggatcctttcagatgatcatgggctggccgctgccctctggagaaccttcttcaaccggaaatgtgaagaccctcgacatcttgaattgctggtagagtatgtgaggaaacagatacagtacctggactccatgaacggggaggatctgcttctgacaggggaggtgagctggcgccctctagtggagaagaatcctcagagcatcctgaagccccattctccgacttacaacgacgagggactttgatgggctgggccctccgcacggcccgccagctggcttcgaggaacctccaggagagaagtgcctgttggtccaggaccctgcagaaagtggcctgaactgacctctgaacagcatctgtcaaatacctggccccatttgtgttgagtttcctcttagtgtgcccaggagtctgatctgctggggtacagggctgggagaacccctagctctcccggggtgtcctctcccttaggggaagccccgagtgagagtcccccagcacacactccccaaccccctccagcaactacatgtgactgatagcttttcccaaaggccaaggaagggatggtgtaggttcaaaagggaaaccccccagggcctgctgtggcctaggagcagattgtaatgctgccgagtccggtcggtgaccacgcgttgtccctcggctttcagccatggggttgagttggccattaaaagaaacagagacttctctctgccatggcccttctttattccagggacttagaaacttgcctgagatggtggacgcagtaatgagggcaccgcgcagctcagttagagacggagaaagggaagaggctgggatggtctctgctgctcttgcctctagttcatggagatgtgtctctgttcaggccaagatacagccagccaggcctgtcgtctgggacccaggaggcctctgatgaccaagggctttcacatcctaagtcatttggaaggaggccttgagaacaaagtcacctttgtcactcccagtgaactgaatgaggaacatgctgtctcctgtcttggcctcccctttcatgagatactggggagaagagaacattcctcctggcttagttgtagcagacccagacctgtgcccagctttggtcccccttcccaacttctgaagcacgtgctgcagagccaccttggtctgagcacctgaggaccagcccctcctccctcagtgcgggtcatctcttgggggattttcttaaagtgaagaaagggggtggggaaccatattgcccctccctcccccatcaaacttccttcatttaacttgctataaaatgagtcatataaagaaactctatatgggtgaggtatatcccacttctgtgaaaacattacaaatcaaaccgcttctctcagtttatttaagatgcttttgttgcgagcggagctctagagtgaagcctcctgtgtgtgtgtgagataataacaccttgtaactcattacagctgggcactatttacataaaccagagctgagccaggcaggaatttgctgattaatttatttttaatggagtgaagtataccatgcaccaaaataaactttactgtgtgtacctaactgctcctggaa

SEQ ID NO: 4381 - DNA, 1554 bp, Homo sapiens
  source 1..1554: mol_type = genomic DNA
gggttccagtatgcagccgattgatacctgtgtctcctacccaaggacagggggacagggctctgtctcgcacttcccagctttctactaccaaagattccccacagcctgttgaggagaaggttggtgctttcacaaagataatagaagccatgggattcacgggacctttgaaatacagtaaatggaagattaagattgcggccctgcgcatgtatactagctgtgtggagaaaactgacttcgaggaattctttctaaggtgtcagatgcctgatacattcaattcatggtttcttataaccctactccacgtctggatgtgtctagtccgaatgaagcaggaaggccggagtgggaagtacatgtgtcgtatcatagttcattttatgtgggaggatgttcagcagcgcggcagagtcatgggggttaatccctatatcctgaagaagaacatgatcctcatgacaaatcatttctatgcagcgatcttgggatatgatgaggggatcctttcagatgatcatgggctggccgctgccctctggagaaccttcttcaaccggaaatgtgaagaccctcgacatcttgaattgctggtagagtatgtgaggaaacagatacagtacctggactccatgaacggggaggatctgcttctgacaggggaggtgagctggcgccctctagtggagaagaatcctcagagcatcctgaagccccattctccgacttacaacgacgagggactttgatgggctgggccctccgcacggcccgccagctggcttcgaggaacctccaggagagaagtgcctgttggtccaggaccctgcagaaagtggcctgaactgacctctgaacagcatctgtcaaatacctggccccatttgtgttgagtttcctcttagtgtgcccaggagtctgatctgctggggtacagggctgggagaacccctagctctcccggggtgtcctctcccttaggggaagccccgagtgagagtcccccagcacacactccccaaccccctccagcaactacatgtgactgatagcttttcccaaaggccaaggaagggatggtgtaggttcaaaagggaaaccccccagggcctgctgtggcctaggagcagattgtaatgctgccgagtccggtcggtgaccacgcgttgtccctcggctttcagccatggggttgagttggccattaaaagaaacagagacttctctctgccatggcccttctttattccagggacttagaaacttgcctgagatggtggacgcagtaatgagggcaccgcgcagctcagttagagacggagaaagggaagaggctgggatggtctctgctgctcttgcctctagttcatggagatgtgtctctgttcaggccaagatacagccagccaggcctgtcgtctgggacccaggaggcctctgatgaccaagggctttcacatcctaagtcatttggaaggaggccttgagaacaaagtcacctttgtcactcccagtgaactgaatgaggaacatgctgtctcctgtctt

SEQ ID NO: 4382 - DNA, 1239 bp, Homo sapiens
  source 1..1239: mol_type = genomic DNA
attgaggaacatggcgttgctggtgcgagtccttaggaaccagactagcatttctcagtgggttccagtatgcagccgattgatacctgtgtctcctacccaaggacagggggacagggctctgtctcgcacttcccagtggccccagatgagccagtcccgagcatgtggtggatcagaacagattcctggaatagacatacagctgaataggaagtatcacaccacaccgatcttgggatatgatgaggggatcctttcagatgatcatgggctggccgctgccctctggagaaccttcttcaaccggaaatgtgaagaccctcgacatcttgaattgctggtagagtatgtgaggaaacagatacagtacctggactccatgaacggggaggatctgcttctgacaggggaggtgagctggcgccctctagtggagaagaatcctcagagcatcctgaagccccattctccgacttacaacgacgagggactttgatgggctgggccctccgcacggcccgccagctggcttcgaggaacctccaggagagaagtgcctgttggtccaggaccctgcagaaagtggcctgaactgacctctgaacagcatctgtcaaatacctggccccatttgtgttgagtttcctcttagtgtgcccaggagtctgatctgctggggtacagggctgggagaacccctagctctcccggggtgtcctctcccttaggggaagccccgagtgagagtcccccagcacacactccccaaccccctccagcaactacatgtgactgatagcttttcccaaaggccaaggaagggatggtgtaggttcaaaagggaaaccccccagggcctgctgtggcctaggagcagattgtaatgctgccgagtccggtcggtgaccacgcgttgtccctcggctttcagccatggggttgagttggccattaaaagaaacagagacttctctctgccatggcccttctttattccagggacttagaaacttgcctgagatggtggacgcagtaatgagggcaccgcgcagctcagttagagacggagaaagggaagaggctgggatggtctctgctgctcttgcctctagttcatggagatgtgtctctgttcaggccaagatacagccagccaggcctgtcgtctgggacccaggaggcctctgatgaccaagggctttcacatcctaagtcatttggaaggaggccttgaga

SEQ ID NO: 4383 - DNA, 1055 bp, Homo sapiens
  source 1..1055: mol_type = genomic DNA
acccggaaatggttattgaggaacatggcgttgctggtgcgagtccttgatgtgtctagtccgaatgaagcaggaaggccggagtgggaagtacatgtgtcgtatcatagttcattttatgtgggaggatgttcagcagcgcggcagagtcatgggggttaatccctatatcctgaagaagaacatgatcctcatgacaaatcatttctatgcagcgatcttgggatatgatgaggggatcctttcagatgatcatgggctggccgctgccctctggagaaccttcttcaaccggaaatgtgaagaccctcgacatcttgaattgctggtagagtatgtgaggaaacagatacagtacctggactccatgaacggggaggatctgcttctgacaggggaggtgagctggcgccctctagtggagaagaatcctcagagcatcctgaagccccattctccgacttacaacgacgagggactttgatgggctgggccctccgcacggcccgccagctggcttcgaggaacctccaggagagaagtgcctgttggtccaggaccctgcagaaagtggcctgaactgacctctgaacagcatctgtcaaatacctggccccatttgtgttgagtttcctcttagtgtgcccaggagtctgatctgctggggtacagggctgggagaacccctagctctcccggggtgtcctctcccttaggggaagccccgagtgagagtcccccagcacacactccccaaccccctccagcaactacatgtgactgatagcttttcccaaaggccaaggaagggatggtgtaggttcaaaagggaaaccccccagggcctgctgtggcctaggagcagattgtaatgctgccgagtccggtcggtgaccacgcgttgtccctcggctttcagccatggggttgagttggccattaaaagaaacagagacttctctctgccatggcccttctttattccagggacttagaaacttgcctgagatggtggacgcagtaatgagggcaccgcgcagctcagttagagacgg

SEQ ID NO: 4384 - DNA, 1001 bp, Homo sapiens
  source 1..1001: mol_type = genomic DNA
attgaggaacatggcgttgctggtgcgagtccttaggaaccagactagcatttctcagtgggttccagtatgcagccgattgatacctgtgtctcctacccaaggacagggggacagggctctgtctcgcacttcccagtggccccagatgagccagtcccgagcatgtggtggatcagaacagattcctggaatagacatacagctgaataggaagtatcacaccacacgtaagctttctactaccaaagattccccacagcctgttgaggagaaggttggtgctttcacaaagataatagaagccatgggattcacgggacctttgaaatacagtaaatgggatgtgtctagtccgaatgaagcaggaaggccggagtgggaagtacatgtgtcgtatcatagttcattttatgtgggaggatgttcagcagcgcggcagagtcatgggggttaatccctatatcctgaagaagaacatgatcctcatgacaaatcatttctatgcagcgatcttgggatatgatgaggggatcctttcagatgatcatgggctggccgctgccctctggagaaccttcttcaaccggaaatgtgaagaccctcgacatcttgaattgctggtagagtatgtgaggaaacaggtgagtgaccctttccctcccctcccaagtcctggcaacagtgggtcctcctcttgggctttcaggggatcatgagaggtggagttaccaaggaccagcctgagagaattctgaccagatcacatcagcactagacgctgaagaaggagcgccttctgtatgtccaaccatgaactgggccagggagcgggaaatgggaagagagagagaaagaggcatcgagtagtctcctgccctcaggaactttgagtcattcattcactgtgcacctcattgcctactgtgcgcccagtgctatgctagcagctgggcccacagagtcctggcagatatgagcacgtggtgtagtagcagctg

SEQ ID NO: 4385 - DNA, 1224 bp, Homo sapiens
  source 1..1224: mol_type = genomic DNA
atttcctttccggcggcgcgctgtcgtcacgcgtcccgcgcctcctcgcgcctgcgccgtggttggaaggtcgtccctgtgaccggcttggcggttggagcggctgtcgccatgttgtcggtagcatcccgctcaggcccgttcgcgcccgtcctgtcggccacgtcccgcggggtggcgggcgcgctgcggcccttggtgcaggccacggtgcccgccaccccggagcagcctgtgttggacctgaagcggcccttcctcagccgggagtcgctgagcggccaggccgtgcgccggcctttggtcgcctccgtgggcctcaatgtccctgcttctgtttgttattcccacacagacatcaaggtgcctgacttctctgaataccgccgccttgaagttttagatagtacgaagtcttcaagagaaagcagcgaggctaggaaaggtttctcctatttggtaactggagtaactactgtgggtgtcgcatatgctgccaagaatgccgtcacccagttcgtttccagcatgagtgcttctgctgatgtgttggccctggcgaaaatcgaaatcaagttatccgatattccagaaggcaagaacatggctttcaaatggagaggcaaacccctgtttgtgcgtcatagaacccagaaggaaattgagcaggaagctgcagttgaattatcacagttgagggacccacagcatgatctagatcgagtaaagaaacctgaatgggttatcctgataggtgtttgcactcatcttggctgtgtacccattgcaaatgcaggagattttggtggttattactgcccttgccatgggtcacactatgatgcatctggcaggatcagattgggtcctgctcctctcaaccttgaagtccccacgtatgagttcaccagtgacgatatggtgattgttggttaagagacttggactcaagtcataggcttctttcagtctttatgtcacctcaggagacttatttgagaggaagccttctgtacttgaagttgatttgaaatatgtaagaattgatgatgtatttgcaaacattaatgtgaaataaattgaatttaatgttgaatactttcaggcattcacttaataaagacactgttaagcactgttatgctcagtcatacacgcgaaaggtacaatgtcttttagctaattctaattaaaaattacagactggtgtacaagatacttgtg

SEQ ID NO: 4386 - DNA, 3181 bp, Homo sapiens
  source 1..3181: mol_type = genomic DNA
gggactgggaacggtgggagccgccgtgtgtggagaagctgctgccggtgtcatggcggagctgagtgaggaggcgctgctgtcagtattaccgacgatccgggtccctaaggctggagaccgggtccacaaagacgagtgcgccttctccttcgacacgccggagtctgaggggggcctctacatctgtatgaacacgtttctgggctttgggaaacagtatgtggagagacatttcaataagaccggccagcgagtctacttgcacctccggcggacccggcgcccgaaagaggaggaccctgctacaggcactggagacccaccccggaagaagcccacgcggctggctattggtgttgaaggcggatttgaccttagcgaggagaagtttgaattagacgaggatgtgaagattgtcattttgccagattacctggagattgcccgggatggactggggggactgcctgacattgtcagagatcgggtgaccagtgcagtggaggccctactgtcggccgactcagcctcccgcaagcaggaggtgcaggcatgggatggggaagtacggcaggtgtctaagcatgccttcagcctcaagcagttggacaaccctgctcgaatccctccctgtggctggaagtgctccaagtgtgacatgagagagaacctgtggctcaacctgactgatggctccatcctctgtgggcgacgctacttcgatggcagtgggggcaacaaccacgctgtggagcactaccgagagacaggctacccgttagctgtcaagctgggcaccatcacccctgatggagctgacgtgtactcatatgatgaggatgacatggtcctggaccccagcctggctgagcacctgtcccacttcggcatcgacatgctgaagatgcagaagacagacaagacgatgactgagttggagatagacatgaaccagcggattggtgaatgggagctgatccaggagtcaggtgtgccactcaagcccctgtttgggcctggctacacaggcatccggaacctgggtaacagctgctacctcaactctgtggtccaggtgctcttcagcatccctgacttccagaggaagtatgtggataagctggagaagatcttccagaatgccccgacggaccctacccaggatttcagcacccaggtggccaagctgggccatggccttctctccggggagtattccaagccagtaccggagtcgggcgatggggagcgggtgccagaacagaaggaagttcaagatggcattgcccctcggatgttcaaggccctcatcggcaagggccaccctgaattctccaccaaccggcagcaggatgcccaggagttcttccttcaccttatcaacatggtggagaggaattgccggagctctgaaaatcctaatgaagtgttccgcttcttggtggaggaaaagatcaagtgcctggccacagagaaggtgaagtacacccagcgagttgactacatcatgcagctgcctgtgcccatggatgcagcccttaacaaagaggagcttctggagtacgaggagaagaagcggcaagccgaagaggagaagatggcactgccagaactggttcgggcccaggtgcccttcagctcttgcctggaggcctacggggcccctgagcaggtcgatgacttctggagcacggccctgcaggccaagtcagtagctgtcaagaccacacgatttgcctcattccctgactacctggtcatccagatcaagaagttcaccttcggcttagactgggtgcccaagaaactggatgtgtccatcgagatgccagaggagctcgacatctcccagttgaggggcacagggctgcagcccggagaggaggagctgccagacattgccccacccctggtcactccggatgagcccaaaggtagccttggtttctatggcaacgaagacgaagactccttctgctcccctcacttctcctctccgacatcgcccatgctggatgaatcagtcatcatccagctggtggagatgggattccctatggacgcctgccgcaaagctgtctactacacgggcaacagcggggctgaggccgccatgaactgggtcatgtcacacatggatgatccagattttgcaaaccccctcatcctgcctggctctagtgggccgggctccacaagcgcagcagccgacccccctcctgaggactgtgtgaccaccattgtctccatgggcttctcccgggaccaggccttgaaagcgctgcgggccacgaacaatagtttagaacgggctgtggactggatcttcagtcacattgacgacctggatgctgaagctgccatggacatctcagagggccgctcagctgccgactccatctctgagtctgtgccagtgggacctaaagtccgggatggtcctggaaagtatcagctctttgccttcattagtcacatgggcacctctaccatgtgtggtcactacgtctgccacatcaagaaagaaggcagatgggtgatctacaatgaccagaaagtgtgtgcctccgagaagccgcccaaggacctgggctacatctacttctaccagagagtggccagctaagagcctgcctcaccccttaccaatgagggcaggggaagaccacctggcatgagggagaggggctgagggatggacttcagcccctctgctctgtaccctttttccttttgtccccggcagcagggaagaagctggaggccgtgggagaatggctgggcagagcagaggggcagcgatagactctggggatggagcaggacggggacgggaggggccggccacctgtctgtaaggagactttgttgcttcccctgcccccggaatccacagtgctctgcttctctgtgtcgccccgcccagccccctggtgtggagggaggggtctcgtttgtgcgcgtgggtgtagctttgtgcatcctctcccagtggagcgatcacctgtgcctcccctccccctttgtttgcccctgtgtggttggtcaaggagggatgtgagggaaatagggaccccccgacttgccctcctgcctcagtctttcccccaccctgtctcttccttgtccttctctggaaaatgccaaaatacacgatgtgaataaaagtacaacggct

SEQ ID NO: 4387 - DNA, 3083 bp, Homo sapiens
  source 1..3083: mol_type = genomic DNA
ccgccgtgtgtggagaagctgctgccggtgtcatggcggagctgagtgaggaggcgctgctgtcagtattaccgacgatccgggtccctaaggctggagaccgggtccacaaagacgagtgcgccttctccttcgacacgccggagtctgaggggggcctctacatctgtatgaacacgtttctgggctttgggaaacagtatgtggagagacatttcaataagaccggccagcgagtctacttgcacctccggcggacccggcgcccgaaagaggaggaccctgctacaggcactggagacccaccccggaagaagcccacgcggctggctattggtgttgaaggcggatttgaccttagcgaggagaagtttgaattagacgaggatgtgaagattgtcattttgccagattacctggagattgcccgggatggactggggggactgcctgacattgtcagagatcgggtgaccagtgcagtggaggccctactgtcggccgactcagcctcccgcaagcaggaggtgcaggcatgggatggggaagtacggcaggtgtctaagcatgccttcagcctcaagcagttggacaaccctgctcgaatccctccctgtggctggaagtgctccaagtgtgacatgagagagaacctgtggctcaacctgactgatggctccatcctctgtgggcgacgctacttcgatggcagtgggggcaacaaccacgctgtggagcactaccgagagacaggctacccgttagctgtcaagctgggcaccatcacccctgatggagctgacgtgtactcatatgatgaggatgacatggtcctggaccccagcctggctgagcacctgtcccacttcggcatcgacatgctgaagatgcagaagacagacaagacgatgactgagttggagatagacatgaaccagcggattggtgaatgggagctgatccaggagtcaggtgtgccactcaagcccctgtttgggcctggctacacaggcatccggaacctgggtaacagctgctacctcaactctgtggtccaggtgctcttcagcatccctgacttccagaggaagtatgtggataagctggagaagatcttccagaatgccccgacggaccctacccaggatttcagcacccaggtggccaagctgggccatggccttctctccggggagtattccaagccagtaccggagtcgggcgatggggagcgggtgccagaacagaaggaagttcaagatggcattgcccctcggatgttcaaggccctcatcggcaagggccaccctgaattctccaccaaccggcagcaggatgcccaggagttcttccttcaccttatcaacatggtggagaggaattgccggagctctgaaaatcctaatgaagtgttccgcttcttggtggaggaaaagatcaagtgcctggccacagagaaggtgaagtacacccagcgagttgactacatcatgcagctgcctgtgcccatggatgcagcccttaacaaagaggagcttctggagtacgaggagaagaagcggcaagccgaagaggagaagatggcactgccagaactggttcgggcccaggtgcccttcagctcttgcctggaggcctacggggcccctgagcaggtcgatgacttctggagcacggccctgcaggccaagtcagtagctgtcaagaccacacgatttgcctcattccctgactacctggtcatccagatcaagaagttcaccttcggcttagactgggtgcccaagaaactggatgtgtccatcgagatgccagaggagctcgacatctcccagttgaggggcacagggctgcagcccggagaggaggagctgccagacattgccccacccctggtcactccggatgagcccaaagcgcccatgctggatgaatcagtcatcatccagctggtggagatgggattccctatggacgcctgccgcaaagctgtctactacacgggcaacagcggggctgaggccgccatgaactgggtcatgtcacacatggatgatccagattttgcaaaccccctcatcctgcctggctctagtgggccgggctccacaagcgcagcagccgacccccctcctgaggactgtgtgaccaccattgtctccatgggcttctcccgggaccaggccttgaaagcgctgcgggccacgaacaatagtttagaacgggctgtggactggatcttcagtcacattgacgacctggatgctgaagctgccatggacatctcagagggccgctcagctgccgactccatctctgagtctgtgccagtgggacctaaagtccgggatggtcctggaaagtatcagctctttgccttcattagtcacatgggcacctctaccatgtgtggtcactacgtctgccacatcaagaaagaaggcagatgggtgatctacaatgaccagaaagtgtgtgcctccgagaagccgcccaaggacctgggctacatctacttctaccagagagtggccagctaagagcctgcctcaccccttaccaatgagggcaggggaagaccacctggcatgagggagaggggctgagggatggacttcagcccctctgctctgtaccctttttccttttgtccccggcagcagggaagaagctggaggccgtgggagaatggctgggcagagcagaggggcagcgatagactctggggatggagcaggacggggacgggaggggccggccacctgtctgtaaggagactttgttgcttcccctgcccccggaatccacagtgctctgcttctctgtgtcgccccgcccagccccctggtgtggagggaggggtctcgtttgtgcgcgtgggtgtagctttgtgcatcctctcccagtggagcgatcacctgtgcctcccctccccctttgtttgcccctgtgtggttggtcaaggagggatgtgagggaaatagggaccccccgacttgccctcctgcctcagtctttcccccaccctgtctcttccttgtccttctctggaaaatgccaaaatacacgatgtgaataaaagt

SEQ ID NO: 4388 - DNA, 4224 bp, Homo sapiens
  source 1..4224: mol_type = genomic DNA
cttctcccaccgcctgtcggctgacgtgtctgcagttcctccgcgtctactgcgagtcaggccgtgatggcggacgcctgggaagagattaggcggttggcggccgacttccagcgggcgcagttcgccgaggccacgcagaggttgtccgagcggaactgcattgagattgttaataaattgattgctcagaaacagctagaagtagttcatacactcgatggaaaggaatatattactccagcccaaattagtaaagaaatgagagatgagctacatgtccgaggtggtcgagtaaacattgttgatctacaacaggtaattaatgtggacctgattcatattgaaaatagaattggtgacattattaaatcagaaaagcatgttcagttagtgttgggacaactgatagatgagaattatttggatcggttggcagaagaggtcaatgataaattgcaagaaagtggtcaggtcaccatatcagaactgtgtaaaacttatgatcttcctgggaactttctgacacaggcactaactcagcgacttggtagaattatcagtggacatattgatcttgataatagaggagtaatttttacggaagcttttgtagctcgacataaagcacgtatccgtggactattcagtgctattacccggcctacagctgtgaattctttgatttcaaaatatggatttcaggagcagcttctttactctgtgcttgaggaacttgttaatagcggacgcttacgaggcactgtggttggtgggagacaggataaagctgtgtttgtccctgacatctactccaggacacagagtacttgggtggattcctttttcaggcagaatggctatctagaatttgatgctttgtccagacttggaatcccagatgctgtaagctacataaagaaaagatataagactacacaactcttgtttttgaaagcagcttgtgttggtcaaggacttgtggatcaagtggaagcatcagtagaagaagccatcagctctggaacatgggttgatattgcacctctgctacccacttctttatcagttgaagatgctgccatattgcttcagcaggtgatgagggcattcagcaaacaggcctcaactgtagtctttagcgacactgttgtagtcagtgaaaaatttataaatgactgtacagaactgttccgtgagctgatgcaccagaaagctgaaaaggaaatgaaaaataatcctgtgcatttaatcactgaagaagatctgaaacaaatctccactttagaaagcgttagtacaagtaaaaaggataaaaaagatgagcgaagaaggaaagcaacagagggcagtggaagcatgagaggaggaggtgggggcaatgccagagagtacaaaattaaaaaagtcaagaagaaaggaagaaaagatgatgatagtgatgatgaatctcaatcatcccacactggaaagaagaagccagagatcagttttatgttccaggatgagattgaagattttttaagaaaacacatacaagatgcccctgaggagtttatttcggaacttgctgagtacttaataaaacctcttaataaaacttatctcgaggtggtacgttcagtattcatgtcttcaacaacttctgcttctgggacgggcagaaaacgcacaatcaaggacttgcaagaagaagtttcaaacctgtacaataacattaggttatttgaaaaagggatgaagttttttgcagatgacacacaggctgctcttaccaaacacttgctgaagtcagtgtgtactgatatcactaacctcattttcaacttcttagcttcggatttaatgatggcagtagacgatcctgcagccattacaagtgaaataagaaagaaaattttaagtaaattatcagaagaaaccaaagtagctcttacaaaactccataactctctgaatgaaaagagcatagaagactttatttcttgtctggattctgcagcagaagcttgtgatattatggtgaaaaggggagacaaaaaaagggaaagacagatactgttccaacatcgacaagcactggctgaacagctaaaggtcacagaagaccctgctcttattctgcacctcacatcagtcctgttgtttcagttttcaacccacagcatgctccatgcacctggaagatgtgtcccacagatcattgcttttcttaatagtaaaattccagaggatcagcatgctcttttggtaaagtatcaaggtttggttgtaaagcagctagtcagtcaaagtaagaagactgggcagggagattatcccttgaataatgaattagacaaagaacaagaagatgttgccagtactactcgtaaagagcttcaagaactttcttcatccattaaagaccttgttctcaaatctaggaaatcatctgtgacggaagagtaatgatcttaatttacatttgtcatatagtaagcattttcccccaaggttgaaggtgagtggtcacaaaaaagtagtcactatacaactcccctctccctgcaaaaaccacctcatacacacacaattcagttaaaacagtagtattgtattaaatgtaaatcttaaaaagatgtgaatttttgtaaattgggttcttcatggaagtttttttccacctgattttcacacaaatactatatgaaatttttcacattattttcacataattttaaaaattacatatttcaggtttgttctctttccaaatgttgaatgaaaaacaaattttccaatccatttatccctggggaaggattcatttgttgcgagtgccagtatacttaaatgtatactttatatacatttaagcagaaatttaaaatgtggtcttttttttttaaaagaaacacttctgtgtcagaaatgaaaataaatcatgttttttatttttaaatagaaagcacttcaaaactaaaatacagaaatttacaaaaaagaaaaattattactaagcccttgctcttatttttggcagaataaacattgattttggttggggctgcaaggatgcctttacaggtgcacaagaacgctagagtggcccatgcattgctgtgttctcttctaaaacaagctactaacaagagagagaacacatgcaatttattaccagtaagcataagtcatatttaacattggaataactaagcattttatacaaagatttttctttgacccagtttgcatttgtacattttatttttttagttcaacagctgctctgtcacataatactttgtaaatactagtgtgaaaaacagataggatgccttttccagtggtaggagcatctgtaagtgcatttaaatcattagaagcttttttccaaaactagaaacccttattaaaaaatagacatttttttctaaagattattagttaaaaataactaaaagagttccttagagtaatcatttcaaccaaatgaatttcaagcaacaacttacttactatttatcaaaaagggatttaattattttgaatataattataaattaaatttcaaatatttaaaaatactattttatataattccttatgacattttaaactttatattttaaaatatttgaatacgaaaagatcagtctacctctactccattctagacaaagtattaatccttagtgaaagtaattaattaaattgccaacttggcattattattaaacttgataggaacgcaacattaaatttaaaaatgttttcccgtgggtaattttctattatatattttcatatgggcaaagggaaaaaatgataaatcctctgtaatcacaaaccccaatttcgttttgtttattcagcttctaaaatattgaacacccagacttttaattcaacctttaagaaccttatcatttatgtttcagtagatatcaaagtaatccatgtttgtgtcaaatgatcatagaaaataaatagaagagacagtgaagcaagtaaaaagaaaagcattgttttaatttgtttgcattaatttttttcatttgtcaaaatgcttcttttgttgccacagtaaagaacagtttttattgttttgtaagtaaaattacgtagctgattttgtatgtaaagattaatttccataataaaaattattgtatgtttactgtgatcttaatgggcagggttaagaaagttatttaaaataaagttacctattctactaaa

SEQ ID NO: 4389 - DNA, 2071 bp, Homo sapiens
  source 1..2071: mol_type = genomic DNA
gcatgcgcgggccgcttggcgccaattgctgaccgccacagccacagccagggctagcctcgccggttcccgggtggcgcgcgttcgctgcctcctcagctccaggatgatcggccagaagacgctctactcctttttctcccccagccccgccaggaagcgacacgcccccagccccgagccggccgtccaggggaccggcgtggctggggtgcctgaggaaagcggagatgcggcggccatcccagccaagaaggccccggctgggcaggaggagcctgggacgccgccctcctcgccgctgagtgccgagcagttggaccggatccagaggaacaaggccgcggccctgctcagactcgcggcccgcaacgtgcccgtgggctttggagagagctggaagaagcacctcagcggggagttcgggaaaccgtattttatcaagctaatgggatttgttgcagaagaaagaaagcattacactgtttatccacccccacaccaagtcttcacctggacccagatgtgtgacataaaagatgtgaaggttgtcatcctgggacaggatccatatcatggacctaatcaagctcacgggctctgctttagtgttcaaaggcctgttccgcctccgcccagtttggagaacatttataaagagttgtctacagacatagaggattttgttcatcctggccatggagatttatctgggtgggccaagcaaggtgttctccttctcaacgctgtcctcacggttcgtgcccatcaagccaactctcataaggagcgaggctgggagcagttcactgatgcagttgtgtcctggctaaatcagaactcgaatggccttgttttcttgctctggggctcttatgctcagaagaagggcagtgccattgataggaagcggcaccatgtactacagacggctcatccctcccctttgtcagtgtatagagggttctttggatgtagacacttttcaaagaccaatgagctgctgcagaagtctggcaagaagcccattgactggaaggagctgtgatcatcagctgaggggtggcctttgagaagctgctgttaacgtatttgccagttacgaagttccactgaaaattttcctattaattcttaagtactctgcataagggggaaaagcttccagaaagcagccatgaaccaggctgtccaggaatggcagctgtatccaaccacaaacaacaaaggctaccctttgaccaaatgtctttctctgcaacatggcttcggcctaaaatatgcagaagacagatgaggtcaaatactcagttggctctctttatctcccttgcctttatggtgaaacaggggagatgtgcacctttcaggcacagccctagtttggcgcctgctgctccttggttttgcctggttagactttcagtgacagatgttggggtgtttttgcttagaaaggtccccttgtctcagccttgcagggcaggcatgccagtctctgccagttccactgcccccttgatctttgaaggagtcctcaggcccctcgcagcataaggatgttttgcaactttccagaatctggcccagaaattagggctcaatttcctgattgtagtagaggttaagattgctgtgagctttatcagataagagaccgagagaagtaagctgggtcttgttattccttgggtgttggtggaataagcagtggaatttgaacaaggaagaggagaaaagggaattttgtctttatggggtggggtgattttctcctagggttatgtccagttggggtttttaaggcagcacagactgccaagtactgttttttttaaccgactgaaatcactttgggatattttttcctgcaacactggaaagttttagttttttaagaagtactcatgcagatatatatatatatatttttcccagtcctttttttaagagacggtctttattgggtctgcacctccatccttgatcttgttagcaatgctgtttttgctgttagtcgggttagagttggctctacgcgaggtttgttaataaaagtttgttaaaagtt

SEQ ID NO: 4390 - DNA, 2130 bp, Homo sapiens
  source 1..2130: mol_type = genomic DNA
aaaagaccacgtggggacgcggtggggcgggtctggcgggggcggggcacctctgtgcagggttcccagtcaccgcgacgctcctcgggaagccatagggcgcctcccagcccgtctccccgctccagtttagaacctaattcccaattcccggaccgggcccagccctgggctcttactgtccgcttttgctgggacctgttccacaaatgggcgtcttctgccttgggccgtgggggttgggccggaagctgcggacgcctgggaaggggccgctgcagctcttgagccgcctctgcggggaccacttgcaggccatcccagccaagaaggccccggctgggcaggaggagcctgggacgccgccctcctcgccgctgagtgccgagcagttggaccggatccagaggaacaaggccgcggccctgctcagactcgcggcccgcaacgtgcccgtgggctttggagagagctggaagaagcacctcagcggggagttcgggaaaccgtattttatcaagctaatgggatttgttgcagaagaaagaaagcattacactgtttatccacccccacaccaagtcttcacctggacccagatgtgtgacataaaagatgtgaaggttgtcatcctgggacaggatccatatcatggacctaatcaagctcacgggctctgctttagtgttcaaaggcctgttccgcctccgcccagtttggagaacatttataaagagttgtctacagacatagaggattttgttcatcctggccatggagatttatctgggtgggccaagcaaggtgttctccttctcaacgctgtcctcacggttcgtgcccatcaagccaactctcataaggagcgaggctgggagcagttcactgatgcagttgtgtcctggctaaatcagaactcgaatggccttgttttcttgctctggggctcttatgctcagaagaagggcagtgccattgataggaagcggcaccatgtactacagacggctcatccctcccctttgtcagtgtatagagggttctttggatgtagacacttttcaaagaccaatgagctgctgcagaagtctggcaagaagcccattgactggaaggagctgtgatcatcagctgaggggtggcctttgagaagctgctgttaacgtatttgccagttacgaagttccactgaaaattttcctattaattcttaagtactctgcataagggggaaaagcttccagaaagcagccatgaaccaggctgtccaggaatggcagctgtatccaaccacaaacaacaaaggctaccctttgaccaaatgtctttctctgcaacatggcttcggcctaaaatatgcagaagacagatgaggtcaaatactcagttggctctctttatctcccttgcctttatggtgaaacaggggagatgtgcacctttcaggcacagccctagtttggcgcctgctgctccttggttttgcctggttagactttcagtgacagatgttggggtgtttttgcttagaaaggtccccttgtctcagccttgcagggcaggcatgccagtctctgccagttccactgcccccttgatctttgaaggagtcctcaggcccctcgcagcataaggatgttttgcaactttccagaatctggcccagaaattagggctcaatttcctgattgtagtagaggttaagattgctgtgagctttatcagataagagaccgagagaagtaagctgggtcttgttattccttgggtgttggtggaataagcagtggaatttgaacaaggaagaggagaaaagggaattttgtctttatggggtggggtgattttctcctagggttatgtccagttggggtttttaaggcagcacagactgccaagtactgttttttttaaccgactgaaatcactttgggatattttttcctgcaacactggaaagttttagttttttaagaagtactcatgcagatatatatatatatatttttcccagtcctttttttaagagacggtctttattgggtctgcacctccatccttgatcttgttagcaatgctgtttttgctgttagtcgggttagagttggctctacgcgaggtttgttaata

SEQ ID NO: 4391 - DNA, 1326 bp, Homo sapiens
  source 1..1326: mol_type = genomic DNA
gtgcagggttcccagtcaccgcgacgctcctcgggaagccatagggcgcctcccagcccgtctccccgctccagtttagaacctaattcccaattcccggaccgggcccagccctgggctcttactgtccgcttttgctgggacctgttccacaaatgggcgtcttctgccttgggccgtgggggttgggccggaagctgcggacgcctgggaaggggccgctgagtgccgagcagttggaccggatccagaggaacaaggccgcggccctgctcagactcgcggcccgcaacgtgcccgtgggctttggagagagctggaagaagcacctcagcggggagttcgggaaaccgtattttatcaagctaatgggatttgttgcagaagaaagaaagcattacactgtttatccacccccacaccaagtcttcacctggacccagatgtgtgacataaaagatgtgaaggttgtcatcctgggacaggatccatatcatggacctaatcaagctcacgggctctgctttagtgttcaaaggcctgttccgcctccgcccagtttggagaacatttataaagagttgtctacagacatagaggattttgttcatcctggccatggagatttatctgggtgggccaagcaaggtgttctccttctcaacgctgtcctcacggttcgtgcccatcaagccaactctcataaggagcgaggctgggagcagttcactgatgcagttgtgtcctggctaaatcagaactcgaatggccttgttttcttgctctggggctcttatgctcagaagaagggcagtgccattgataggaagcggcaccatgtactacagacggctcatccctcccctttgtcagtgtatagagggttctttggatgtagacacttttcaaagaccaatgagctgctgcagaagtctggcaagaagcccattgactggaaggagctgtgatcatcagctgaggggtggcctttgagaagctgctgttaacgtatttgccagttacgaagttccactgaaaattttcctattaattcttaagtactctgcataagggggaaaagcttccagaaagcagccatgaaccaggctgtccaggaatggcagctgtatccaaccacaaacaacaaaggctaccctttgaccaaatgtctttctctgcaacatggcttcggcctaaaatatgcagaagacagatgaggtcaaatactcagttggctctctttatctcccttgcctttatggtgaaacaggggagatgtgcacctttcaggcacagccctagtttggcgcctgctgctccttggtt

SEQ ID NO: 4392 - DNA, 9967 bp, Homo sapiens
  source 1..9967: mol_type = genomic DNA
gcctccgtctctcgctgggctcgctagggctgcgcgttgggccagcgggggcgccgcagctgaagccgccccggagccggtgaaccgaattacctcgagggaggggcgtggggaaggcggcgggaggaggagcgcacgggccggctgccgtgcccaccacggctgaggaacatggttttcgagtcggtggtcgtggacgtgttgaaccggttcttgggggactatgtggtggacttggacacgtcccagctctctctgggcatctggaaaggagctgtggccctcaagaatcttcaaattaaagaaaatgccctgagtcaactggatgtaccatttaaagttaaagttggtcacataggtaatcttaaacttataattccatggaaaaacctttatactcaacctgttgaagccgtattggaagaaatttatttacttatagtgccttcttctagaataaaatatgatcctttaaaagaagagaaacaactcatggaagcaaagcaacaggaactgaaaagaatagaagaagcaaaacaaaaagtagttgatcaagaacaacatctgccggaaaaacaggacacttttgcagaaaaattagttacacagatcataaaaaatcttcaggtgaaaatttccagtatccatattcgttatgaagatgatatcacaaatcgggacaaaccgctgtcatttggtatttcccttcaaaatctgagcatgcagacaactgatcaatactgggttccatgtttacatgatgaaactgagaaactggttcgtaagttaatccgattggataacctgtttgcctattggaatgtgaagtctcagatgttttatcttagtgattatgataactccttggacgacttgaagaatggcattgtcaatgaaaatattgttccagaaggttatgattttgtatttcgtcccatatctgctaatgccaaacttgtgatgaatcgccgatctgattttgacttttctgcccccaaaataaacttggaaattgagttacataacatagcaattgaatttaataaaccacagtatttcagtattatggagcttcttgaatcagttgatatgatggcacaaaatctgccatataggaagttcaaacctgatgtgcctcttcaccaccatgccagagaatggtgggcttatgctatacatggcgttcttgaagtaaatgtttgccccaggttatggatgtggtcatggaagcatattagaaaacataggcaaaaagtgaagcaatataaagaactgtataaaaaaaagttaacaagtaagaagccacctggtgaacttctcgtgtctttggaggagttggaaaaaaccttggatgtctttaatataactatagctagacagacggcagaagttgaggtaaagaaagctggatacaaaatttacaaagaaggagtaaaagatccagaggataataaagggtggtttagctggctatggtcttggtcagaacaaaatactaatgaacagcaaccagatgttcaacctgaaactcttgaagaaatgttgacacctgaagaaaaagctttactctatgaagcaattggctatagtgaaacagcagttgatccaactttactaaaaacatttgaagccttgaagttttttgtccacttgaaaagtatgtctattgttctaagagaaaatcatcaaaaacctgagctggtagatattgtaatagaagaatttagcaccttaattgtgcaaagaccaggagcacaagcaataaaatttgaaactaaaatagattcatttcatattactggcttaccagataattcagaaaaaccccgcctcctgtcttcattggatgatgcaatgtcacttttccaaattacatttgagataaatccattagatgaaactgtttctcagaggtgtatcatagaagctgaacctttagaaatcatatatgatgcaaggacagtgaatagtatagtggaattcttcagacctccaaaagaggtacatctagcacagctcactgcagcaactttgacaaaactggaagaatttcgcagtaagacagcaacaggtctactgtatattattgaaacacagaaagttcttgatctcaaaattaatttgaaggcttcatatattattgtcccacaagatggaatttttagtcctacatcaaatctgcttcttttggaccttggtcatctaaaggtgacgagtaaaagtcgttctgaattaccagatgtgaaacaaggtgaggccaatcttaaagagataatggatagagcttatgattcatttgatattcaacttacaagtgtacagctgctttacagtagagttggtgataattggagagaagcacgaaaactcagtgtatctacccagcatattttggtacccatgcacttcaatttggaactgtctaaggccatggttttcatggatgtaaggatgcccaaattcaagatttatggaaagttacctcttatttctttacgaatctcagataaaaaactacaagggattatggaattgattgaaagcattccaaaacctgaaccagtaactgaagtatctgcccctgtcaaatcattccagattcaaacatctacttctttgggaacatcacagatttcacagaaaataattcctctcttggaacttccatctgtttctgaagatgattcagaggaggaattttttgatgcaccatgtagtcccttggaagaacctcttcagtttccaactggagttaaaagtattcgaaccagaaagttacaaaagcaggattgttcagtaaatatgactacatttaaaataagatttgaagtaccaaaggttttgatcgagttttatcaccttgttggagattgtgaactatctgtggtagaaattcttgttttaggattgggtgcagaaattgagattagaacatacgatttgaaagcaaatgcctttttgaaagagttctgcttaaaatgcccagaatacttggatgaaaacaagaaaccagtttatttggttacaaccctggataacacaatggaagacctgttaacgctggaatatgtaaaggctgaaaagaatgtacccgacttgaaaagtacctataacaatgttttacaattgattaaggtaaatttttcctctttggatattcatttacacactgaagcacttctgaatacaataaattatcttcataatatccttccgcaatcagaggaaaaatcagccccagtgtccactacagagactgaagacaaaggagatgtcattaaaaaattagctttaaaactatccacaaatgaagatatcattactttgcagattttagcagaattatcgtgtttacagatctttattcaagatcagaaatgtaacatttctgaaattaagattgaagggcttgattctgagatgattatgaggccttcagaaactgaaataaacgcaaagctaaggaatataattgttttagattctgatataacagctatatacaaaaaggctgtttatatcactggaaaagaagttttcagcttcaaaatggtttcttacatggatgcaactgctggttctgcatacacagatatgaatgtggttgacattcaggttaatttaatagttggttgcattgaagtagtttttgtcacgaaatttctatattctatattggcttttatagataattttcaggcagctaaacaagccttggctgaggcaactgttcaggcagctggaatggctgctactggtgtaaaagaactcgcacaaaggagttccagaatggcactggatattaacatcaaagccccagttgtggtcatcccgcagtctccagtttctgaaaatgtttttgttgctgattttggactaattacaatgacaaatacctttcatatgataacagagagccagagctctcccccacctgttattgatttgataacaataaagctgagtgaaatgcgactatacagatctcgatttattaatgatgcataccaggaagtactggatctactcctgccattaaatcttgaggttgtggttgaacgaaatttatgctgggagtggtaccaggaagttccttgttttaatgtaaatgctcagctgaaaccaatggagttcattcttagtcaagaagatataacaactatttttaaaacattgcatggcaatatatggtatgaaaaagatggtagtgcctcacctgctgtaacaaaagaccaatacagtgccactagtggagttactactaatgcttcacaccattcaggaggagcaactgtggtgacagctgctgtggtagaagtacattcacgtgccttactagttaagacaacactaaacataagcttcaaaactgatgatctcaccatggtgctgtatagtccaggtcctaaacaggcttcctttacagatgttcgtgatccttctctgaaacttgctgaatttaaattggagaatattataagtactttaaaaatgtatacagatggctcaacattttcttccttctcattaaaaaactgtattttagatgataaaagacctcatgtcaagaaagcaactcctcgaatgataggactgacagttggttttgacaaaaaagacatgatggatataaagtacaggaaagtcagagatggttgtgtgactgatgcggtctttcaagaaatgtatatttgtgcaagcgtagaatttctgcagactgttgcaaatgtctttcttgaggcctacaccacaggcactgctgtagaaaccagtgtgcaaacatggactgctaaggaagaagtacctacacaggaatcagtgaagtgggaaattaatgttattattaaaaatcctgaaattgtgtttgtagctgacatgacaaaaaatgatgctcctgctttagtcattacaacacaatgtgaaatttgctataaaggtaaccttgaaaatagtacaatgactgctgccattaaagatctccaagtgagagcctgcccgtttcttccagtcaagagaaaaggcaaaatcactactgttttgcagccctgtgacttgttttatcaaactactcagaaaggtacagatccacaagtgatcgatatgtcagtaaaatccctgacactaaaggtttcaccagttattataaatactatgattaccataacttcagcactgtatacaactaaggaaaccatcccagaagaaacggcttcttctactgcacatttatgggaaaagaaggatacaaagactttaaaaatgtggtttcttgaagaatcaaatgaaactgaaaaaatagctcccacaactgaattggtacccaaaggcgagatgataaaaatgaacattgattctatttttatagttcttgaggctggaattggtcatagaacagtacctatgcttctggcaaagtcacgtttttcaggggaaggcaaaaactggagttccctaataaatctgcactgtcagcttgagctagaagtgcattattataatgaaatgtttggtgtatgggagcctttgcttgaacccttagaaattgatcagactgaggattttagaccatggaatcttggtatcaagatgaaaaagaaagcaaaaatggccattgttgagtcagatcctgaagaagaaaactacaaagtgccagaatataaaactgtcatcagtttccattcaaaagaccaattaaacattacattatccaaatgtggtcttgtaatgttaaacaatttagtcaaggcatttacagaagctgccactggatcttcagctgacttcgtaaaggatctagcaccatttatgattttaaattcccttggacttactatttctgtttcgccaagtgattcttttagtgtactcaacattcctatggcaaaatcatatgtattgaaaaatggagaaagtttaagtatggattatatccgaaccaaggacaatgatcatttcaatgcaatgaccagcctaagcagcaaactcttcttcattcttcttacacctgttaaccattctactgctgataagattcctttaacaaaagtgggacgacgtctgtacactgtaagacacagagagtctggcgttgaaagatctattgtttgtcaaattgatacagtagaaggaagtaagaaggtcacaattcgctccccagtgcagataagaaatcatttttcagtcccactgtctgtttacgaaggggataccttattgggaactgcctcacctgaaaatgaattcaacataccattaggatcttaccgatcattcatttttctgaagccagaagatgagaactatcaaatgtgtgaaggaattgactttgaagagattataaaaaatgatggtgctcttctaaagaagaaatgtagatctaaaaacccttctaaggaatcatttctcattaatattgttccagaaaaagataatttaacatctctatcagtgtattcagaagatggttgggatttaccatacataatgcatttgtggccacctatcctgctccgaaatcttcttccttacaaaattgcttattatatagagggaattgaaaattcggtttttactctaagtgaaggacattcagcccagatttgtactgcacagttgggtaaagccaggctacatttaaaattacttgactatctcaatcacgattggaaaagtgaatatcacataaagcctaatcagcaagacattagttttgtcagttttacttgtgttacagaaatggaaaagactgatttagatattgctgtccatatgacttacaatactggtcagacagttgtggcatttcatagtccttattggatggtcaataaaactggccgcatgttacagtacaaagcagacggaattcatcgaaagcatccacctaattataaaaagccagttctcttttcttttcagccaaatcacttttttaataacaataaggttcaacttatggtaactgatagtgagttgtccaatcagttttcaattgatactgttggtagtcatggagctgttaaatgtaaaggcctgaaaatggactatcaagttggtgtcactatagacctgagcagttttaacattactagaattgtgacatttacccctttttatatgattaaaaacaaaagcaaataccatatatcagtggctgaagaaggaaatgataaatggctctctcttgatttggagcagtgtatccccttttggcctgagtatgcttctagtaaacttcttattcaagtcgaaaggagtgaagatcctcccaaaaggatatattttaacaagcaggaaaattgtattctattgcgtctagataacgagcttggaggtattatagcagaagtgaatttggccgagcattctacagttattacatttttagattatcatgatggagcagctacattcctcttaataaatcacacaaagaatgaacttgttcaatacaatcaaagttctctcagtgaaatagaagattccctccctcctggtaaagccgtgttttatacatgggctgatccggtgggctctagaaggctgaagtggagatgtagaaaaagccatggtgaagtaacacagaaggatgatatgatgatgcctatagatttgggggaaaagacaatatatttagtttcattctttgaaggtttacaacgcattattttattcactgaagatccaagggtatttaaagtaacatatgaaagtgagaaagcagagttagcagagcaagaaattgcagtggcattacaagatgttggaatttctcttgtcaacaattacacgaagcaagaagtagcctatataggcattacaagttctgatgtggtttgggaaacaaagcccaagaagaaggcaagatggaagccaatgagtgtaaagcacactgagaagttagagagagaatttaaggaatatactgaatcttctccttcagaagataaggttattcagttggacactaatgttccggttcgcctaacccctactggtcataacatgaaaattctgcagccgcatgtaatagctctacgaagaaattatcttccagcattaaaagtggaatataacacatctgcacatcaatcatcatttagaattcagatttacagaatacagatccaaaatcagatacatggtgctgtatttccctttgtgttttatcctgttaaacctccaaagtcggtcaccatggattcagcaccaaagccctttacagatgtcagtattgtcatgagatctgcaggacattcccagatatcacgtattaagtatttcaaagtattgattcaagaaatggatctcaggttagatcttgggtttatctatgctttaacagaccttatgacagaagctgaggtgactgaaaatacagaggttgagctttttcataaagatatagaagctttcaaagaagaatataaaacagcctcattagtagatcaatcacaagtcagcctctatgaatattttcatatatctcctatcaagttacatttaagtgtttcactgagttccggcagagaagaagctaaagattcaaaacaaaatggaggactgattccagttcattctttaaatcttttgctgaagagtattggtgccacactgacagatgtacaagatgtagtttttaagcttgcattttttgaactcaactatcagttccatacaacatccgatctacagtctgaagtcataagacactattcaaaacaggccattaagcagatgtatgtactcattcttggacttgatgttttgggaaatccatttggcttaattagagaattttctgaaggtgtagaagcatttttttatgaaccttaccagggagccatccagggtcctgaagagtttgtggaaggaatggcactaggacttaaggcactagttggtggagctgttggtggattggctggtgctgcctccaaaatcaccggtgctatggctaagggggtagcagctatgaccatggatgaagactaccaacagaagagaagagaagccatgaataagcaaccagctggttttagagaaggcatcactcgtggaggaaaaggcttagtttctggatttgttagtggcataacaggaattgttacaaaaccaatcaaaggagctcaaaaaggaggagcagctggtttctttaaaggtgttgggaaaggtttagtaggagcggtagcaaggccaactggaggcatcatagacatggctagcagtacatttcagggaataaaaagagctacagagacttctgaagtggagagtctgcgacctcctcggttcttcaatgaagatggagttatcagaccgtacaggttgagggatgggactggaaatcaaatgttacagaaaattcaattctacagggagtggattatgactcacagtagcagtagtgatgatgatgatgatgatgatgatgatgatgagtcagatctaaaccattaaaattcatatgttctttattttacttggaatgtttcattaacatgttttgtatgacttataccataatgcccatatgtccatttatagggaggtaaaacacattttcttttaaaatgttttcctacacattttcataaagcaaaataattgtattatttaagcacagaaaaaaatgtatcttacatccaaagtagggagggcatccaacatattatagatttgcttttatatattttatagctttgtattgcatagtttgtctttaagagttcaagttagacttaaatataattttgatgttcactggttttattttaaattgccttcttatttgttagcaaaatgcctttttttaatggtctctgtaaattttctgggctttaatgtaatgccactgtgtaaaaaaaaaggaagaaaatagtaatagccatttaatgttttatatttatcattttaaagatatttttgtcaaatttcttttaataataataaacatatgtaatctaaa

SEQ ID NO: 4393 - DNA, 15320 bp, Homo sapiens
  source 1..15320: mol_type = genomic DNA
ttcctccctctcagggctgcgcgcccaggtctgcgccgcgctccgcctccagccgcgcgcagacttgcgcacgcgtcgtgagagcgaccgcctccgtctctcgctgggctcgctagggctgcgcgttgggccagcgggggcgccgcagctgaagccgccccggagccggtgaaccgaattacctcgagggaggggcgtggggaaggcggcgggaggaggagcgcacgggccggctgccgtgcccaccacggctgaggaacatggttttcgagtcggtggtcgtggacgtgttgaaccggttcttgggggactatgtggtggacttggacacgtcccagctctctctgggcatctggaaaggagctgtggccctcaagaatcttcaaattaaagaaaatgccctgagtcaactggatgtaccatttaaagttaaagttggtcacataggtaatcttaaacttataattccatggaaaaacctttatactcaacctgttgaagccgtattggaagaaatttatttacttatagtgccttcttctagaataaaatatgatcctttaaaagaagagaaacaactcatggaagcaaagcaacaggaactgaaaagaatagaagaagcaaaacaaaaagtagttgatcaagaacaacatctgccggaaaaacaggacacttttgcagaaaaattagttacacagatcataaaaaatcttcaggtgaaaatttccagtatccatattcgttatgaagatgatatcacaaatcgggacaaaccgctgtcatttggtatttcccttcaaaatctgagcatgcagacaactgatcaatactgggttccatgtttacatgatgaaactgagaaactggttcgtaagttaatccgattggataacctgtttgcctattggaatgtgaagtctcagatgttttatcttagtgattatgataactccttggacgacttgaagaatggcattgtcaatgaaaatattgttccagaaggttatgattttgtatttcgtcccatatctgctaatgccaaacttgtgatgaatcgccgatctgattttgacttttctgcccccaaaataaacttggaaattgagttacataacatagcaattgaatttaataaaccacagtatttcagtattatggagcttcttgaatcagttgatatgatggcacaaaatctgccatataggaagttcaaacctgatgtgcctcttcaccaccatgccagagaatggtgggcttatgctatacatggcgttcttgaagtaaatgtttgccccaggttatggatgtggtcatggaagcatattagaaaacataggcaaaaagtgaagcaatataaagaactgtataaaaaaaagttaacaagtaagaagccacctggtgaacttctcgtgtctttggaggagttggaaaaaaccttggatgtctttaatataactatagctagacagacggcagaagttgaggtaaagaaagctggatacaaaatttacaaagaaggagtaaaagatccagaggataataaagggtggtttagctggctatggtcttggtcagaacaaaatactaatgaacagcaaccagatgttcaacctgaaactcttgaagaaatgttgacacctgaagaaaaagctttactctatgaagcaattggctatagtgaaacagcagttgatccaactttactaaaaacatttgaagccttgaagttttttgtccacttgaaaagtatgtctattgttctaagagaaaatcatcaaaaacctgagctggtagatattgtaatagaagaatttagcaccttaattgtgcaaagaccaggagcacaagcaataaaatttgaaactaaaatagattcatttcatattactggcttaccagataattcagaaaaaccccgcctcctgtcttcattggatgatgcaatgtcacttttccaaattacatttgagataaatccattagatgaaactgtttctcagaggtgtatcatagaagctgaacctttagaaatcatatatgatgcaaggacagtgaatagtatagtggaattcttcagacctccaaaagaggtacatctagcacagctcactgcagcaactttgacaaaactggaagaatttcgcagtaagacagcaacaggtctactgtatattattgaaacacagaaagttcttgatctcaaaattaatttgaaggcttcatatattattgtcccacaagatggaatttttagtcctacatcaaatctgcttcttttggaccttggtcatctaaaggtgacgagtaaaagtcgttctgaattaccagatgtgaaacaaggtgaggccaatcttaaagagataatggatagagcttatgattcatttgatattcaacttacaagtgtacagctgctttacagtagagttggtgataattggagagaagcacgaaaactcagtgtatctacccagcatattttggtacccatgcacttcaatttggaactgtctaaggccatggttttcatggatgtaaggatgcccaaattcaagatttatggaaagttacctcttatttctttacgaatctcagataaaaaactacaagggattatggaattgattgaaagcattccaaaacctgaaccagtaactgaagtatctgcccctgtcaaatcattccagattcaaacatctacttctttgggaacatcacagatttcacagaaaataattcctctcttggaacttccatctgtttctgaagatgattcagaggaggaattttttgatgcaccatgtagtcccttggaagaacctcttcagtttccaactggagttaaaagtattcgaaccagaaagttacaaaagcaggattgttcagtaaatatgactacatttaaaataagatttgaagtaccaaaggttttgatcgagttttatcaccttgttggagattgtgaactatctgtggtagaaattcttgttttaggattgggtgcagaaattgagattagaacatacgatttgaaagcaaatgcctttttgaaagagttctgcttaaaatgcccagaatacttggatgaaaacaagaaaccagtttatttggttacaaccctggataacacaatggaagacctgttaacgctggaatatgtaaaggctgaaaagaatgtacccgacttgaaaagtacctataacaatgttttacaattgattaaggtaaatttttcctctttggatattcatttacacactgaagcacttctgaatacaataaattatcttcataatatccttccgcaatcagaggaaaaatcagccccagtgtccactacagagactgaagacaaaggagatgtcattaaaaaattagctttaaaactatccacaaatgaagatatcattactttgcagattttagcagaattatcgtgtttacagatctttattcaagatcagaaatgtaacatttctgaaattaagattgaagggcttgattctgagatgattatgaggccttcagaaactgaaataaacgcaaagctaaggaatataattgttttagattctgatataacagctatatacaaaaaggctgtttatatcactggaaaagaagttttcagcttcaaaatggtttcttacatggatgcaactgctggttctgcatacacagatatgaatgtggttgacattcaggttaatttaatagttggttgcattgaagtagtttttgtcacgaaatttctatattctatattggcttttatagataattttcaggcagctaaacaagccttggctgaggcaactgttcaggcagctggaatggctgctactggtgtaaaagaactcgcacaaaggagttccagaatggcactggatattaacatcaaagccccagttgtggtcatcccgcagtctccagtttctgaaaatgtttttgttgctgattttggactaattacaatgacaaatacctttcatatgataacagagagccagagctctcccccacctgttattgatttgataacaataaagctgagtgaaatgcgactatacagatctcgatttattaatgatgcataccaggaagtactggatctactcctgccattaaatcttgaggttgtggttgaacgaaatttatgctgggagtggtaccaggaagttccttgttttaatgtaaatgctcagctgaaaccaatggagttcattcttagtcaagaagatataacaactatttttaaaacattgcatggcaatatatggtatgaaaaagatggtagtgcctcacctgctgtaacaaaagaccaatacagtgccactagtggagttactactaatgcttcacaccattcaggaggagcaactgtggtgacagctgctgtggtagaagtacattcacgtgccttactagttaagacaacactaaacataagcttcaaaactgatgatctcaccatggtgctgtatagtccaggtcctaaacaggcttcctttacagatgttcgtgatccttctctgaaacttgctgaatttaaattggagaatattataagtactttaaaaatgtatacagatggctcaacattttcttccttctcattaaaaaactgtattttagatgataaaagacctcatgtcaagaaagcaactcctcgaatgataggactgacagttggttttgacaaaaaagacatgatggatataaagtacaggaaagtcagagatggttgtgtgactgatgcggtctttcaagaaatgtatatttgtgcaagcgtagaatttctgcagactgttgcaaatgtctttcttgaggcctacaccacaggcactgctgtagaaaccagtgtgcaaacatggactgctaaggaagaagtacctacacaggaatcagtgaagtgggaaattaatgttattattaaaaatcctgaaattgtgtttgtagctgacatgacaaaaaatgatgctcctgctttagtcattacaacacaatgtgaaatttgctataaaggtaaccttgaaaatagtacaatgactgctgccattaaagatctccaagtgagagcctgcccgtttcttccagtcaagagaaaaggcaaaatcactactgttttgcagccctgtgacttgttttatcaaactactcagaaaggtacagatccacaagtgatcgatatgtcagtaaaatccctgacactaaaggtttcaccagttattataaatactatgattaccataacttcagcactgtatacaactaaggaaaccatcccagaagaaacggcttcttctactgcacatttatgggaaaagaaggatacaaagactttaaaaatgtggtttcttgaagaatcaaatgaaactgaaaaaatagctcccacaactgaattggtacccaaaggcgagatgataaaaatgaacattgattctatttttatagttcttgaggctggaattggtcatagaacagtacctatgcttctggcaaagtcacgtttttcaggggaaggcaaaaactggagttccctaataaatctgcactgtcagcttgagctagaagtgcattattataatgaaatgtttggtgtatgggagcctttgcttgaacccttagaaattgatcagactgaggattttagaccatggaatcttggtatcaagatgaaaaagaaagcaaaaatggccattgttgagtcagatcctgaagaagaaaactacaaagtgccagaatataaaactgtcatcagtttccattcaaaagaccaattaaacattacattatccaaatgtggtcttgtaatgttaaacaatttagtcaaggcatttacagaagctgccactggatcttcagctgacttcgtaaaggatctagcaccatttatgattttaaattcccttggacttactatttctgtttcgccaagtgattcttttagtgtactcaacattcctatggcaaaatcatatgtattgaaaaatggagaaagtttaagtatggattatatccgaaccaaggacaatgatcatttcaatgcaatgaccagcctaagcagcaaactcttcttcattcttcttacacctgttaaccattctactgctgataagattcctttaacaaaagtgggacgacgtctgtacactgtaagacacagagagtctggcgttgaaagatctattgtttgtcaaattgatacagtagaaggaagtaagaaggtcacaattcgctccccagtgcagataagaaatcatttttcagtcccactgtctgtttacgaaggggataccttattgggaactgcctcacctgaaaatgaattcaacataccattaggatcttaccgatcattcatttttctgaagccagaagatgagaactatcaaatgtgtgaaggaattgactttgaagagattataaaaaatgatggtgctcttctaaagaagaaatgtagatctaaaaacccttctaaggaatcatttctcattaatattgttccagaaaaagataatttaacatctctatcagtgtattcagaagatggttgggatttaccatacataatgcatttgtggccacctatcctgctccgaaatcttcttccttacaaaattgcttattatatagagggaattgaaaattcggtttttactctaagtgaaggacattcagcccagatttgtactgcacagttgggtaaagccaggctacatttaaaattacttgactatctcaatcacgattggaaaagtgaatatcacataaagcctaatcagcaagacattagttttgtcagttttacttgtgttacagaaatggaaaagactgatttagatattgctgtccatatgacttacaatactggtcagacagttgtggcatttcatagtccttattggatggtcaataaaactggccgcatgttacagtacaaagcagacggaattcatcgaaagcatccacctaattataaaaagccagttctcttttcttttcagccaaatcacttttttaataacaataaggttcaacttatggtaactgatagtgagttgtccaatcagttttcaattgatactgttggtagtcatggagctgttaaatgtaaaggcctgaaaatggactatcaagttggtgtcactatagacctgagcagttttaacattactagaattgtgacatttacccctttttatatgattaaaaacaaaagcaaataccatatatcagtggctgaagaaggaaatgataaatggctctctcttgatttggagcagtgtatccccttttggcctgagtatgcttctagtaaacttcttattcaagtcgaaaggagtgaagatcctcccaaaaggatatattttaacaagcaggaaaattgtattctattgcgtctagataacgagcttggaggtattatagcagaagtgaatttggccgagcattctacagttattacatttttagattatcatgatggagcagctacattcctcttaataaatcacacaaagaatgaacttgttcaatacaatcaaagttctctcagtgaaatagaagattccctccctcctggtaaagccgtgttttatacatgggctgatccggtgggctctagaaggctgaagtggagatgtagaaaaagccatggtgaagtaacacagaaggatgatatgatgatgcctatagatttgggggaaaagacaatatatttagtttcattctttgaaggtttacaacgcattattttattcactgaagatccaagggtatttaaagtaacatatgaaagtgagaaagcagagttagcagagcaagaaattgcagtggcattacaagatgttggaatttctcttgtcaacaattacacgaagcaagaagtagcctatataggcattacaagttctgatgtggtttgggaaacaaagcccaagaagaaggcaagatggaagccaatgagtgtaaagcacactgagaagttagagagagaatttaaggaatatactgaatcttctccttcagaagataaggttattcagttggacactaatgttccggttcgcctaacccctactggtcataacatgaaaattctgcagccgcatgtaatagctctacgaagaaattatcttccagcattaaaagtggaatataacacatctgcacatcaatcatcatttagaattcagatttacagaatacagatccaaaatcagatacatggtgctgtatttccctttgtgttttatcctgttaaacctccaaagtcggtcaccatggattcagcaccaaagccctttacagatgtcagtattgtcatgagatctgcaggacattcccagatatcacgtattaagtatttcaaagtattgattcaagaaatggatctcaggttagatcttgggtttatctatgctttaacagaccttatgacagaagctgaggtgactgaaaatacagaggttgagctttttcataaagatatagaagctttcaaagaagaatataaaacagcctcattagtagatcaatcacaagtcagcctctatgaatattttcatatatctcctatcaagttacatttaagtgtttcactgagttccggcagagaagaagctaaagattcaaaacaaaatggaggactgattccagttcattctttaaatcttttgctgaagagtattggtgccacactgacagatgtacaagatgtagtttttaagcttgcattttttgaactcaactatcagttccatacaacatccgatctacagtctgaagtcataagacactattcaaaacaggccattaagcagatgtatgtactcattcttggacttgatgttttgggaaatccatttggcttaattagagaattttctgaaggtgtagaagcatttttttatgaaccttaccagggagccatccagggtcctgaagagtttgtggaaggaatggcactaggacttaaggcactagttggtggagctgttggtggattggctggtgctgcctccaaaatcaccggtgctatggctaagggggtagcagctatgaccatggatgaagactaccaacagaagagaagagaagccatgaataagcaaccagctggttttagagaaggcatcactcgtggaggaaaaggcttagtttctggatttgttagtggcataacaggaattgttacaaaaccaatcaaaggagctcaaaaaggaggagcagctggtttctttaaaggtgttgggaaaggtttagtaggagcggtagcaaggccaactggaggcatcatagacatggctagcagtacatttcagggaataaaaagagctacagagacttctgaagtggagagtctgcgacctcctcggttcttcaatgaagatggagttatcagaccgtacaggttgagggatgggactggaaatcaaatgttacaggtcatggaaaatggaagatttgcaaaatacaaatattttacccatgtcatgatcaataagacagatatgctaatgataaccagacgtggtgtattgtttgtaacaaagggaacatttggacaactcacgtgtgagtggcagtatagttttgatgaatttaccaaagagccattcattgttcatgggagaagattgcgcattgaagcaaaggaacgagtgaagtctgtatttcatgccagagagtttggaaaaataattaacttcaagaccccagaggatgccaggtggatcctcacaaagctacaagaagcaagagaaccttctccgagcctctgacagagaacactgcctgaagacacacagcaataagtgattacagctcctagactaccttccaaaacctgtttgggaagcatattacagaaatgatttcaagtaccctgtattctggatgctaaaaaacaaaaacaaacaaaaaaacaaaaacaaaaaaacaaaaccagaatcaggtaaaacagctatgtgattaaaatattttaattcttcagcaattacccggttttctaaattgaatcatgcatctatttataattctaattattttgtaaaagaagacaaaattatgaatcttaagtatttgctccatctttttctctgtaatggtggagaggctgcccataattcatctccacatggagccaagtttaatgtttctagttcacattttgtacttctgtcatgcttatttcaaactccctgagtgatgggtaagaaatcaaacattgcctcagtggtatcaagagaactttggtggtggtttcttcagaatcatgaagttcttttgccagataaatattttgatattattttcctttttaatataaaggataggtttgaattgtacttaaaatgcatagcattattaaaaacaatcttttaaaatataatttataacatagattgaagcctccccttaagaaaccttaaagaaataagtatcctactcaaaaaaggaagtctgtttcagaactttagggcctttgaaatatttcctcaagcctatttcatgagatctacttggtttacccaagtcatgtttttaatagactgctaatatcaaaggagaatttttaaagccttaacaatgcctactttccattcactgttaacatggaataaacacaattcccaacatcttagatagtgtattatgcttccaacagacagtccctctcatataaagtttatgtaccctaaaatctaacccaataacctgtcccgttgccaatagattgagaatttctggtttgcttactctacagttattcaaatgagagtcacgcttttaaatttacagctcatcacagaaatcatcagctatacattagtaaaaataaggacatgaggttttctttcttggtttttgtccaagatctttgcaccttaatattaatggactgtttcaggtaaaagagaatgaatgtatgattgtgaactgtgaagagaatgatgcaggatcctatttagttactgaataatacagagtattcaatgcatgttgtatgtgccaccaagttactattaactgtttttggaattgaagactctgtatagtcaatagttgtgaaattcttctcaggctccttaaaccctcgctttgttgtaaaagctaaaataaacagcatgctatattgtaattgtatttcttgctgaccaaatctactaaatgctattgatttctctctgattactaaaacacattgtttattctcagtagtttcccccaaaatgcttttttctttgctgaacttaaattgaatcaaaccacaagtttaaaatcacatgaaagtgtgtttccatgttgacctttgtttaaaaaaaaaaaaaagtgcttattttctctgtcgctaagctcctccagttttgcttttgtcagaattaaacttaacagtagaggtagtcagaaagcttgcatcagactgtcctcatccaaaacgaaatacttcattacccaatgttatgatttcaccattctcagaaaaattacagtcccctgcctccctgggtgtagtgtcgtgaagtagaaaagccttacataaatagtaaacatagaaattcttctggtgccctctggcagccagcaggagtgggtcttgtgactaatccacatggaaaggatagtgcctgtctttcctgttcccttgccataagaaccgtgaaatctctcctttccctgccactcgtttactcatcacctcctcccatcacttccttgtctctagactagagggacccacagttttaagagctacatcatatcatttgttgttttagaagattgtcttcatctaaacaaaaacactaagaaatcagtagatcactagataatgagtcagtgtttttagcatcacattttacaatttacagtttttgtttgattctgtagcccatttttcttgaaggttagaataagaatcttcttgtatttgaaaaccatctgccctaaattacatttaactacaagaaatggctctctgctggagaaatttaagcttgtcttagttgtttggtagtggctatggaatgagaggtgttgagtcttgtgccccttccatgtattatttgctaactaactatattactaggcccttaattccagcacagcatgtcttctggtctatgataattgtgtgaggactaaggcagagtgcctgttccctgccaactctccaccagaaaatcataatcagaaagagtgactttgatttctggtacttgtgatcaaaagcagcttgtgatttcttcacatttgcaaaatactctctgagccaaaaggcacatacagttctccagtgtcttcccttttagagtatacatatttgctgcttttcctttagtgttcacaaaaatcccaaggtcagtttagtgtggctgagttgttgttatctggaccctaaacaatcattaccacctgtagacagttcttacctacccctctcctccacaatcctagtccatttggaggcaactatcctgtggcctccaagtgaataaatctttcttacacttacttacgtgatattttctatcataattatctctctcatttcttccaatagtaatagcggtaatattgttccattgaatatctatgcacctagctcatctcttagaaacatcccacatagtagcatcgtattactctctggtaaaaagaaagattaaattaaaaggactctacacagtgctgaatttcctgcacctaaattattcagttatcacttgccagtattagttgatccttcaggctatgccaagtgccccctcatgtaggcctctgtattaaaaagattgggacaaaatacttgattagtttgcctgtagaagctcaaagtgtgtaccaaatacattgacagtggatgctttcatggctcagccaacacagttcagaggaatcttttcggcttccagggcattgcttgttaccttttgtcaggatcaacccaaatcctcagggatgctgtttttccacactgtaagtcctaactcattagtgggtcatgaaatcaacttaacagctcaagaccagtatattttaaacgtgaaataataaaaaatagaggaacaatagagcatataaaatggttaagtattggttcctgaaatactgtttcagctaaatattctatttactgtgtatactgggtcacaatataaagtgtttcctgttatgaaatgcaatttaaaaaaagaaagcttgaaagactgctgcaggaggcaccggccatccagtgattgttggaagagtctggattgtgtggagcctgaccttagataaggagcagcagatccacaactcaggaagtctagagatgcttagcacttcttcttttgagtgagaagatggaatcactcttggtttctaaaatatttttcttctctgctgtgtatcgggcaacctcacatgattcagtgggaccagaaaaagcatagaaaaattagatccacacacagcacccaaaaaaggccatagtcttttgtttacctagatgtattttaacctctttaccactaagcattttactataatagaactggggacatacattgtccttttgagtccgttgaatctgcaccatctaccttttggctgattcaccatacaggtggcaaaggcctttaaaaatggggagctaatacgtagggcacattctggtagggccaaaatattcagtgtctggggggtgctatgcaaatatcaatgactttttactaaaaacagtggatttcctcatttctttaagatccaagtagaaaatgtaaataacttacattctgtatgcaggactcaatacagacttagtcaatctgattttttttggtgcttttcagtatagcgcaactctaaaaggaaacccattcaccctccttagtcctttgaagtatacttttgaaattataccttattgttaatggcaacctaatcaagctaggatttgtcggttaaaattttgattcttgtaatctgtactgtcaatttttggccactctggctgttacagcaaacttttctcccactgtcataattggtctaaagtagtatttgtttcaggactatccaaaaagcaaggccagcacattgagaagatgcagaatcctactctattacaaacctcactcatgtttcttttattgaaacctttttctactttatatttcctcttttgtaaatttttccatgtcatttaaaaaattttttactttagaattacagattagttctttttttaaagcattatggcattttcaaaaaaaaaattattttggttacccaaaaagctatacaagaaatataacttcaattttttaggttgatatgggtatatttttaaagtttttattactttatacaaatacaaattaatttatattatagtttaacacctgctatgatgatagatatcacactgctatgatagaaaatccctgtctgtcattgaactattcatttagtgttactctgatatgttaataatgtattccttctaatgaagtccttgtaacaagaaaccctgtgagattggtataatgagatatcaaataatcagaagtataattaaaatagaacatgttggaaaatcccaacatttcctgttatgccgtcatacctccggtgttcagtttgttactcaaaagttcccagttcttaggctgaaaaacattcaagtaaaaatgtagcatagattacactgaaatattttcagtatcaatgatttaatatccacacaaactattaggaatggtatctggaacttgttacaaggtcagataaactgttacagaattttagaaataattatctctgtatgtgactgtgtattacatataaaaatgaatttttcaggaaaagtgcactttaaaaatactttctcttgctagttttttaaattgatgaaatagcctgtgctgctttggaatgcttattctttctttgatgaaaatacggtcattgattatgataattttaaaaatatctatttctgcatcgctgcaggatttcctacacttttctgttcctcatccctcttttatgtgtgcttggctcagttgcctgttacacagcctctgccttggttttgtgtattctaagataatttataaacacagatatttacagtgaagttcttccttttgaaactaatcttattcttttattcctctctctaaaaattggttggccatgctcactaatgattttttttcttaacaataagcatttcttggtattggtagatttggattgcatggtaagatgactgcccattttcaccatgtatacctttgtcaaataaagatttctgatctttggtc

SEQ ID NO: 4394 - DNA, 10269 bp, Homo sapiens
  source 1..10269: mol_type = genomic DNA
aggcgatggggaggaggcggggccgacaggaaagaggagccgggctcggcgcgaaaagggcaccctccagagccgcggccgcgcagccgcctttcctccctctcagggctgcgcgcccaggtctgcgccgcgctccgcctccagccgcgcgcagacttgcgcacgcgtcgtgagagcgaccgcctccgtctctcgctgggctcgctagggctgcgcgttgggccagcgggggcgccgcagctgaagccgccccggagccggtgaaccgaattacctcgagggaggggcgtggggaaggcggcgggaggaggagcgcacgggccggctgccgtgcccaccacggctgaggaacatggttttcgagtcggtggtcgtggacgtgttgaaccggttcttgggggactatgtggtggacttggacacgtcccagctctctctgggcatctggaaaggagctgtggccctcaagaatcttcaaattaaagaaaatgccctgagtcaactggatgtaccatttaaagttaaagttggtcacataggtaatcttaaacttataattccatggaaaaacctttatactcaacctgttgaagccgtattggaagaaatttatttacttatagtgccttcttctagaataaaatatgatcctttaaaagaagagaaacaactcatggaagcaaagcaacaggaactgaaaagaatagaagaagcaaaacaaaaagtagttgatcaagaacaacatctgccggaaaaacaggacacttttgcagaaaaattagttacacagatcataaaaaatcttcaggtgaaaatttccagtatccatattcgttatgaagatgatatcacaaatcgggacaaaccgctgtcatttggtatttcccttcaaaatctgagcatgcagacaactgatcaatactgggttccatgtttacatgatgaaactgagaaactggttcgtaagttaatccgattggataacctgtttgcctattggaatgtgaagtctcagatgttttatcttagtgattatgataactccttggacgacttgaagaatggcattgtcaatgaaaatattgttccagaaggttatgattttgtatttcgtcccatatctgctaatgccaaacttgtgatgaatcgccgatctgattttgacttttctgcccccaaaataaacttggaaattgagttacataacatagcaattgaatttaataaaccacagtatttcagtattatggagcttcttgaatcagttgatatgatggcacaaaatctgccatataggaagttcaaacctgatgtgcctcttcaccaccatgccagagaatggtgggcttatgctatacatggcgttcttgaagtaaatgtttgccccaggttatggatgtggtcatggaagcatattagaaaacataggcaaaaagtgaagcaatataaagaactgtataaaaaaaagttaacaagtaagaagccacctggtgaacttctcgtgtctttggaggagttggaaaaaaccttggatgtctttaatataactatagctagacagacggcagaagttgaggtaaagaaagctggatacaaaatttacaaagaaggagtaaaagatccagaggataataaagggtggtttagctggctatggtcttggtcagaacaaaatactaatgaacagcaaccagatgttcaacctgaaactcttgaagaaatgttgacacctgaagaaaaagctttactctatgaagcaattggctatagtgaaacagcagttgatccaactttactaaaaacatttgaagccttgaagttttttgtccacttgaaaagtatgtctattgttctaagagaaaatcatcaaaaacctgagctggtagatattgtaatagaagaatttagcaccttaattgtgcaaagaccaggagcacaagcaataaaatttgaaactaaaatagattcatttcatattactggcttaccagataattcagaaaaaccccgcctcctgtcttcattggatgatgcaatgtcacttttccaaattacatttgagataaatccattagatgaaactgtttctcagaggtgtatcatagaagctgaacctttagaaatcatatatgatgcaaggacagtgaatagtatagtggaattcttcagacctccaaaagaggtacatctagcacagctcactgcagcaactttgacaaaactggaagaatttcgcagtaagacagcaacaggtctactgtatattattgaaacacagaaagttcttgatctcaaaattaatttgaaggcttcatatattattgtcccacaagatggaatttttagtcctacatcaaatctgcttcttttggaccttggtcatctaaaggtgacgagtaaaagtcgttctgaattaccagatgtgaaacaaggtgaggccaatcttaaagagataatggatagagcttatgattcatttgatattcaacttacaagtgtacagctgctttacagtagagttggtgataattggagagaagcacgaaaactcagtgtatctacccagcatattttggtacccatgcacttcaatttggaactgtctaaggccatggttttcatggatgtaaggatgcccaaattcaagatttatggaaagttacctcttatttctttacgaatctcagataaaaaactacaagggattatggaattgattgaaagcattccaaaacctgaaccagtaactgaagtatctgcccctgtcaaatcattccagattcaaacatctacttctttgggaacatcacagatttcacagaaaataattcctctcttggaacttccatctgtttctgaagatgattcagaggaggaattttttgatgcaccatgtagtcccttggaagaacctcttcagtttccaactggagttaaaagtattcgaaccagaaagttacaaaagcaggattgttcagtaaatatgactacatttaaaataagatttgaagtaccaaaggttttgatcgagttttatcaccttgttggagattgtgaactatctgtggtagaaattcttgttttaggattgggtgcagaaattgagattagaacatacgatttgaaagcaaatgcctttttgaaagagttctgcttaaaatgcccagaatacttggatgaaaacaagaaaccagtttatttggttacaaccctggataacacaatggaagacctgttaacgctggaatatgtaaaggctgaaaagaatgtacccgacttgaaaagtacctataacaatgttttacaattgattaaggtaaatttttcctctttggatattcatttacacactgaagcacttctgaatacaataaattatcttcataatatccttccgcaatcagaggaaaaatcagccccagtgtccactacagagactgaagacaaaggagatgtcattaaaaaattagctttaaaactatccacaaatgaagatatcattactttgcagattttagcagaattatcgtgtttacagatctttattcaagatcagaaatgtaacatttctgaaattaagattgaagggcttgattctgagatgattatgaggccttcagaaactgaaataaacgcaaagctaaggaatataattgttttagattctgatataacagctatatacaaaaaggctgtttatatcactggaaaagaagttttcagcttcaaaatggtttcttacatggatgcaactgctggttctgcatacacagatatgaatgtggttgacattcaggttaatttaatagttggttgcattgaagtagtttttgtcacgaaatttctatattctatattggcttttatagataattttcaggcagctaaacaagccttggctgaggcaactgttcaggcagctggaatggctgctactggtgtaaaagaactcgcacaaaggagttccagaatggcactggatattaacatcaaagccccagttgtggtcatcccgcagtctccagtttctgaaaatgtttttgttgctgattttggactaattacaatgacaaatacctttcatatgataacagagagccagagctctcccccacctgttattgatttgataacaataaagctgagtgaaatgcgactatacagatctcgatttattaatgatgcataccaggaagtactggatctactcctgccattaaatcttgaggttgtggttgaacgaaatttatgctgggagtggtaccaggaagttccttgttttaatgtaaatgctcagctgaaaccaatggagttcattcttagtcaagaagatataacaactatttttaaaacattgcatggcaatatatggtatgaaaaagatggtagtgcctcacctgctgtaacaaaagaccaatacagtgccactagtggagttactactaatgcttcacaccattcaggaggagcaactgtggtgacagctgctgtggtagaagtacattcacgtgccttactagttaagacaacactaaacataagcttcaaaactgatgatctcaccatggtgctgtatagtccaggtcctaaacaggcttcctttacagatgttcgtgatccttctctgaaacttgctgaatttaaattggagaatattataagtactttaaaaatgtatacagatggctcaacattttcttccttctcattaaaaaactgtattttagatgataaaagacctcatgtcaagaaagcaactcctcgaatgataggactgacagttggttttgacaaaaaagacatgatggatataaagtacaggaaagtcagagatggttgtgtgactgatgcggtctttcaagaaatgtatatttgtgcaagcgtagaatttctgcagactgttgcaaatgtctttcttgaggcctacaccacaggcactgctgtagaaaccagtgtgcaaacatggactgctaaggaagaagtacctacacaggaatcagtgaagtgggaaattaatgttattattaaaaatcctgaaattgtgtttgtagctgacatgacaaaaaatgatgctcctgctttagtcattacaacacaatgtgaaatttgctataaaggtaaccttgaaaatagtacaatgactgctgccattaaagatctccaagtgagagcctgcccgtttcttccagtcaagagaaaaggcaaaatcactactgttttgcagccctgtgacttgttttatcaaactactcagaaaggtacagatccacaagtgatcgatatgtcagtaaaatccctgacactaaaggtttcaccagttattataaatactatgattaccataacttcagcactgtatacaactaaggaaaccatcccagaagaaacggcttcttctactgcacatttatgggaaaagaaggatacaaagactttaaaaatgtggtttcttgaagaatcaaatgaaactgaaaaaatagctcccacaactgaattggtacccaaaggcgagatgataaaaatgaacattgattctatttttatagttcttgaggctggaattggtcatagaacagtacctatgcttctggcaaagtcacgtttttcaggggaaggcaaaaactggagttccctaataaatctgcactgtcagcttgagctagaagtgcattattataatgaaatgtttggtgtatgggagcctttgcttgaacccttagaaattgatcagactgaggattttagaccatggaatcttggtatcaagatgaaaaagaaagcaaaaatggccattgttgagtcagatcctgaagaagaaaactacaaagtgccagaatataaaactgtcatcagtttccattcaaaagaccaattaaacattacattatccaaatgtggtcttgtaatgttaaacaatttagtcaaggcatttacagaagctgccactggatcttcagctgacttcgtaaaggatctagcaccatttatgattttaaattcccttggacttactatttctgtttcgccaagtgattcttttagtgtactcaacattcctatggcaaaatcatatgtattgaaaaatggagaaagtttaagtatggattatatccgaaccaaggacaatgatcatttcaatgcaatgaccagcctaagcagcaaactcttcttcattcttcttacacctgttaaccattctactgctgataagattcctttaacaaaagtgggacgacgtctgtacactgtaagacacagagagtctggcgttgaaagatctattgtttgtcaaattgatacagtagaaggaagtaagaaggtcacaattcgctccccagtgcagataagaaatcatttttcagtcccactgtctgtttacgaaggggataccttattgggaactgcctcacctgaaaatgaattcaacataccattaggatcttaccgatcattcatttttctgaagccagaagatgagaactatcaaatgtgtgaaggaattgactttgaagagattataaaaaatgatggtgctcttctaaagaagaaatgtagatctaaaaacccttctaaggaatcatttctcattaatattgttccagaaaaagataatttaacatctctatcagtgtattcagaagatggttgggatttaccatacataatgcatttgtggccacctatcctgctccgaaatcttcttccttacaaaattgcttattatatagagggaattgaaaattcggtttttactctaagtgaaggacattcagcccagatttgtactgcacagttgggtaaagccaggctacatttaaaattacttgactatctcaatcacgattggaaaagtgaatatcacataaagcctaatcagcaagacattagttttgtcagttttacttgtgttacagaaatggaaaagactgatttagatattgctgtccatatgacttacaatactggtcagacagttgtggcatttcatagtccttattggatggtcaataaaactggccgcatgttacagtacaaagcagacggaattcatcgaaagcatccacctaattataaaaagccagttctcttttcttttcagccaaatcacttttttaataacaataaggttcaacttatggtaactgatagtgagttgtccaatcagttttcaattgatactgttggtagtcatggagctgttaaatgtaaaggcctgaaaatggactatcaagttggtgtcactatagacctgagcagttttaacattactagaattgtgacatttacccctttttatatgattaaaaacaaaagcaaataccatatatcagtggctgaagaaggaaatgataaatggctctctcttgatttggagcagtgtatccccttttggcctgagtatgcttctagtaaacttcttattcaagtcgaaaggagtgaagatcctcccaaaaggatatattttaacaagcaggaaaattgtattctattgcgtctagataacgagcttggaggtattatagcagaagtgaatttggccgagcattctacagttattacatttttagattatcatgatggagcagctacattcctcttaataaatcacacaaagaatgaacttgttcaatacaatcaaagttctctcagtgaaatagaagattccctccctcctggtaaagccgtgttttatacatgggctgatccggtgggctctagaaggctgaagtggagatgtagaaaaagccatggtgaagtaacacagaaggatgatatgatgatgcctatagatttgggggaaaagacaatatatttagtttcattctttgaaggtttacaacgcattattttattcactgaagatccaagggtatttaaagtaacatatgaaagtgagaaagcagagttagcagagcaagaaattgcagtggcattacaagatgttggaatttctcttgtcaacaattacacgaagcaagaagtagcctatataggcattacaagttctgatgtggtttgggaaacaaagcccaagaagaaggcaagatggaagccaatgagtgtaaagcacactgagaagttagagagagaatttaaggaatatactgaatcttctccttcagaagataaggttattcagttggacactaatgttccggttcgcctaacccctactggtcataacatgaaaattctgcagccgcatgtaatagctctacgaagaaattatcttccagcattaaaagtggaatataacacatctgcacatcaatcatcatttagaattcagatttacagaatacagatccaaaatcagatacatggtgctgtatttccctttgtgttttatcctgttaaacctccaaagtcggtcaccatggattcagcaccaaagccctttacagatgtcagtattgtcatgagatctgcaggacattcccagatatcacgtattaagtatttcaaagtattgattcaagaaatggatctcaggttagatcttgggtttatctatgctttaacagaccttatgacagaagctgaggtgactgaaaatacagaggttgagctttttcataaagatatagaagctttcaaagaagaatataaaacagcctcattagtagatcaatcacaagtcagcctctatgaatattttcatatatctcctatcaagttacatttaagtgtttcactgagttccggcagagaagaagctaaagattcaaaacaaaatggaggactgattccagttcattctttaaatcttttgctgaagagtattggtgccacactgacagatgtacaagatgtagtttttaagcttgcattttttgaactcaactatcagttccatacaacatccgatctacagtctgaagtcataagacactattcaaaacaggccattaagcagatgtatgtactcattcttggacttgatgttttgggaaatccatttggcttaattagagaattttctgaaggtgtagaagcatttttttatgaaccttaccagggagccatccagggtcctgaagagtttgtggaaggaatggcactaggacttaaggcactagttggtggagctgttggtggattggctggtgctgcctccaaaatcaccggtgctatggctaagggggtagcagctatgaccatggatgaagactaccaacagaagagaagagaagccatgaataagcaaccagctggttttagagaaggcatcactcgtggaggaaaaggcttagtttctggatttgttagtggcataacaggaattgttacaaaaccaatcaaaggagctcaaaaaggaggagcagctggtttctttaaaggtgttgggaaaggtttagtaggagcggtagcaaggccaactggaggcatcatagacatggctagcagtacatttcagggaataaaaagagctacagagacttctgaagtggagagtctgcgacctcctcggttcttcaatgaagatggagttatcagaccgtacaggttgagggatgggactggaaatcaaatgttacaggcatcaaaaagtttgatatgaaaagttaatgcatgactttgcaagtgaaagccaacagtagattttagtcttaaaatttacaaactacgtacagctgtttcagtattttgaatacaaagaaaaccttttgtattggtaacttttaataggaattttaatgaatctggtttttttatagggtgttcttagttctgcactggatttgctagatttgttggaagcctttgtaccttatgtatcctcgtcattggtggtacttacttaaccaattaaaccatttctgttgtggggttattaaaccactggtagcttttataccagatatataatccttatatccaattacacatgaagaaggaaaagcaaaactcaggaacactgctattgtgaattactcttggattcttgtgctttgcctttgaaaatgcttaaatggccatgaccctcttcctgctttattctagtgtagtctttataaaacttgtgggatttgataagcagttcacatgcaaaccagtatcttttaataatacaaagtagcatctggaacaatagacagtttgaagttagaatctgcttagacaactttcttacttggtaaattcgactttttaaaacctggattatgctgtaggtaactagtaatcatatataggctataccagtgtcatgttgtttctgtggtttagaggtggaatactaaattaaatcatttgtttgaaaacaaa

SEQ ID NO: 4395 - DNA, 11145 bp, Homo sapiens
  source 1..11145: mol_type = genomic DNA
ttcctccctctcagggctgcgcgcccaggtctgcgccgcgctccgcctccagccgcgcgcagacttgcgcacgcgtcgtgagagcgaccgcctccgtctctcgctgggctcgctagggctgcgcgttgggccagcgggggcgccgcagctgaagccgccccggagccggtgaaccgaattacctcgagggaggggcgtggggaaggcggcgggaggaggagcgcacgggccggctgccgtgcccaccacggctgaggaacatggttttcgagtcggtggtcgtggacgtgttgaaccggttcttgggggactatgtggtggacttggacacgtcccagctctctctgggcatctggaaaggagctgtggccctcaagaatcttcaaattaaagaaaatgccctgagtcaactggatgtaccatttaaagttaaagttggtcacataggtaatcttaaacttataattccatggaaaaacctttatactcaacctgttgaagccgtattggaagaaatttatttacttatagtgccttcttctagaataaaatatgatcctttaaaagaagagaaacaactcatggaagcaaagcaacaggaactgaaaagaatagaagaagcaaaacaaaaagtagttgatcaagaacaacatctgccggaaaaacaggacacttttgcagaaaaattagttacacagatcataaaaaatcttcaggtgaaaatttccagtatccatattcgttatgaagatgatatcacaaatcgggacaaaccgctgtcatttggtatttcccttcaaaatctgagcatgcagacaactgatcaatactgggttccatgtttacatgatgaaactgagaaactggttcgtaagttaatccgattggataacctgtttgcctattggaatgtgaagtctcagatgttttatcttagtgattatgataactccttggacgacttgaagaatggcattgtcaatgaaaatattgttccagaaggttatgattttgtatttcgtcccatatctgctaatgccaaacttgtgatgaatcgccgatctgattttgacttttctgcccccaaaataaacttggaaattgagttacataacatagcaattgaatttaataaaccacagtatttcagtattatggagcttcttgaatcagttgatatgatggcacaaaatctgccatataggaagttcaaacctgatgtgcctcttcaccaccatgccagagaatggtgggcttatgctatacatggcgttcttgaagtaaatgtttgccccaggttatggatgtggtcatggaagcatattagaaaacataggcaaaaagtgaagcaatataaagaactgtataaaaaaaagttaacaagtaagaagccacctggtgaacttctcgtgtctttggaggagttggaaaaaaccttggatgtctttaatataactatagctagacagacggcagaagttgaggtaaagaaagctggatacaaaatttacaaagaaggagtaaaagatccagaggataataaagggtggtttagctggctatggtcttggtcagaacaaaatactaatgaacagcaaccagatgttcaacctgaaactcttgaagaaatgttgacacctgaagaaaaagctttactctatgaagcaattggctatagtgaaacagcagttgatccaactttactaaaaacatttgaagccttgaagttttttgtccacttgaaaagtatgtctattgttctaagagaaaatcatcaaaaacctgagctggtagatattgtaatagaagaatttagcaccttaattgtgcaaagaccaggagcacaagcaataaaatttgaaactaaaatagattcatttcatattactggcttaccagataattcagaaaaaccccgcctcctgtcttcattggatgatgcaatgtcacttttccaaattacatttgagataaatccattagatgaaactgtttctcagaggtgtatcatagaagctgaacctttagaaatcatatatgatgcaaggacagtgaatagtatagtggaattcttcagacctccaaaagaggtacatctagcacagctcactgcagcaactttgacaaaactggaagaatttcgcagtaagacagcaacaggtctactgtatattattgaaacacagaaagttcttgatctcaaaattaatttgaaggcttcatatattattgtcccacaagatggaatttttagtcctacatcaaatctgcttcttttggaccttggtcatctaaaggtgacgagtaaaagtcgttctgaattaccagatgtgaaacaaggtgaggccaatcttaaagagataatggatagagcttatgattcatttgatattcaacttacaagtgtacagctgctttacagtagagttggtgataattggagagaagcacgaaaactcagtgtatctacccagcatattttggtacccatgcacttcaatttggaactgtctaaggccatggttttcatggatgtaaggatgcccaaattcaagatttatggaaagttacctcttatttctttacgaatctcagataaaaaactacaagggattatggaattgattgaaagcattccaaaacctgaaccagtaactgaagtatctgcccctgtcaaatcattccagattcaaacatctacttctttgggaacatcacagatttcacagaaaataattcctctcttggaacttccatctgtttctgaagatgattcagaggaggaattttttgatgcaccatgtagtcccttggaagaacctcttcagtttccaactggagttaaaagtattcgaaccagaaagttacaaaagcaggattgttcagtaaatatgactacatttaaaataagatttgaagtaccaaaggttttgatcgagttttatcaccttgttggagattgtgaactatctgtggtagaaattcttgttttaggattgggtgcagaaattgagattagaacatacgatttgaaagcaaatgcctttttgaaagagttctgcttaaaatgcccagaatacttggatgaaaacaagaaaccagtttatttggttacaaccctggataacacaatggaagacctgttaacgctggaatatgtaaaggctgaaaagaatgtacccgacttgaaaagtacctataacaatgttttacaattgattaaggtaaatttttcctctttggatattcatttacacactgaagcacttctgaatacaataaattatcttcataatatccttccgcaatcagaggaaaaatcagccccagtgtccactacagagactgaagacaaaggagatgtcattaaaaaattagggcttgattctgagatgattatgaggccttcagaaactgaaataaacgcaaagctaaggaatataattgttttagattctgatataacagctatatacaaaaaggctgtttatatcactggaaaagaagttttcagcttcaaaatggtttcttacatggatgcaactgctggttctgcatacacagatatgaatgtggttgacattcaggttaatttaatagttggttgcattgaagtagtttttgtcacgaaatttctatattctatattggcttttatagataattttcaggcagctaaacaagccttggctgaggcaactgttcaggcagctggaatggctgctactggtgtaaaagaactcgcacaaaggagttccagaatggcactggatattaacatcaaagccccagttgtggtcatcccgcagtctccagtttctgaaaatgtttttgttgctgattttggactaattacaatgacaaatacctttcatatgataacagagagccagagctctcccccacctgttattgatttgataacaataaagctgagtgaaatgcgactatacagatctcgatttattaatgatgcataccaggaagtactggatctactcctgccattaaatcttgaggttgtggttgaacgaaatttatgctgggagtggtaccaggaagttccttgttttaatgtaaatgctcagctgaaaccaatggagttcattcttagtcaagaagatataacaactatttttaaaacattgcatggcaatatatggtatgaaaaagatggtagtgcctcacctgctgtaacaaaagaccaatacagtgccactagtggagttactactaatgcttcacaccattcaggaggagcaactgtggtgacagctgctgtggtagaagtacattcacgtgccttactagttaagacaacactaaacataagcttcaaaactgatgatctcaccatggtgctgtatagtccaggtcctaaacaggcttcctttacagatgttcgtgatccttctctgaaacttgctgaatttaaattggagaatattataagtactttaaaaatgtatacagatggctcaacattttcttccttctcattaaaaaactgtattttagatgataaaagacctcatgtcaagaaagcaactcctcgaatgataggactgacagttggttttgacaaaaaagacatgatggatataaagtacaggaaagtcagagatggttgtgtgactgatgcggtctttcaagaaatgtatatttgtgcaagcgtagaatttctgcagactgttgcaaatgtctttcttgaggcctacaccacaggcactgctgtagaaaccagtgtgcaaacatggactgctaaggaagaagtacctacacaggaatcagtgaagtgggaaattaatgttattattaaaaatcctgaaattgtgtttgtagctgacatgacaaaaaatgatgctcctgctttagtcattacaacacaatgtgaaatttgctataaaggtaaccttgaaaatagtacaatgactgctgccattaaagatctccaagtgagagcctgcccgtttcttccagtcaagagaaaaggcaaaatcactactgttttgcagccctgtgacttgttttatcaaactactcagaaaggtacagatccacaagtgatcgatatgtcagtaaaatccctgacactaaaggtttcaccagttattataaatactatgattaccataacttcagcactgtatacaactaaggaaaccatcccagaagaaacggcttcttctactgcacatttatgggaaaagaaggatacaaagactttaaaaatgtggtttcttgaagaatcaaatgaaactgaaaaaatagctcccacaactgaattggtacccaaaggcgagatgataaaaatgaacattgattctatttttatagttcttgaggctggaattggtcatagaacagtacctatgcttctggcaaagtcacgtttttcaggggaaggcaaaaactggagttccctaataaatctgcactgtcagcttgagctagaagtgcattattataatgaaatgtttggtgtatgggagcctttgcttgaacccttagaaattgatcagactgaggattttagaccatggaatcttggtatcaagatgaaaaagaaagcaaaaatggccattgttgagtcagatcctgaagaagaaaactacaaagtgccagaatataaaactgtcatcagtttccattcaaaagaccaattaaacattacattatccaaatgtggtcttgtaatgttaaacaatttagtcaaggcatttacagaagctgccactggatcttcagctgacttcgtaaaggatctagcaccatttatgattttaaattcccttggacttactatttctgtttcgccaagtgattcttttagtgtactcaacattcctatggcaaaatcatatgtattgaaaaatggagaaagtttaagtatggattatatccgaaccaaggacaatgatcatttcaatgcaatgaccagcctaagcagcaaactcttcttcattcttcttacacctgttaaccattctactgctgataagattcctttaacaaaagtgggacgacgtctgtacactgtaagacacagagagtctggcgttgaaagatctattgtttgtcaaattgatacagtagaaggaagtaagaaggtcacaattcgctccccagtgcagataagaaatcatttttcagtcccactgtctgtttacgaaggggataccttattgggaactgcctcacctgaaaatgaattcaacataccattaggatcttaccgatcattcatttttctgaagccagaagatgagaactatcaaatgtgtgaaggaattgactttgaagagattataaaaaatgatggtgctcttctaaagaagaaatgtagatctaaaaacccttctaaggaatcatttctcattaatattgttccagaaaaagataatttaacatctctatcagtgtattcagaagatggttgggatttaccatacataatgcatttgtggccacctatcctgctccgaaatcttcttccttacaaaattgcttattatatagagggaattgaaaattcggtttttactctaagtgaaggacattcagcccagatttgtactgcacagttgggtaaagccaggctacatttaaaattacttgactatctcaatcacgattggaaaagtgaatatcacataaagcctaatcagcaagacattagttttgtcagttttacttgtgttacagaaatggaaaagactgatttagatattgctgtccatatgacttacaatactggtcagacagttgtggcatttcatagtccttattggatggtcaataaaactggccgcatgttacagtacaaagcagacggaattcatcgaaagcatccacctaattataaaaagccagttctcttttcttttcagccaaatcacttttttaataacaataaggttcaacttatggtaactgatagtgagttgtccaatcagttttcaattgatactgttggtagtcatggagctgttaaatgtaaaggcctgaaaatggactatcaagttggtgtcactatagacctgagcagttttaacattactagaattgtgacatttacccctttttatatgattaaaaacaaaagcaaataccatatatcagtggctgaagaaggaaatgataaatggctctctcttgatttggagcagtgtatccccttttggcctgagtatgcttctagtaaacttcttattcaagtcgaaaggagtgaagatcctcccaaaaggatatattttaacaagcaggaaaattgtattctattgcgtctagataacgagcttggaggtattatagcagaagtgaatttggccgagcattctacagttattacatttttagattatcatgatggagcagctacattcctcttaataaatcacacaaagaatgaacttgttcaatacaatcaaagttctctcagtgaaatagaagattccctccctcctggtaaagccgtgttttatacatgggctgatccggtgggctctagaaggctgaagtggagatgtagaaaaagccatggtgaagtaacacagaaggatgatatgatgatgcctatagatttgggggaaaagacaatatatttagtttcattctttgaaggtttacaacgcattattttattcactgaagatccaagggtatttaaagtaacatatgaaagtgagaaagcagagttagcagagcaagaaattgcagtggcattacaagatgttggaatttctcttgtcaacaattacacgaagcaagaagtagcctatataggcattacaagttctgatgtggtttgggaaacaaagcccaagaagaaggcaagatggaagccaatgagtgtaaagcacactgagaagttagagagagaatttaaggaatatactgaatcttctccttcagaagataaggttattcagttggacactaatgttccggttcgcctaacccctactggtcataacatgaaaattctgcagccgcatgtaatagctctacgaagaaattatcttccagcattaaaagtggaatataacacatctgcacatcaatcatcatttagaattcagatttacagaatacagatccaaaatcagatacatggtgctgtatttccctttgtgttttatcctgttaaacctccaaagtcggtcaccatggattcagcaccaaagccctttacagatgtcagtattgtcatgagatctgcaggacattcccagatatcacgtattaagtatttcaaagtattgattcaagaaatggatctcaggttagatcttgggtttatctatgctttaacagaccttatgacagaagctgaggtgactgaaaatacagaggttgagctttttcataaagatatagaagctttcaaagaagaatataaaacagcctcattagtagatcaatcacaagtcagcctctatgaatattttcatatatctcctatcaagttacatttaagtgtttcactgagttccggcagagaagaagctaaagattcaaaacaaaatggaggactgattccagttcattctttaaatcttttgctgaagagtattggtgccacactgacagatgtacaagatgtagtttttaagcttgcattttttgaactcaactatcagttccatacaacatccgatctacagtctgaagtcataagacactattcaaaacaggccattaagcagatgtatgtactcattcttggacttgatgttttgggaaatccatttggcttaattagagaattttctgaaggtgtagaagcatttttttatgaaccttaccagggagccatccagggtcctgaagagtttgtggaaggaatggcactaggacttaaggcactagttggtggagctgttggtggattggctggtgctgcctccaaaatcaccggtgctatggctaagggggtagcagctatgaccatggatgaagactaccaacagaagagaagagaagccatgaataagcaaccagctggttttagagaaggcatcactcgtggaggaaaaggcttagtttctggatttgttagtggcataacaggaattgttacaaaaccaatcaaaggagctcaaaaaggaggagcagctggtttctttaaaggtgttgggaaaggtttagtaggagcggtagcaaggccaactggaggcatcatagacatggctagcagtacatttcagggaataaaaagagctacagagacttctgaagtggagagtctgcgacctcctcggttcttcaatgaagatggagttatcagaccgtacaggttgagggatgggactggaaatcaaatgttacaggtcatggaaaatggaagatttgcaaaatacaaatattttacccatgtcatgatcaataagacagatatgctaatgataaccagacgtggtgtattgtttgtaacaaagggaacatttggacaactcacgtgtgagtggcagtatagttttgatgaatttaccaaagagccattcattgttcatgggagaagattgcgcattgaagcaaaggaacgagtgaagtctgtatttcatgccagagagtttggaaaaataattaacttcaagaccccagaggatgccaggtggatcctcacaaagctacaagaagcaagagaaccttctccgagcctctgacagagaacactgcctgaagacacacagcaataagtgattacagctcctagactaccttccaaaacctgtttgggaagcatattacagaaatgatttcaagtaccctgtattctggatgctaaaaaacaaaaacaaacaaaaaaacaaaaacaaaaaaacaaaaccagaatcaggtaaaacagctatgtgattaaaatattttaattcttcagcaattacccggttttctaaattgaatcatgcatctatttataattctaattattttgtaaaagaagacaaaattatgaatcttaagtatttgctccatctttttctctgtaatggtggagaggctgcccataattcatctccacatggagccaagtttaatgtttctagttcacattttgtacttctgtcatgcttatttcaaactccctgagtgatgggtaagaaatcaaacattgcctcagtggtatcaagagaactttggtggtggtttcttcagaatcatgaagttcttttgccagataaatattttgatattattttcctttttaatataaaggataggtttgaattgtacttaaaatgcatagcattattaaaaacaatcttttaaaatataatttataacatagattgaagcctccccttaagaaaccttaaagaaataagtatcctactcaaaaaaggaagtctgtttcagaactttagggcctttgaaatatttcctcaagcctatttcatgagatctacttggtttacccaagtcatgtttttaatagactgctaatatcaaaggagaatttttaaagccttaacaatgcctactttccattcactgttaacatggaataaacacaattcccaacatcttagatagtgtattatgcttccaacagacagtccctctcatataaagtttatgtaccctaaaatctaacccaataacctgtcccgttgccaatagattgagaatttctggtttgcttactctacagttattcaaatgagagtcacgcttttaaatttacagctcatcacagaaatcatcagctatacattagtaaaaataaggacatgaggttttctttcttggtttttgtccaagatctttgcaccttaatattaatggactgtttcaggtaaaagagaatgaatgtatgattgtgaactgtgaagagaatgatgcaggatcctatttagttactgaataatacagagtattcaatgcatgttgtatgtgccaccaagttactattaactgtttttggaattgaagactctgtatagtcaatagttgtgaaattcttctcaggctccttaaaccctcgctttgttgtaaaagctaaaataaacagcatgctatattgtaattgtatttcttgctgaccaaatctactaaatgctattgatttctctctgattactaaaacacattgtttattctcagtagtttcccccaaaatgcttttttctttgctgaacttaa

SEQ ID NO: 4396 - DNA, 1393 bp, Homo sapiens
  source 1..1393: mol_type = genomic DNA
ccctgagctgtcccgagctaggtgacagcgtaccacgctgccaccatgaatgaggtgtctgtcatcaaagaaggctggctccacaagcgtggtgaatacatcaagacctggaggccacggtacttcctgctgaagagcgacggctccttcattgggtacaaggagaggcccgaggcccctgatcagactctaccccccttaaacaacttctccgtagcagaatgccagctgatgaagaccgagaggccgcgacccaacacctttgtcatacgctgcctgcagtggaccacagtcatcgagaggaccttccacgtggattctccagacgagagggaggagtggatgcgggccatccagatggtcgccaacagcctcaagcagcgggccccaggcgaggaccccatggactacaagtgtggctcccccagtgactcctccacgactgaggagatggaagtggcggtcagcaaggcacgggctaaagtgaccatgaatgacttcgactatctcaaactccttggcaagggaacctttggcaaagtcatcctggtgcgggagaaggccactggccgctactacgccatgaagatcctgcggaaggaagtcatcattgccaaggatgaagtcgctcacacagtcaccgagagccgggtcctccagaacaccaggcacccgttcctcactgcgctgaagtatgccttccagacccacgaccgcctgtgctttgtgatggagtatgccaacgggggtgagctgttcttccacctgtcccgggagcgtgtcttcacagaggagcgggcccggttttatggtgcagagattgtctcggctcttgagtacttgcactcgcgggacgtggtataccgcgacatcaaggtgctggaggacaatgactatggccgggccgtggactggtgggggctgggtgtggtcatgtacgagatgatgtgcggccgcctgcccttctacaaccaggaccacgagcgcctcttcgagctcatcctcatggaagagatccgcttcccgcgcacgctcagccccgaggccaagtccctgcttgctgggctgcttaagaaggaccccaagcagaggcttggtggggggcccagcgatgccaaggaggtcatggagcacaggttcttcctcagcatcaactggcaggacgtggtccagaagaagctcctgccacccttcaaacctcaggtcacgtccgaggtcgacacaaggtacttcgatgatgaatttaccgcccagtccatcacaatcacaccccctgaccgctatgacagcctgggcttactggagctggaccagcggacccacttcccccagttctcctactcggccagcatccgcgagtgagcagtctgcccacgcagaggacgcacgctcg

SEQ ID NO: 4397 - DNA, 1873 bp, Homo sapiens
  source 1..1873: mol_type = genomic DNA
cggtaagcgggggctggggggagggggcggggggggccgcgccgtgctagccgttgggcctgcctcggaggaggcgtcgccgccgccgctgccgctgccggcgccgttgccgctgccgggaaacacaaggaaagggaaccagcgcagcgtggcgatgggcgggggtagagccccgccggagaggctgggcggctgccggtgacagactgtgccctgtccacggtgcctcctgcatgtcctgctgccctgagctgtcccgagctaggtgacagcgtaccacgctgccaccatgaatgaggtgtctgtcatcaaagaaggctggctccacaagcgtggtaaaatacatcaagacctggaggccacggtacttcctgctgaagagcgacggctccttcattgggtacaaggagaggcccgaggcccctgatcagactctaccccccttaaacaacttctccgtagcagaatgccagctgatgaagaccgagaggccgcgacccaacacctttgtcatacgctgcctgcagtggaccacagtcatcgagaggaccttccacgtggattctccagacgagagggaggagtggatgcgggccatccagatggtcgccaacagcctccagcctcacctttgtgcccagactcgcatttggaagactccacctcccgcccaggcctgggctgttgggcggttggagattcaggttttaatccacacaagccccagtgaggggtgaagcatggcgcctggggcctgcctgagtttctggcctgggtgtcgtgctggtgtctgcctccgcgctgctgcatctggacgaaggctgccttctggtgggacgcgacacccggcagacagtggtgctgccttccaggccccgtggcctaggctcggagtggccaggcacggggcggtccaatcccccacccgctgtccccctatgggggcagaaaagcaataatgtccaggggcaggcaggggcccttgggagctgcagggctgggggttagggctgctccctggtgaatggagtcagatcctaggatctgtaccatggggaaccaggagtggccgggctgggtgccgcctcctggtccggcctcctccccaccaaactgtcctcaccctatggatgaggcaggaggaacatttggggccaaacctgcctgcctcccagccccgtgccttactagggcttccttccagctggccttacctcccgctggaccctgggcctggcctggccccactgggggctatgggctgggctcaccctctcctctgcgggggtggagggccaccagccttggctgttacaatcttacaccggacagtattgggcccctccctctccccagggccccacgttctgcagccttaaggttgaacatgagtgcacgtccatgtcagtgctgtgggactcctgtgcgtgcctcggactgcgtgtgtcggcgggacgcaggcacacgtgggtgtgtgtgcatgtgtgtttgtgtgagggcagcgtgtcctccagtgtgcatggtgtgtgggcttgggccccatccctggcccgagcatttcatcctgtgggggaggggtgctgacctagtgggaggagccccactgtgatccatgagctgccctgcccacgcctcccctccctgtagcaacacctctgggtgtttggagtttagcttttgtgggtttgctctccctatcccatctcctgtactacacagttcatggcagggtggggaggggtggggttggttcgggtgggtgagggtctttttcctctgtgtgcgatgttgttatctgacagttctccgtccctactggcctttctcctcgtcttcatatttgtacggtacaagcaataaagacactcatttc

SEQ ID NO: 4398 - DNA, 3213 bp, Homo sapiens
  source 1..3213: mol_type = genomic DNA
attcaaggctcagggtggtggctcattttcaaggggctgtgaaaagagagggtcactcctttttgatcatttccctgctgcctggcttcaaatggccctcaggccaggtcactttagggaaattggtgatcgctcttggtattccactttttttttttttttgagacggagtctcgcactgtcaccaggctggagtgcagtggtgcgatctctgctcactgcaccctccgcctcccgggttcaagcaattctcctgcctcagcctcctgagtagctgggattaggcgaatgccacccctgactaatttttgtatttttagtagagacggggtttcaccatgttggccaggctggtctcgaactcctgaccttgtgatccatccgcctcagcctcccaaagtgctgggattataggcatgagccactgcgcctggcgtggaatttcactcaggtcccttcagctctctctggttctgacagatcttgcccaaattcccatggttatgtggtcatttgcttgcctgttgctgggggtggctgggaggtggcactcagctgttcgactctgaggcccaggactcctggctgctgggactcacgtgtgtccctgcacagggaggagtggatgcgggccatccagatggtcgccaacagcctcaagcagcgggccccaggcgaggaccccatggactacaagtgtggctcccccagtgactcctccacgactgaggagatggaagtggcggtcagcaaggcacgggctaaagtgaccatgaatgacttcgactatctcaaactccttggcaagggaacctttggcaaagtcatcctggtgcgggagaaggccactggccgctactacgccatgaagatcctgcggaaggaagtcatcattgccaaggatgaagtcgctcacacagtcaccgagagccgggtcctccagaacaccaggcacccgttcctcactgcgctgaagtatgccttccagacccacgaccgcctgtgctttgtgatggagtatgccaacgggggtgagctgttcttccacctgtcccgggagcgtgtcttcacagaggagcgggcccggttttatggtgcagagattgtctcggctcttgagtacttgcactcgcgggacgtggtataccgcgacatcaagctggaaaacctcatgctggacaaagatggccacatcaagatcactgactttggcctctgcaaagagggcatcagtgacggggccaccatgaaaaccttctgtgggaccccggagtacctggcgcctgaggtgctggaggacaatgactatggccgggccgtggactggtgggggctgggtgtggtcatgtacgagatgatgtgcggccgcctgcccttctacaaccaggaccacgagcgcctcttcgagctcatcctcatggaagagatccgcttcccgcgcacgctcagccccgaggccaagtccctgcttgctgggctgcttaagaaggaccccaagcagaggcttggtggggggcccagcgatgccaaggaggtcatggagcacaggttcttcctcagcatcaactggcaggacgtggtccagaagaagctcctgccacccttcaaacctcaggtcacgtccgaggtcgacacaaggtacttcgatgatgaatttaccgcccagtccatcacaatcacaccccctgaccgctatgacagcctgggcttactggagctggaccagcggacccacttcccccagttctcctactcggccagcatccgcgagtgagcagtctgcccacgcagaggacgcacgctcgctgccatcaccgctgggtggttttttccccctaactttttacttagcctttttggtttgtgtccccacccccacctcctcaccccctttccagttcttcttcaggcccctcccagacgcaccccagcggcccctgcagcccctgcctccagcctccagcctcacctttgtgcccagactcgcatttggaagactccacctcccgcccaggcctgggctgttgggcggttggagattcaggttttaatccacacaagccccagtgaggggtgaagcatggcgcctggggcctgcctgagtttctggcctgggtgtcgtgctggtgtctgcctccgcgctgctgcatctggacgaaggctgccttctggtgggacgcgacacccggcagacagtggtgctgccttccaggccccgtggcctaggctcggagtggccaggcacggggcggtccaatcccccacccgctgtccccctatgggggcagaaaagcaataatgtccaggggcaggcaggggcccttgggagctgcagggctgggggttagggctgctccctggtgaatggagtcagatcctaggatctgtaccatggggaaccaggagtggccgggctgggtgccgcctcctggtccggcctcctccccaccaaactgtcctcaccctatggatgaggcaggaggaacatttggggccaaacctgcctgcctcccagccccgtgccttactagggcttccttccagctggccttacctcccgctggaccctgggcctggcctggccccactgggggctatgggctgggctcaccctctcctctgcgggggtggagggccaccagccttggctgttacaatcttacaccggacagtattgggcccctccctctccccagggccccacgttctgcagccttaaggttgaacatgagtgcacgtccatgtcagtgctgtgggactcctgtgcgtgcctcggactgcgtgtgtcggcgggacgcaggcacacgtgggtgtgtgtgcatgtgtgtttgtgtgagggcagcgtgtcctccagtgtgcatggtgtgtgggcttgggccccatccctggcccgagcatttcatcctgtgggggaggggtgctgacctagtgggaggagccccactgtgatccatgagctgccctgcccacgcctcccctccctgtagcaacacctctgggtgtttggagtttagcttttgtgggtttgctctccctatcccatctcctgtactacacagttcatggcagggtggggaggggtggggttggttcgggtgggtgagggtctttttcctctgtgtgcgatgttgttatctgacagttctccgtccctactggcctttctcctcgtcttcatatttgtacggtacaagcaataaagacactcatttc

SEQ ID NO: 4399 - DNA, 681 bp, Homo sapiens
  source 1..681: mol_type = genomic DNA
ttggggtcgctggggacattgccacatctctctgctcagaatgggtccttgagagcgggctccacgccacccttgctggccttaccctttgctgagtgggcagaacagccagagggcctcagagcccggcgtcctcagggaaggggctggtgtggaatcccctcccgccctgaccagctcctctcttgtcttgcagactgtgccctgtccacggtgcctcctgcatgtcctgctgccctgagctgtcccgagctaggtgacagcgtaccacgctgccaccatgaatgaggtgtctgtcatcaaagaaggctggctccacaagcgtggtgaatacatcaagacctggaggccacggtacttcctgctgaagagcgacggctccttcattgggtacaaggagaggcccgaggcccctgatcagactctaccccccttaaacaacttctccgtagcagaatgccagctgatgaagaccgagaggccgcgacccaacacctttgtcatacgctgcctgcagtggaccacagtcatcgagaggaccttccacgtggattctccagacgagagggaggagtggatgcgggccatccagatggtcgccaacagcctcaagcagcgggccccaggcgaggaccccatggactacaagtgtggctcccccagtgactcctccacgactga

SEQ ID NO: 4400 - DNA, 5300 bp, Homo sapiens
  source 1..5300: mol_type = genomic DNA
tgggagggggcggtaagcgggggctggggggagggggcggggggggccgcgccgtgctagccgttgggcctgcctcggaggaggcgtcgccgccgccgctgccgctgccggcgccgttgccgctgccgggaaacacaaggaaagggaaccagcgcagcgtggcgatgggcgggggtagagccccgccggagaggctgggcggctgccggtgacagactgtgccctgtccacggtgcctcctgcatgtcctgctgccctgagctgtcccgagctaggtgacagcgtaccacgctgccaccatgaatgaggtgtctgtcatcaaagaaggctggctccacaagcgtggtgaatacatcaagacctggaggccacggtacttcctgctgaagagcgacggctccttcattgggtacaaggagaggcccgaggcccctgatcagactctaccccccttaaacaacttctccgtagcagaatgccagctgatgaagaccgagaggccgcgacccaacacctttgtcatacgctgcctgcagtggaccacagtcatcgagaggaccttccacgtggattctccagacgagagggaggagtggatgcgggccatccagatggtcgccaacagcctcaagcagcgggccccaggcgaggaccccatggactacaagtgtggctcccccagtgactcctccacgactgaggagatggaagtggcggtcagcaaggcacgggctaaagtgaccatgaatgacttcgactatctcaaactccttggcaagggaacctttggcaaagtcatcctggtgcgggagaaggccactggccgctactacgccatgaagatcctgcggaaggaagtcatcattgccaaggatgaagtcgctcacacagtcaccgagagccgggtcctccagaacaccaggcacccgttcctcactgcgctgaagtatgccttccagacccacgaccgcctgtgctttgtgatggagtatgccaacgggggtgagctgttcttccacctgtcccgggagcgtgtcttcacagaggagcgggcccggttttatggtgcagagattgtctcggctcttgagtacttgcactcgcgggacgtggtataccgcgacatcaagctggaaaacctcatgctggacaaagatggccacatcaagatcactgactttggcctctgcaaagagggcatcagtgacggggccaccatgaaaaccttctgtgggaccccggagtacctggcgcctgaggtgctggaggacaatgactatggccgggccgtggactggtgggggctgggtgtggtcatgtacgagatgatgtgcggccgcctgcccttctacaaccaggaccacgagcgcctcttcgagctcatcctcatggaagagatccgcttcccgcgcacgctcagccccgaggccaagtccctgcttgctgggctgcttaagaaggaccccaagcagaggcttggtggggggcccagcgatgccaaggaggtcatggagcacaggttcttcctcagcatcaactggcaggacgtggtccagaagaagctcctgccacccttcaaacctcaggtcacgtccgaggtcgacacaaggtacttcgatgatgaatttaccgcccagtccatcacaatcacaccccctgaccgctatgacagcctgggcttactggagctggaccagcggacccacttcccccagttctcctactcggccagcatccgcgagtgagcagtctgcccacgcagaggacgcacgctcgctgccatcaccgctgggtggttttttccccctaactttttacttagcctttttggtttgtgtccccacccccacctcctcaccccctttccagttcttcttcaggcccctcccagacgcaccccagcggcccctgcagcccctgcctccagcctccagcctcacctttgtgcccagactcgcatttggaagactccacctcccgcccaggcctgggctgttgggcggttggagattcaggttttaatccacacaagccccagtgaggggtgaagcatggcgcctggggcctgcctgagtttctggcctgggtgtcgtgctggtgtctgcctccgcgctgctgcatctggacgaaggctgccttctggtgggacgcgacacccggcagacagtggtgctgccttccaggccccgtggcctaggctcggagtggccaggcacggggcggtccaatcccccacccgctgtccccctatgggggcagaaaagcaataatgtccaggggcaggcaggggcccttgggagctgcagggctgggggttagggctgctccctggtgaatggagtcagatcctaggatctgtaccatggggaaccaggagtggccgggctgggtgccgcctcctggtccggcctcctccccaccaaactgtcctcaccctatggatgaggcaggaggaacatttggggccaaacctgcctgcctcccagccccgtgccttactagggcttccttccagctggccttacctcccgctggaccctgggcctggcctggccccactgggggctatgggctgggctcaccctctcctctgcgggggtggagggccaccagccttggctgttacaatcttacaccggacagtattgggccccatggacttggtcagggaggggtgggggtgggcatctctggtacctattggggtggggggcctctgaaaagggaggctcctaggcccccctcacccctccctctccccagggccccacgttctgcagccttaaggttgaacatgagtgcacgtccatgtcagtgctgtgggactcctgtgcgtgcctcggactgcgtgtgtcggcgggacgcaggcacacgtgggtgtgtgtgcatgtgtgtttgtgtgagggcagcgtgtcctccagtgtgcatggtgtgtgggcttgggccccatccctggcccgagcatttcatcctgtgggggaggggtgctgacctagtgggaggagccccactgtgatccatgagctgccctgcccacgcctcccctccctgtagcaacacctctgggtgtttggagtttagcttttgtgggtttgctctccctatcccatctcctgtactacacagttcatggcagggtggggaggggtggggttggttcgggtgggtgagggtctttttcctctgtgtgcgatgttgttatctgacagttctccgtccctactggcctttctcctcgtcttcatatttgtacggtacaagcaataaagacactcatttcagaccagggcccagcctgcactcacgccagcccaaccactctgggctttgccttggtgatggagtcagacccctgggccccagctcctcctgtactagccgttcccttcagcaaggagggcactgagctcagggtgagggcagctggggtgtgtgcaggagctcaggctggagagggtgggtggagctggtgctgtggggctgaggggtatgggaaggctccccgcatgtgggggtggggtggacagagaccactccaggccctcagtgctgcttaggctaagagaggtggggtggagggacagggctggaagatctgggtagcccagaatgaggagggtgcctgtgctgtcactgaatgagagggagtggttcattccacccggctgccgagcctcagaggggggcattcctatcctgccccacctccctgtttatgctgccacctggaagccttgaggcccccaaattccagtacagacccagtggtgtgttcatggtggcgtggttgctgtcacctgggagctcctgagcgtttggttagaaccctgttcagcttggggtcagccctcccctagtcactgccctttagcctggatgtgtctgggcccctgcacttcccgtgcttgagtcacgtggctgcatggccgggcgctggccggatggaacacctcccccagcaagggaccagggaccagagccctggcctgccctgctgagccctgctgtgcagagggcctggcacagatgaatttgagattttgccgcaaggtgttagcacttcacacccattgagtctttgagattttaagtgaatgtaagcagaaaaagtcagatccaatttacagaaatcagagttagctacagctaggactcgtttggttggggttttttagtttgtctttctaaagtcatgtggaccttaatttaattacaaaagtctaccctggtggtcataaaataggcaggcctatgaagaaaggccttttactcttccatctcatcccagccccgagttgacccacgttgctgctcctcacaccatggtgatgcaggtctcgtagtgtgggcacaggcctggctacctcatctttttagtgcctctctcctcttccacaggatggggtcccacagctgcagcagctggccccgtagttgagcatgtgtggttatcctgtagagcttttcccaagaagggtgtttgaacttagagtcttaataaaatcttaccaaataaattttgagtagaataatcgtcttttgcaatgtacattttaaaaatttcacacattcttttttgtatataaagaacagtgactgggcacagtggctcatgcctgtaatcccagcaatttgggaggccgaggcgggcgggtctcttgaggccaggggttcgagaccagcctgggcatcatagggagaccttcatctctacaaaaaatacaaaaattagctgggcatggtggtgcatgcctgcaatcccagctaacttggaaggctgaggtgaggtgggaagatcacttgagcccaggagtttgaggctgcagtgagctatgattgcggcactgcactgcagcctgggacaatgagactgtgtctctaaaaataaaaaaaaaaaaaacatgatacatgctattaaaaaagacagcaaagcaggagtataagaaaggaaattcacccgaggtcgcagggccttgagtactcattttggtgctgattacctctctgcaaatggacacggcatcataaattggtagtttcctgctctttttgtgtaatcttttccagttaatgtgaagcctctgggggctgccctcgtgcactgatggttgtgtggagtcgggggcggcagtgcgattcccttttagctgctgcatggggggaactcaggctttccagctgcttcctggggttccatggggtagacccctcaaccgcttcagctgccccgttaacaggaattgacttggtttcgtttggtgctaccagcagtcctgtaataaactagctatccatctgta

SEQ ID NO: 4401 - DNA, 974 bp, Homo sapiens
  source 1..974: mol_type = genomic DNA
aagtgctgggattacacgcgtgagccaccacgtccagcttcctgttgtctttgaatttatctcctgagcaagtcttcctccgggcgctgtggaaaggcacagatctgagtgcaggcgacagaggctcctgagggggtcgctgccacctccccaatgagcctccgcagcaccaggaaggagccccacccaccagctccagctccaagagacgcagatctctgcttccccacctgcctccctagcccatctgtgctgtctggcatcaaaatcagttttccacagtagttgaaccattttgcacctcccaccaataatgagtaagggttctggttcctctacatccgagccagcagttggccttgtcagtttttaaaattcgagccatcccagctgtgctgactccttagttgctgagatgagcttgtaaaaagcagctctgttgatcccagcagcggccagggcctccgctgcttctcggctgggagacccgagactgtgccctgtccacggtgcctcctgcatgtcctgctgccctgagctgtcccgagctaggtgacagcgtaccacgctgccaccatgaatgaggtgtctgtcatcaaagaaggctggctccacaagcgtggtgaatacatcaagacctggaggccacggtacttcctgctgaagagcgacggctccttcattgggtacaaggagaggcccgaggcccctgatcagactctaccccccttaaacaacttctccgtagcagaatgccagctgatgaagaccgagaggccgcgacccaacacctttgtcatacgctgcctgcagtggaccacagtcatcgagaggaccttccacgtggattctccagacgagagggaggagtggatgcgggccatccagatggtcgccaacagcctcaagcagcgggccccaggcgaggaccccatggactacaagtgtggctcccccagtgactcctccacgac

SEQ ID NO: 4402 - DNA, 592 bp, Homo sapiens
  source 1..592: mol_type = genomic DNA
gtgggaggggcgctgggtgggagctcagcctggcccccttggggcaggacccactgccaactcggcacccacagcagggcccaggtgctctgactgtgccgagcgagggacagcaagccgggtcggccaagaggagactgcatgtcagaggtcccagcaggagtttcttcagcccagccgtcctgctggagaagctcgttcgcagatgttgtttctaaggactgtgccctgtccacggtgcctcctgcatgtcctgctgccctgagctgtcccgagctaggtgacagcgtaccacgctgccaccatgaatgaggtgtctgtcatcaaagaaggctggctccacaagcgtggtgaatacatcaagacctggaggccacggtacttcctgctgaagagcgacggctccttcattgggtacaaggagaggcccgaggcccctgatcagactctaccccccttaaacaacttctccgtagcagaatgccagctgatgaagaccgagaggccgcgacccaacacctttgtcatacgctgcctgcagtggaccacagtcatcgagaggaccttccacgtggattctccagacgagagg

SEQ ID NO: 4403 - DNA, 798 bp, Homo sapiens
  source 1..798: mol_type = genomic DNA
gtagagggctgtacctttttggcgctgtggaagccgttgctgtgctgtatttacagggagtccgaaattgaagttcagaggaagaattgccttccaccgcatcttatcagaccctatgggtgccagggtgtgtgctgggagaagaagacagcaagagagccatgcagggggtgacacagctaccagggacctgcgttagctagcagcaggacggtgaagtcggttctagctctgcgaccttggaccacactgttcactcccatacagtggtctcagaaggacgtccaccttgggctgttgtgaggattaaatgaattaatccacgagaagctcctagaatggtgcctggtactgtactgtgccctgtccacggtgcctcctgcatgtcctgctgccctgagctgtcccgagctaggtgacagcgtaccacgctgccaccatgaatgaggtgtctgtcatcaaagaaggctggctccacaagcgtggtgaatacatcaagacctggaggccacggtacttcctgctgaagagcgacggctccttcattgggtacaaggagaggcccgaggcccctgatcagactctaccccccttaaacaacttctccgtagcagaatgccagctgatgaagaccgagaggccgcgacccaacacctttgtcatacgctgcctgcagtggaccacagtcatcgagaggaccttccacgtggattctccagacgagagggaggagtggatgcgggccatccagatggtcgccaacagcctcaagcagcgggccccaggcgaggaccccat

SEQ ID NO: 4404 - DNA, 1497 bp, Homo sapiens
  source 1..1497: mol_type = genomic DNA
atgaatgaggtgtctgtcatcaaagaaggctggctccacaagcgtggtgaatacatcaagacctggaggccacggtacttcctgctgaagagcgacggctccttcattgggtacaaggagaggcccgaggcccctgatcagactctaccccccttaaacaacttctccgtagcagaatgccagctgatgaagaccgagaggccgcgacccaacacctttgtcatacgctgcctgcagtggaccacagtcatcgagaggaccttccacgtggattctccagacgagagggaggagtggatgcgggccatccagatggtcgccaacagcctcaagcagcgggccccaggcgaggaccccatggactacaagtgtggctcccccagtgactcctccacgactgaggagatggaagtggcggtcagcaaggcacgggctaaagtgaccatgaatgacttcgactatctcaaactccttggcaagggaacctttggcaaagtcatcctggtgcgggagaaggccactggccgctactacgccatgaagatcctgcggaaggaagtcatcattgccaaggatgaagtcgctcacacagtcaccgagagccgggtcctccagaacaccaggcacccgttcctcactgcgctgaagtatgccttccagacccacgaccgcctgtgctttgtgatggagtatgccaacgggggtgagctgttcttccacctgtcccgggagcgtgtcttcacagaggagcgggcccggttttatggtgcagagattgtctcggctcttgagtacttgcactcgcgggacgtggtataccgcgacatcaagctggaaaacctcatgctggacaaagatggccacatcaagatcactgactttggcctctgcaaagagggcatcagtgacggggccaccatgaaaaccttctgtgggaccccggagtacctggcgcctgaggtgctggaggacaatgactatggccgggccgtggactggtgggggctgggtgtggtcatgtacgagatgatgtgcggccgcctgcccttctacaaccaggaccacgagcgcctcttcgagctcatcctcatggaagagatccgcttcccgcgcacgctcagccccgaggccaagtccctgcttgctgggctgcttaagaaggaccccaagcagaggcttggtggggggcccagcgatgccaaggaggtcatggagcacaggttcttcctcagcatcaactggcaggacgtggtccagaagaagctcctgccacccttcaaacctcaggtcacgtccgaggtcgacacaaggtacttcgatgatgaatttaccgcccagtccatcacaatcacaccccctgaccgctatgacagcctgggcttactggagctggaccagcggacccacttcccccagttctcctactcggccagcatccgcgagtgagcagtctgcccacgcagaggacgcacgctcgctgccatcaccgctgggtgg

SEQ ID NO: 4405 - DNA, 554 bp, Homo sapiens
  source 1..554: mol_type = genomic DNA
aggtcgtgggataggcatatattgagctttgattttgactgcttaacagttttccacagtagttgaaccattttgcacctcccaccaataatgagtaagggttctggttcctctacatccgagccagcagttggccttgtcagtttttaaaattcgagccatcccagctgtgctgactccttagttgctgagatgagcttgtaaaaagcagctctgttgatcccagcagcggccagggcctccgctgcttctcggctgggagacccgagactgtgccctgtccacggtgcctcctgcatgtcctgctgccctgagctgtcccgagctaggtgacagcgtaccacgctgccaccatgaatgaggtgtctgtcatcaaagaaggctggctccacaagcgtggtgaatacatcaagacctggaggccacggtacttcctgctgaagagcgacggctccttcattgggtacaaggagaggcccgaggcccctgatcagactctaccccccttaaacaacttctccgtagcagaatgccagctgatgaagaccgagagg

SEQ ID NO: 4406 - DNA, 564 bp, Homo sapiens
  source 1..564: mol_type = genomic DNA
gatgcccatggtgtccctagagccagctgccacttctctgggcgccaccgtagctcccgacctgctgtccgcaaataaccccaggctgggaaaggcaaaggcgccttggtctctgtggaccctggccaggccccaggctccaggtaggggcccagctggcgctgcctcgcgccctcctcccctccgttctgggaacctgagacgaagcagtggcctcggcgtccctcagtctgttggttgctggtccctgaggacagaagtgaaggtcttggggtagggatcagggcctcggtcaagcccccaggactggcttctaggccccagaccgtgcatacgcaactgtgccctgtccacggtgcctcctgcatgtcctgctgccctgagctgtcccgagctaggtgacagcgtaccacgctgccaccatgaatgaggtgtctgtcatcaaagaaggctggctccacaagcgtggtgaatacatcaagacctggaggccacggtacttcctgctgaagagcgacggctccttcattgggtacaaggagaggcccgaggcccctgatcaga

SEQ ID NO: 4407 - DNA, 577 bp, Homo sapiens
  source 1..577: mol_type = genomic DNA
gctgcaagtttgcgggacggggagcgcaggccgcagcgtgcgcgggccgggggctggacctttcgggcgcggcgggcagatcgagcctggcactgtgccctgtccacggtgcctcctgcatgtcctgctgccctgagctgtcccgagctaggtgacagcgtaccacgctgccaccatgaatgaggtgtctgtcatcaaagaaggctggctccacaagcgtggtgaatacatcaagacctggaggccacggtacttcctgctgaagagcgacggctccttcattgggtacaaggagaggcccgaggcccctgatcagactctaccccccttaaacaacttctccgtagcagaatgccagctgatgaagaccgagaggccgcgacccaacacctttgtcatacgctgcctgcagtggaccacagtcatcgagaggaccttccacgtggattctccagacgagagggaggagtggatgcgggccatccagatggtcgccaacagcctcaagcagcgggccccaggcgaggaccccatggactacaagtgtggctcccccagtgactcctccacgactgag

SEQ ID NO: 4408 - DNA, 582 bp, Homo sapiens
  source 1..582: mol_type = genomic DNA
gcaagtttgcgggacggggagcgcaggccgcagcgtgcgcgggccgggggctggacctttcgggcgcggcgggcagatcgagcctggctggtctcagaaggacgtccaccttgggctgttgtgaggattaaatgaattaatccacgagaagctcctagaatggtgcctggtactgtactgtgccctgtccacggtgcctcctgcatgtcctgctgccctgagctgtcccgagctaggtgacagcgtaccacgctgccaccatgaatgaggtgtctgtcatcaaagaaggctggctccacaagcgtggtgaatacatcaagacctggaggccacggtacttcctgctgaagagcgacggctccttcattgggtacaaggagaggcccgaggcccctgatcagactctaccccccttaaacaacttctccgtagcagaatgccagctgatgaagaccgagaggccgcgacccaacacctttgtcatacgctgcctgcagtggaccacagtcatcgagaggaccttccacgtggattctccagacgagagggaggagtggatgcgggccatccagatggtcgcca

SEQ ID NO: 4409 - DNA, 1402 bp, Homo sapiens
  source 1..1402: mol_type = genomic DNA
gagtgtgggaggggcgctgggtgggagctcagcctggcccccttggggcaggacccactgccaactcggcacccacagcagggcccaggtgctctgactgtgccgagcgagggacagcaagccgggtcggccaagaggagactgcatgtcagaggtcccagcaggagtttcttcagcccagccgtcctgctggagaagctcgttcgcagatgttgtttctaaggactgtgccctgtccacggtgcctcctgcatgtcctgctgccctgagctgtcccgagctaggtgacagcgtaccacgctgccaccatgaatgaggtgtctgtcatcaaagaaggctggctccacaagcgtggtgaatacatcaagacctggaggccacggtacttcctgctgaagagcgacggctccttcattgggtacaaggagaggcccgaggcccctgatcagactctaccccccttaaacaacttctccgtagcagaatgccagctgatgaagaccgagaggccgcgacccaacacctttgtcatacgctgcctgcagtggaccacagtcatcgagaggaccttccacgtggattctccagacgagagggaggagtggatgcgggccatccagatggtcgccaacagcctcaagcagcgggccccaggcgaggaccccatggactacaagtgtggctcccccagtgactcctccacgactgaggagatggaagtggcggtcagcaaggcacgggctaaagtgaccatgaatgacttcgactatctcaaactccttggcaagggaacctttggcaaagtcatcctggtgcgggagaaggccactggccgctactacgccatgaagatcctgcggaaggaagtcatcattgccaaggatgaagtcgctcacacagtcaccgagagccgggtcctccagaacaccaggcacccgttcctcactgtgagttgccctccccttcccagacagtgtgaggccagcctttggacagagctcagagagagagccctaatcttctggtacaaagcacagtcttggggtaggccaggcgggcagggcaaggtgttgctgcgccctgccaagtcatccgaaccaagacatgtggtgggggtgagcaggctcggggagtgggagggtgacagcttcttcatagatggtggcttcatgtaagcatttgaactaactgaagatatcacattatttgctggctgctgtctctatgagttaggagcacttagcccagctggttgaagtggaaacattattttttttgtttttgttttcagatatgctcatagaagcagatgtgttagcattgtgttgtctgtcagcctggactgagtagatgcctgtttgggctgcagtctccatcaaggccagtggccaccagttaaatg

SEQ ID NO: 4410 - DNA, 3588 bp, Homo sapiens
  source 1..3588: mol_type = genomic DNA
gcagcagcagagaatccaaaccctaaagctgatatcacaaagtaccatttctccaagttgggggctcagaggggagtcatcatgagcgatgttaccattgtgaaagaaggttgggttcagaagaggggagaatatataaaaaactggaggccaagatacttccttttgaagacagatggctcattcataggatataaagagaaacctcaagatgtggatttaccttatcccctcaacaacttttcagtggcaaaatgccagttaatgaaaacagaacgaccaaagccaaacacatttataatcagatgtctccagtggactactgttatagagagaacatttcatgtagatactccagaggaaagggaagaatggacagaagctatccaggctgtagcagacagactgcagaggcaagaagaggagagaatgaattgtagtccaacttcacaaattgataatataggagaggaagagatggatgcctctacaacccatcataaaagaaagacaatgaatgattttgactatttgaaactactaggtaaaggcacttttgggaaagttattttggttcgagagaaggcaagtggaaaatactatgctatgaagattctgaagaaagaagtcattattgcaaaggatgaagtggcacacactctaactgaaagcagagtattaaagaacactagacatccctttttaacatccttgaaatattccttccagacaaaagaccgtttgtgttttgtgatggaatatgttaatgggggcgagctgtttttccatttgtcgagagagcgggtgttctctgaggaccgcacacgtttctatggtgcagaaattgtctctgccttggactatctacattccggaaagattgtgtaccgtgatctcaagttggagaatctaatgctggacaaagatggccacataaaaattacagattttggactttgcaaagaagggatcacagatgcagccaccatgaagacattctgtggcactccagaatatctggcaccagaggtgttagaagataatgactatggccgagcagtagactggtggggcctaggggttgtcatgtatgaaatgatgtgtgggaggttacctttctacaaccaggaccatgagaaactttttgaattaatattaatggaagacattaaatttcctcgaacactctcttcagatgcaaaatcattgctttcagggctcttgataaaggatccaaataaacgccttggtggaggaccagatgatgcaaaagaaattatgagacacagtttcttctctggagtaaactggcaagatgtatatgataaaaagcttgtacctccttttaaacctcaagtaacatctgagacagatactagatattttgatgaagaatttacagctcagactattacaataacaccacctgaaaaatatgatgaggatggtatggactgcatggacaatgagaggcggccgcatttccctcaattttcctactctgcaagtggacgagaataagtctctttcattctgctacttcactgtcatcttcaatttattactgaaaatgattcctggacatcaccagtcctagctcttacacatagcaggggcaccttccgacatcccagaccagccaagggtcctcacccctcgccacctttcaccctcatgaaaacacacatacacgcaaatacactccagtttttgtttttgcatgaaattgtatctcagtctaaggtctcatgctgttgctgctactgtcttactattatagcaactttaagaagtaattttccaacctttggaagtcatgagcccaccattgttcatttgtgcaccaattatcatcttttgatcttttagtttttccctcagtgaaggctaaatgagatacactgattctaggtacattttttaactttctagaagagaaaaactaactagactaagaagatttagtttataaattcagaacaagcaattgtggaagggtggtggcgtgcatatgtaaagcacatcagatccgtgcgtgaagtaggcatatatcactaagctgtggctggaattgattaggaagcatttggtagaaggactgaacaactgttgggatatatatatatatatataattttttttttttaaattcctggtggatactgtagaagaagcccatatcacatgtggatgtcgagacttcacgggcaatcatgagcaagtgaacactgttctaccaagaactgaaggcatatgcacagtcaaggtcacttaaagggtcttatgaaacaatttgagccagagagcatctttcccctgtgcttggaaaccttttttccttcttgacatttatcacctctgatggctgaagaatgtagacaggtataatgatactgcttttcaccaaaatttctacaccaaggtaaacaggtgtttgccttatttaattttttactttcagttctacgtgaattagctttttctcagatgttgaaactttgaatgtccttttatgattttgtttatattgcagtagtatttattttttagtgatgagaattgtatgtcatgttagcaaacgcagctccaacttatataaaatagacttactgcagttacttttgacccatgtgcaaggattgtacacgctgatgagaatcatgcactttttctcctctgttaaaaaaaatgataaggctctgaaatggaatatattggttagaatttggctttgggagaagagatgctgccatttaaccccttggtactgaaaatgagaaaatccccaactatgcatgccaaggggttaatgaaacaaatagctgttgacgtttgctcatttaagaatttgaaacgttatgatgacctggcaacaaaaagtaatgaagaaaattgagacctgagtgaagataagaaatgatctttacgtggcaaaatgaacacatcttgagtatttaggaaatgggcagtgaaggctaagaacctggtgtgtttcttgggatcatggtacatttatcactgaattaagccatcagggaaaaaacaacaaaaaaagagaacacctccagcttttctttttctgtatatactcatgtcccccagattccaacatttctcactgaaagggggcatgtatgcaaacctcatctttctccttcattaatgatgatcttcagattaaaccctttggtgctaggagctgacaatttccaaagcagcctgtgaagtcctaggggctgggggccactcttgcggcaagcagaaggccatcctactccgcggagtgatcatggaaatgtattttagttaaactctgacagctcccaaacggaagactacagcatgacgtagtattatgattgcattgtatgaaagagcaagtgactttctaagtaggatgaatcatattcatatgcagatgtcttagcctcttgacgctggaagtgtggatttatagctatgaaaccactgctggcagtgggtgggccactgggactgacgggggttaaagggcattttactaaggcagctaagacatattcagacatcaacgttatccttctttttcatatttctacctgagtgaag

SEQ ID NO: 4411 - DNA, 1688 bp, Homo sapiens
  source 1..1688: mol_type = genomic DNA
ccaaaccctaaagctgatatcacaaagtaccatttctccaagttgggggctcagaggggagtcatcatgagcgatgttaccattgtgaaagaaggttgggttcagaagaggggagaatatataaaaaactggaggccaagatacttccttttgaagacagatggctcattcataggatataaagagaaacctcaagatgtggatttaccttatcccctcaacaacttttcagtggcaaaatgccagttaatgaaaacagaacgaccaaagccaaacacatttataatcagatgtctccagtggactactgttatagagagaacatttcatgtagatactccagaggaaagggaagaatggacagaagctatccaggctgtagcagacagactgcagaggcaagaagaggagagaatgaattgtagtccaacttcacaaattgataatataggagaggaagagatggatgcctctacaacccatcataaaagaaagacaatgaatgattttgactatttgaaactactaggtaaaggcacttttgggaaagttattttggttcgagagaaggcaagtggaaaatactatgctatgaagattctgaagaaagaagtcattattgcaaaggatgaagtggcacacactctaactgaaagcagagtattaaagaacactagacatccctttttaacatccttgaaatattccttccagacaaaagaccgtttgtgttttgtgatggaatatgttaatgggggcgagctgtttttccatttgtcgagagagcgggtgttctctgaggaccgcacacgtttctatggtgcagaaattgtctctgccttggactatctacattccggaaagattgtgtaccgtgatctcaagttggagaatctaatgctggacaaagatggccacataaaaattacagattttggactttgcaaagaagggatcacagatgcagccaccatgaagacattctgtggcactccagaatatctggcaccagaggtgttagaagataatgactatggccgagcagtagactggtggggcctaggggttgtcatgtatgaaatgatgtgtgggaggttacctttctacaaccaggaccatgagaaactttttgaattaatattaatggaagacattaaatttcctcgaacactctcttcagatgcaaaatcattgctttcagggctcttgataaaggatccaaataaacgccttggtggaggaccagatgatgcaaaagaaattatgagacacagtttcttctctggagtaaactggcaagatgtatatgataaaaagcttgtacctccttttaaacctcaagtaacatctgagacagatactagatattttgatgaagaatttacagctcagactattacaataacaccacctgaaaaatgtcagcaatcagattgtggcatgctgggtaactggaaaaaataataaaaatcggcttcctacagccagcagcacagtcacccatggaactgttggctttggattaaatgtggaattgaacgactacccagaagtgttctggaaagaagcgagatgtgtggcctgcctcaccgtcctcacccatcaaaagcaccagcaggcacgttaactcgaattctcacaaggaaaaggccattaaagctcaaggtgcatttcaaactccaggctac

SEQ ID NO: 4412 - DNA, 5127 bp, Homo sapiens
  source 1..5127: mol_type = genomic DNA
ccctctcctccccccgcccccccccggctccatcctccgccgccgcccgagcagctgcggggccgccaccgccgccgccgccgttgcaggctgagtcatcactagagagtgggaagggcagcagcagcagagaatccaaaccctaaagctgatatcacaaagtaccatttctccaagttgggggctcagaggggagtcatcatgagcgatgttaccattgtgaaagaaggttgggttcagaagaggggagaatatataaaaaactggaggccaagatacttccttttgaagacagatggctcattcataggatataaagagaaacctcaagatgtggatttaccttatcccctcaacaacttttcagtggcaaaatgccagttaatgaaaacagaacgaccaaagccaaacacatttataatcagatgtctccagtggactactgttatagagagaacatttcatgtagatactccagaggaaagggaagaatggacagaagctatccaggctgtagcagacagactgcagaggcaagaagaggagagaatgaattgtagtccaacttcacaaattgataatataggagaggaagagatggatgcctctacaacccatcataaaagaaagacaatgaatgattttgactatttgaaactactaggtaaaggcacttttgggaaagttattttggttcgagagaaggcaagtggaaaatactatgctatgaagattctgaagaaagaagtcattattgcaaaggatgaagtggcacacactctaactgaaagcagagtattaaagaacactagacatccctttttaacatccttgaaatattccttccagacaaaagaccgtttgtgttttgtgatggaatatgttaatgggggcgagctgtttttccatttgtcgagagagcgggtgttctctgaggaccgcacacgtttctatggtgcagaaattgtctctgccttggactatctacattccggaaagattgtgtaccgtgatctcaagttggagaatctaatgctggacaaagatggccacataaaaattacagattttggactttgcaaagaagggatcacagatgcagccaccatgaagacattctgtggcactccagaatatctggcaccagaggtgttagaagataatgactatggccgagcagtagactggtggggcctaggggttgtcatgtatgaaatgatgtgtgggaggttacctttctacaaccaggaccatgagaaactttttgaattaatattaatggaagacattaaatttcctcgaacactctcttcagatgcaaaatcattgctttcagggctcttgataaaggatccaaataaacgccttggtggaggaccagatgatgcaaaagaaattatgagacacagtttcttctctggagtaaactggcaagatgtatatgataaaaagcttgtacctccttttaaacctcaagtaacatctgagacagatactagatattttgatgaagaatttacagctcagactattacaataacaccacctgaaaaatatgatgaggatggtatggactgcatggacaatgagaggcggccgcatttccctcaattttcctactctgcaagtggacgagaataagtctctttcattctgctacttcactgtcatcttcaatttattactgaaaatgattcctggacatcaccagtcctagctcttacacatagcaggggcaccttccgacatcccagaccagccaagggtcctcacccctcgccacctttcaccctcatgaaaacacacatacacgcaaatacactccagtttttgtttttgcatgaaattgtatctcagtctaaggtctcatgctgttgctgctactgtcttactattatagcaactttaagaagtaattttccaacctttggaagtcatgagcccaccattgttcatttgtgcaccaattatcatcttttgatcttttagtttttccctcagtgaaggctaaatgagatacactgattctaggtacattttttaactttctagaagagaaaaactaactagactaagaagatttagtttataaattcagaacaagcaattgtggaagggtggtggcgtgcatatgtaaagcacatcagatccgtgcgtgaagtaggcatatatcactaagctgtggctggaattgattaggaagcatttggtagaaggactgaacaactgttgggatatatatatatatatataattttttttttttaaattcctggtggatactgtagaagaagcccatatcacatgtggatgtcgagacttcacgggcaatcatgagcaagtgaacactgttctaccaagaactgaaggcatatgcacagtcaaggtcacttaaagggtcttatgaaacaatttgagccagagagcatctttcccctgtgcttggaaaccttttttccttcttgacatttatcacctctgatggctgaagaatgtagacaggtataatgatactgcttttcaccaaaatttctacaccaaggtaaacaggtgtttgccttatttaattttttactttcagttctacgtgaattagctttttctcagatgttgaaactttgaatgtccttttatgattttgtttatattgcagtagtatttattttttagtgatgagaattgtatgtcatgttagcaaacgcagctccaacttatataaaatagacttactgcagttacttttgacccatgtgcaaggattgtacacgctgatgagaatcatgcactttttctcctctgttaaaaaaaatgataaggctctgaaatggaatatattggttagaatttggctttgggagaagagatgctgccatttaaccccttggtactgaaaatgagaaaatccccaactatgcatgccaaggggttaatgaaacaaatagctgttgacgtttgctcatttaagaatttgaaacgttatgatgacctggcaacaaaaagtaatgaagaaaattgagacctgagtgaagataagaaatgatctttacgtggcaaaatgaacacatcttgagtatttaggaaatgggcagtgaaggctaagaacctggtgtgtttcttgggatcatggtacatttatcactgaattaagccatcagggaaaaaacaacaaaaaaagagaacacctccagcttttctttttctgtatatactcatgtcccccagattccaacatttctcactgaaagggggcatgtatgcaaacctcatctttctccttcattaatgatgatcttcagattaaaccctttggtgctaggagctgacaatttccaaagcagcctgtgaagtcctaggggctgggggccactcttgcggcaagcagaaggccatcctactccgcggagtgatcatggaaatgtattttagttaaactctgacagctcccaaacggaagactacagcatgacgtagtattatgattgcattgtatgaaagagcaagtgactttctaagtaggatgaatcatattcatatgcagatgtcttagcctcttgacgctggaagtgtggatttatagctatgaaaccactgctggcagtgggtgggccactgggactgacgggggttaaagggcattttactaaggcagctaagacatattcagacatcaacgttatccttctttttcatatttctacctgagtgaagttcatccttagtattgagtaggaagttacagtaaatggtagttcattcttacttacacacatagctaatcttttttttttcacttggaattatgttgaatgtttcattttgacaaaaaagtagactagaaggtatgttctttaagttgtcttgcatccattatataagaaagaaacaggtgagaggaagagcagaaagctgagactggctgatgttcagagcacttactcctctagagggaaagcatgacaccgaacactaagcacacagctttttgttgttttggttttttctcccgcaaatcttaaagtgattcccatgaccttggccaaggacacttcttaaagattaatgactggcactgacattgccccaggcgggccactcctcacactggctctcagttcccagccatgcctggggctcagtcacttctattccaccctctgagactccattggtgtcacacaaggtgtcttcttggctttgattttgagaatcccctattttcacttccagatctgtcagctgccatggaggaataatagaaaaccagaaatgcgtgtagagggagatttctaaaacttcccttgtgtcgcccatagttgtagttttgggttctggcaggtggaacaccctgaaacctggaatcattctatgagaatacagttcagactttgcagactccagcccatactaactgtcatgaagcttgacttcttgtcataatgcagccatcttggaggaaattggccatttctgcttagatggttggcagggtcgcgctcagctttgctttctacactaattacatagcattattcaagtattgttttccatttcccatccctgatttccagcttcttaaagctgactgttcttgcaggggccacttgcttctcctagagtacaaaagtaagggccttccttactaactgcagggtctctctattacacctcaacatacacactttgctgctactgtttgtactgtctacagtagaatttccttatcttgctcctggtagtgcattacaggcaagcatgaaatgtaaagtatttatttaaataaaaagaaaacctctaaattggtaattgaattacctccctgtagctttatagtttgtgacatttcttgaccttgctagttctttcattagatctgcgcaagatctagtcatctggttaaggattttaagcagatgcaactataaacccaagaaactgtattactattactgttggtcatactaaacctgtctatttcctgaagtatatgacccacaaggatgtggaataactaggagaaactgtttttgtacactgtacatccttagtatttttacacgtatatgatagggatgaacatgattttccttcgtacagacagcttaaataaagcactatgtcaatctgcta

SEQ ID NO: 4413 - DNA, 1575 bp, Homo sapiens
  source 1..1575: mol_type = genomic DNA
ctcaaatacacatcaccaaacaaattttctctattatttgggctgagtcatcactagagagtgggaagggcagcagcagcagagaatccaaaccctaaagctgatatcacaaagtaccatttctccaagttgggggctcagaggggagtcatcatgagcgatgttaccattgtgaaagaaggttgggttcagaagaggggagaatatataaaaaactggaggccaagatacttccttttgaagacagatggctcattcataggatataaagagaaacctcaagatgtggatttaccttatcccctcaacaacttttcagtggcaaaatgccagttaatgaaaacagaacgaccaaagccaaacacatttataatcagatgtctccagtggactactgttatagagagaacatttcatgtagatactccagaggaaagggaagaatggacagaagctatccaggctgtagcagacagactgcagaggcaagaagaggagagaatgaattgtagtccaacttcacaaattgataatataggagaggaagagatggatgcctctacaacccatcataaaagaaagacaatgaatgattttgactatttgaaactactaggtaaaggcacttttgggaaagttattttggttcgagagaaggcaagtggaaaatactatgctatgaagattctgaagaaagaagtcattattgcaaaggatgaagtggcacacactctaactgaaagcagagtattaaagaacactagacatccctttttaacatccttgaaatattccttccagacaaaagaccgtttgtgttttgtgatggaatatgttaatgggggcgagctgtttttccatttgtcgagagagcgggtgttctctgaggaccgcacacgtttctatggtgcagaaattgtctctgccttggactatctacattccggaaagattgtgtaccgtgatctcaagttggagaatctaatgctggacaaagatggccacataaaaattacagattttggactttgcaaagaagggatcacagatgcagccaccatgaagacattctgtggcactccagaatatctggcaccagaggtgttagaagataatgactatggccgagcagtagactggtggggcctaggggttgtcatgtatgaaatgatgtgtgggaggttacctttctacaaccaggaccatgagaaactttttgaattaatattaatggaagacattaaatttcctcgaacactctcttcagatgcaaaatcattgctttcagggctcttgataaaggatccaaataaacgccttggtggaggaccagatgatgcaaaagaaattatgagacacagtttcttctctggagtaaactggcaagatgtatatgataaaaagcttgtacctccttttaaacctcaagtaacatctgagacagatactagatattttgatgaagaatttacagctcagactattacaataacaccacctgaaaaatgtcagcaatcagattgtggcatgctgggtaactggaaaaaataataaaaagtaagtttcaatagctca

SEQ ID NO: 4414 - DNA, 560 bp, Homo sapiens
  source 1..560: mol_type = genomic DNA
attgggcaccgcccacttcgtgggcttccaggctgagtcatcactagagagtgggaagggcagcagcagcagagaatccaaaccctaaagctgatatcacaaagtaccatttctccaagttgggggctcagaggggagtcatcatgagcgatgttaccattgtgaaagaaggttgggttcagaagaggggagaatatataaaaaactggaggccaagatacttccttttgaagacagatggctcattcataggatataaagagaaacctcaagatgtggatttaccttatcccctcaacaacttttcagtggcaaaatgccagttaatgaaaacagaacgaccaaagccaaacacatttataatcagatgtctccagtggactactgttatagagagaacatttcatgtagatactccagaggaaagggaagaatggacagaagctatccaggctgtagcagacagactgcagaggcaagaagaggagagaatgaattgtagtccaacttcacaaattgataatataggagaggaagagatggatgcctctacaacccat

SEQ ID NO: 4415 - DNA, 1374 bp, Homo sapiens
  source 1..1374: mol_type = genomic DNA
atgagccgcctgcccgccagcccgggcccagccccccgccgcccccgccgtccccgccgccgctgcccgccgccaccggccgcccgcccgcccggctcctccggccgcctccgctgcgctgcgctgcgctgcctgcacccagggctcgggagggggccgcggaggagtcgccccccgcgcccggcccccgcccgccgcgcccgggcccgcgccatggggctctggctgtcgccgccccccgcgccgccgggctagggcgatgcgggcgcccccggcgggcggccccggcgggcaccatgagccctctgctccgccgcctgctgctcgccgcactcctgcagctggcccccgcccaggcccctgtctcccagcctgatgcccctggccaccagaggaaagtggtgtcatggatagatgtgtatactcgcgctacctgccagccccgggaggtggtggtgcccttgactgtggagctcatgggcaccgtggccaaacagctggtgcccagctgcgtgactgtgcagcgctgtggtggctgctgccctgacgatggcctggagtgtgtgcccactgggcagcaccaagtccggatgcagatcctcatgatccggtacccgagcagtcagctgggggagatgtccctggaagaacacagccagtgtgaatgcagacctaaaaaaaaggacagtgctgtgaagccagacagggctgccactccccaccaccgtccccagccccgttctgttccgggctgggactctgcccccggagcaccctccccagctgacatcacccatcccactccagccccaggcccctctgcccacgctgcacccagcaccaccagcgccctgacccccggacctgccgctgccgctgccgacgccgcagcttcctccgttgccaagggcggggcttagagctcaacccagacacctgcaggtgccggaagctgcgaaggtgacacatggcttttcagactcagcagggtgacttgcctcagaggctatatcccagtgggggaacaaagaggagcctggtaaaaaacagccaagcccccaagacctcagcccaggcagaagctgctctaggacctgggcctctcagagggctcttctgccatcccttgtctccctgaggccatcatcaaacaggacagagttggaagaggagactgggaggcagcaagaggggtcacataccagctcaggggagaatggagtactgtctcagtttctaaccactctgtgcaagtaagcatcttacaactggctcttcctcccctcactaagaagacccaaacctctgcataatgggatttgggctttggtacaagaactgtgacccccaaccctgataaaagagatggaagga

SEQ ID NO: 4416 - DNA, 979 bp, Homo sapiens
  source 1..979: mol_type = genomic DNA
ccccggcgggcaccatgagccctctgctccgccgcctgctgctcgccgcactcctgcagctggcccccgcccaggcccctgtctcccagcctgatgcccctggccaccagaggaaagtggtgtcatggatagatgtgtatactcgcgctacctgccagccccgggaggtggtggtgcccttgactgtggagctcatgggcaccgtggccaaacagctggtgcccagctgcgtgactgtgcagcgctgtggtggctgctgccctgacgatggcctggagtgtgtgcccactgggcagcaccaagtccggatgcagatcctcatgatccggtacccgagcagtcagctgggggagatgtccctggaagaacacagccagtgtgaatgcagacctaaaaaaaaggacagtgctgtgaagccagacagccccaggcccctctgcccacgctgcacccagcaccaccagcgccctgacccccggacctgccgctgccgctgccgacgccgcagcttcctccgttgccaagggcggggcttagagctcaacccagacacctgcaggtgccggaagctgcgaaggtgacacatggcttttcagactcagcagggtgacttgcctcagaggctatatcccagtgggggaacaaagaggagcctggtaaaaaacagccaagcccccaagacctcagcccaggcagaagctgctctaggacctgggcctctcagagggctcttctgccatcccttgtctccctgaggccatcatcaaacaggacagagttggaagaggagactgggaggcagcaagaggggtcacataccagctcaggggagaatggagtactgtctcagtttctaaccactctgtgcaagtaagcatcttacaactggctcttcctcccctcactaagaagacccaaacctctgcataatgggatttgggctttggtacaagaactgtgacccccaaccctgataaaa

SEQ ID NO: 4417 - DNA, 2286 bp, Homo sapiens
  source 1..2286: mol_type = genomic DNA
tgtgggtgcggggagtggaattttggaacgaaatgtaacgaagagaagtacagtagtaagagtaacactgtagccgccaccggcaaggggtgcgcgctggggagcggacgctgcatcccctttctgctgcaggaacctctcatcagaccgcctgagggaagcggcgcccggagacccgccccggcccggtccacattctccccaggaagccggactctatggggcgggaccctgggggagcctgagccgagcccggagccagccccgaacccctgaacctccagccaggggcgccccgggagcagccagcccgtgggcgagccgcccgcccgccgagcagccatgagcgagacggtcatctgttccagccgggccactgtgatgctttatgatgatggcaacaagcgatggctccctgctggcacgggtccccaggccttcagccgcgtccagatctaccacaaccccacggccaattcctttcgcgtcgtgggccggaagatgcagcccgaccagcaggtggtcatcaactgtgccatcgtccggggtgtcaagtataaccaggccacccccaacttccatcagtggcgcgacgctcgccaggtctggggcctcaacttcggcagcaaggaggatgcggcccagtttgccgccggcatggccagtgccctagaggcgttggaaggaggtgggccccctccacccccagcacttcccacctggtcggtcccgaacggcccctccccggaggaggtggagcagcagaaaaggcagcagcccggcccgtcggagcacatagagcgccgggtctccaatgcaggaggcccacctgctccccccgctgggggtccacccccaccaccaggacctccccctcctccaggtccccccccacccccaggtttgcccccttcgggggtcccagctgcagcgcacggagcagggggaggaccaccccctgcaccccctctcccggcagcacagggccctggtggtgggggagctggggccccaggcctggccgcagctattgctggagccaaactcaggaaagtcagcaagcaggaggaggcctcaggggggcccacagcccccaaagctgagagtggtcgaagcggaggtgggggactcatggaagagatgaacgccatgctggcccggagaaggaaagccacgcaagttggggagaaaacccccaaggatgaatctgccaatcaggaggagccagaggccagagtcccggcccagagtgaatctgtgcggagaccctgggagaagaacagcacaaccttgccaaggatgaagtcgtcttcttcggtgaccacttccgagacccaaccctgcacgcccagctccagtgattactcggacctacagagggtgaaacaggagcttctggaagaggtgaagaaggaattgcagaaagtgaaagaggaaatcattgaagccttcgtccaggagctgaggaagcggggttctccctgaccacagggacccagaagacccgcttctcctttccgcacacccggcctgtcaccctgctttccctgcctctacttgacttggaattggctgaagactacacaggaatgcatcgttcccactccccatcccacttggaaaactccaagggggtgtggcttccctgctcacacccacactggctgctgattggctggggaggcccccgcccttttctccctttggtccttcccctctgccatccccttggggccggtccctctgctggggatgcaccaatgaaccccacaggaagggggaaggaaggagggaatttcacattcccttgttctagattcactttaacgcttaatgccttcaaagttttggtttttttaagaaaaaaaaatatatatatatttgggttttgggggaaaagggaaatttttttttctctttggttttgataaaatgggatgtgggagtttttaaatgctatagccctgggcttgccccatttggggcagctatttaaggggaggggatgtctcaccgggctgggggtgagatatccccccaccccagggactccccttccctctggctccttccccttttctatgaggaaataagatgctgtaactttttggaacctcagttttttgattttttatttgggtaggttttggggtccaggccattttttttaccccttggaggaaataagatgagggagaaaggagaaggggaggaaacttctcccctcccaccttcacctttagcttcttgaaaatgggcccctgcagaataaatctgccagttttt

SEQ ID NO: 4418 - DNA, 3880 bp, Homo sapiens
  source 1..3880: mol_type = genomic DNA
gggggaggcccgcggctgccgccgccatttcgggcgctgctgtgaagctgaaaccggagccggtccgctgggcggcgggcgccgggggccggaggggcgcgcgcggcggcggcaccccagcgtttaggcgcggaggcagccatggcgggcaacttcgactcggaggagcggagtagctggtactgggggaggttgagtcggcaggaggcggtggcgctgctgcagggccagcggcacggggtgttcctggtgcgggactcgagcaccagccccggggactatgtgctcagcgtctcagagaactcgcgcgtctcccactacatcatcaacagcagcggcccgcgcccgccggtgccaccgtcgcccgcccagcctccgcccggggtgagcccctccagactccgaataggagatcaagagtttgattcattgcctgctttactggaattctacaaaatacactatttggacactacaacgttgatagaaccagtttccagatccaggcagggtagtggagtgattctcaggcaggaggaggcggagtatgtgcgagccctctttgactttaatgggaatgatgaggaagatcttccctttaagaaaggagacatcttgagaatccgggacaagcctgaagagcagtggtggaatgcggaggacagcgaaggcaagagagggatgattccagtcccttacgtcgagaagtatagacctgcctccgcctcagtatcggctctgattggaggtaaccaggagggttcccacccacagccactgggtgggccggagcctgggccctatgcccaacccagcgtcaacactccgctccctaacctccagaatgggcccatatatgccagggttatccagaagcgagtccccaatgcctacgacaagacagccttggctttggaggtcggtgagctggtaaaggttacgaagattaatgtgagtggtcagtgggaaggggagtgtaatggcaaacgaggtcacttcccattcacacatgtccgtctgctggatcaacagaatcccgatgaggacttcagctgagtatagttcaacagttttgctgacagatgggaacaatcttttttttttttttccaactgccatctatacaattttcttacagatgtcaaaagcagtctagtttatataagcattctgttacctgtgatattttttagactgaactgctccattcctagtcttaattaccatattcagggtacgaactggagggcttgtgtgttagcttctgaattggcaattggaggcggtagtggtcgtgcctgtgtgtatcagaagggataggtatcttgcctcctttctctcaggcagtgcaaatcaccctgtggaaaaccgatggacaggaaggagtgttacacactgcttaccctgatttattcagtggttttgttttcattctggaaccatactatcaaatggcgacagactgttccgttccacccccgtgaagtaatcatgcaccgtgtgaatagtatcaagcaggattgctttcattgtatggagcatgaccagcgtgtgactcattctgacatttcagatcctaagaattctaagaacactactagaagcatttgttccctcctagtcaatgcttcatactttttcttgggattcttttagcccttgacattcttgtcccccaaacctgtaagtaggtgaattcctaagataagtgtgtattttcattccaggtgaaaagcaggatgtaccgagcactttattcagtgcatagctttaagccagtgttggattcactaagtggacagccagtctcccagctctctgccttccccaaaagggtcgtagtaggtcacccttctacagcagctaactagagtcctaactaatgggatccagcagggccatttctccagagggccagtatcctattaggagactcttggaattcttaggttctactcaagagtggaaggaccaatcacctctgatattctgtggaaggttttggggtcaaattctgccctctgcattctgtgcaacttgtataaaagtcaagttagtattacatgaatttggggtagggttagtgctttgaaaaaatgttgaaccggctgggcgcggtggctcacgtctgtaatcccagcactttgggaggccgaggcgggtggatcatgaggtcaggagttcgagaccagcctggccaacatagtgaaaccccatctctgctaaagatataaaaaattagcccggcgtggtggtgcacgcctgtaatcccagctactcgggaggctgaggcaggagaattgcttcaacctgggaggtggaggctgcagtgagccgagatcgcaccactgcgttccagcctgagcgacagggcaagactcagtctcaaaaaaaaaaaaaaggaaaaaaaaaagaaaaaaaaatgttgaaccaattgtgaattacttatgtattattcatttctcatggggagagtaatgctgttgaagaacattacattgtaaactgccttcatttttggctctttgtttatgttcaggtttagtttacaaacccatttaagtatggaatgatttatatggggtcaggtgctccacaaaatagacctatgagaccaaaaatgacctaggctatttagacgacagcatgaaacttccacgttagttctcagtctataaaggcacttaccggtctctggtgtggtatgaccaatagaaacaccttatagtttgctttggacctcattttggaaaaataatctgcctttctaattgttctgcataggttaaaatgataaatttacattctttgaacctataccagattgtggtgtccgagtgaccggcacactgtctgacacacagtcagtgtgcacgtatttgtctgagtgaatgaggagacctgagaaaccggtgacgtggcacagggaagccagctggcccaggattccgtacatggccgcaagcagactaacgcgttgacgctaatttaatgtattttacctcacactaaggtcatgcttgataaagacgttaaactcaacttgtaaaatggtagcccagtgctatgcacagagtgggtgctcattagtgttgaatgaacacatttgtaatactacatgtaattccatctgactgctttgttaaattttcagttagaacgtagatactgtaaagtccacacacacattaaatcttgttttcctgaaagtatggcatcaaaaatacttgtagaaaaaccttgtcacaactgatttgaatgttcctattttcttttcctttgactttgatattggcttgtaatgtctcttttcatcatatgtaatatcagtggaacaggcagcgctactcaagtcctaaggattcctcagtgatcagtgatccagggccgttcatgaaccactgggctggatttgactgttgagtgtggcagttaatgcccctcaagaaatcaaaggatgtcttataagtgtcttccaaaaaaaagcaaatgctgaaatcctattggcaaagtaaactgaaattggctgctatattttatataatcatttctgcaaatcccattttttgaatactaatatttgacatggttaattcttattaatttgttggaattgtttattgttaataatgcaaatagataatttttaattatccacaagtaacatttcactgttaatggtttgaaataggtgataagcaaaccaatttgaaataaaatataaacatgtgccattgtattataacactatacactttcttgacagttaaatttaaaaaaaaattttttttggtagcatgtattgtatatgtttatagtatatgtagtaaataaaaatatggccaaatgtttggcttggtgatcttttgcaaaaaagtaa

SEQ ID NO: 4419 - DNA, 2218 bp, Homo sapiens
  source 1..2218: mol_type = genomic DNA
gctgctgtgaagctgaaaccggagccggtccgctgggcggcgggcgccgggggccggaggggcgcgcgcggcggcggcaccccagcgtttaggcgcggaggcagccatggcgggcaacttcgactcggaggagcggagtagctggtactgggggaggttgagtcggcaggaggcggtggcgctgctgcagggccagcggcacggggtgttcctggtgcgggactcgagcaccagccccggggactatgtgctcagcgtctcagagaactcgcgcgtctcccactacatcatcaacagcagcggcccgcgcccgccggtgccaccgtcgcccgcccagcctccgcccggggtgagcccctccagactccgaataggagatcaagagtttgattcattgcctgctttactggaattctacaaaatacactatttggacactacaacgttgatagaaccagtttccagatccaggcagggtagtggagtgattctcaggcaggaggaggcggagtatgtgcgagccctctttgactttaatgggaatgatgaggaagatcttccctttaagaaaggagacatcttgagaatccgggacaagcctgaagagcagtggtggaatgcggaggacagcgaaggcaagagagggatgattccagtcccttacgtcgagaagtatagacctgcctccgcctcagtatcggctctgattggaggtcggtgagctggtaaaggttacgaagattaatgtgagtggtcagtgggaaggggagtgtaatggcaaacgaggtcacttcccattcacacatgtccgtctgctggatcaacagaatcccgatgaggacttcagctgagtatagttcaacagttttgctgacagatgggaacaatcttttttttttttttccaactgccatctatacaattttcttacagatgtcaaaagcagtctagtttatataagcattctgttacctgtgatattttttagactgaactgctccattcctagtcttaattaccatattcagggtacgaactggagggcttgtgtgttagcttctgaattggcaattggaggcggtagtggtcgtgcctgtgtgtatcagaagggataggtatcttgcctcctttctctcaggcagtgcaaatcaccctgtggaaaaccgatggacaggaaggagtgttacacactgcttaccctgatttattcagtggttttgttttcattctggaaccatactatcaaatggcgacagactgttccgttccacccccgtgaagtaatcatgcaccgtgtgaatagtatcaagcaggattgctttcattgtatggagcatgaccagcgtgtgactcattctgacatttcagatcctaagaattctaagaacactactagaagcatttgttccctcctagtcaatgcttcatactttttcttgggattcttttagcccttgacattcttgtcccccaaacctgtaagtaggtgaattcctaagataagtgtgtattttcattccaggtgaaaagcaggatgtaccgagcactttattcagtgcatagctttaagccagtgttggattcactaagtggacagccagtctcccagctctctgccttccccaaaagggtcgtagtaggtcacccttctacagcagctaactagagtcctaactaatgggatccagcagggccatttctccagagggccagtatcctattaggagactcttggaattcttaggttctactcaagagtggaaggaccaatcacctctgatattctgtggaaggttttggggtcaaattctgccctctgcattctgtgcaacttgtataaaagtcaagttagtattacatgaatttggggtagggttagtgctttgaaaaaatgttgaaccggctgggcgcggtggctcacgtctgtaatcccagcactttgggaggccgaggcgggtggatcatgaggtcaggagttcgagaccagcctggccaacatagtgaaaccccatctctgctaaagatataaaaaattagcccggcgtggtggtgcacgcctgtaatcccagctactcgggaggctgaggcaggagaattgcttcaacctgggaggtggaggctgcagtgagccgagatcgcaccactgcgttccagcctgagcgacagggcaagactcagtctcaaaaaaaaaaaaaaggaaaaaaaaaagaaaaaaaaa

SEQ ID NO: 4420 - DNA, 2194 bp, Homo sapiens
  source 1..2194: mol_type = genomic DNA
tgaagccggcgacaggactttgggtctgggtgagccttctcgtggcggcggggaccgtccagcccagcgattctcagtcagtgtgtgcaggaacggagaataaactgagctctctctctgacctggaacagcagtaccgagccttgcgcaagtactatgaaaactgtgaggttgtcatgggcaacctggagataaccagcattgagcacaaccgggacctctccttcctgcggtctgttcgagaagtcacaggctacgtgttagtggctcttaatcagtttcgttacctgcctctggagaatttacgcattattcgtgggacaaaactttatgaggatcgatatgccttggcaatatttttaaactacagaaaagatggaaactttggacttcaagaacttggattaaagaacttgacagaaatcctaaatggtggagtctatgtagaccagaacaaattcctttgttatgcagacaccattcattggcaagatattgttcggaacccatggccttccaacttgactcttgtgtcaacaaatggtagttcaggatgtggacgttgccataagtcctgtactggccgttgctggggacccacagaaaatcattgccagactttgacaaggacggtgtgtgcagaacaatgtgacggcagatgctacggaccttacgtcagtgactgctgccatcgagaatgtgctggaggctgctcaggacctaaggacacagactgctttgcctgcatgaatttcaatgacagtggagcatgtgttactcagtgtccccaaacctttgtctacaatccaaccacctttcaactggagcacaatttcaatgcaaagtacacatatggagcattctgtgtcaagaaatgtccacataactttgtggtagattccagttcttgtgtgcgtgcctgccctagttccaagatggaagtagaagaaaatgggattaaaatgtgtaaaccttgcactgacatttgcccaaaagcttgtgatggcattggcacaggatcattgatgtcagctcagactgtggattccagtaacattgacaaattcataaactgtaccaagatcaatgggaatttgatctttctagtcactggtattcatggggacccttacaatgcaattgaagccatagacccagagaaactgaacgtctttcggacagtcagagagataacaggtttcctgaacatacagtcatggccaccaaacatgactgacttcagtgttttttctaacctggtgaccattggtggaagagtactctatagtggcctgtccttgcttatcctcaagcaacagggcatcacctctctacagttccagtccctgaaggaaatcagcgcaggaaacatctatattactgacaacagcaacctgtgttattatcataccattaactggacaacactcttcagcacaatcaaccagagaatagtaatccgggacaacagaaaagctgaaaattgtactgctgaaggaatggtgtgcaaccatctgtgttccagtgatggctgttggggacctgggccagaccaatgtctgtcgtgtcgccgcttcagtagaggaaggatctgcatagagtcttgtaacctctatgatggtgaatttcgggagtttgagaatggctccatctgtgtggagtgtgacccccagtgtgagaagatggaagatggcctcctcacatgccatggaccgggtcctgacaactgtacaaagtgctctcattttaaagatggcccaaactgtgtggaaaaatgtccagatggcttacagggggcaaacagtttcattttcaagtatgctgatccagatcgggagtgccacccatgccatccaaactgcacccaagggtgcataggctcaagtattgaagactgcatcggcctgatggatagaactcccctgattgcagctggagtaattggtgggctcttcattctggtcattgtgggtctgacatttgctgtttatgttagaaggaagagcatcaaaaagaaaagagccttgagaagattcttggaaacagagttggtggaaccattaactcccagtggcacagcacccaatcaagctcaacttcgtattttgaaagaaactgagctgaagagggtaaaagtccttggctcaggtgcttttggaacggtttataaaggtatttgggtacctgaaggaga

SEQ ID NO: 4421 - DNA, 12132 bp, Homo sapiens
  source 1..12132: mol_type = genomic DNA
ggagcgagcaagcgaaggctcacgcggggaaatagctgcacagtccggcccagagcgccaagcgcacacaccgagcacactcccacacgcgcacacacgcgctcacactcgccccctcctcgggccccggccctggacccgcgggcgcggactcggtcgcccgccctgggagtcgccacaccgcgcgcgccgcgcccgcccccctcgcacccccacgcgcgcccggctgggggatctcctccgcgtgcccgaaagggggatatgccatttggacatgtaattgtcagcacgggatctgagacttccaaaaaatgaagccggcgacaggactttgggtctgggtgagccttctcgtggcggcggggaccgtccagcccagcgattctcagtcagtgtgtgcaggaacggagaataaactgagctctctctctgacctggaacagcagtaccgagccttgcgcaagtactatgaaaactgtgaggttgtcatgggcaacctggagataaccagcattgagcacaaccgggacctctccttcctgcggtctgttcgagaagtcacaggctacgtgttagtggctcttaatcagtttcgttacctgcctctggagaatttacgcattattcgtgggacaaaactttatgaggatcgatatgccttggcaatatttttaaactacagaaaagatggaaactttggacttcaagaacttggattaaagaacttgacagaaatcctaaatggtggagtctatgtagaccagaacaaattcctttgttatgcagacaccattcattggcaagatattgttcggaacccatggccttccaacttgactcttgtgtcaacaaatggtagttcaggatgtggacgttgccataagtcctgtactggccgttgctggggacccacagaaaatcattgccagactttgacaaggacggtgtgtgcagaacaatgtgacggcagatgctacggaccttacgtcagtgactgctgccatcgagaatgtgctggaggctgctcaggacctaaggacacagactgctttgcctgcatgaatttcaatgacagtggagcatgtgttactcagtgtccccaaacctttgtctacaatccaaccacctttcaactggagcacaatttcaatgcaaagtacacatatggagcattctgtgtcaagaaatgtccacataactttgtggtagattccagttcttgtgtgcgtgcctgccctagttccaagatggaagtagaagaaaatgggattaaaatgtgtaaaccttgcactgacatttgcccaaaagcttgtgatggcattggcacaggatcattgatgtcagctcagactgtggattccagtaacattgacaaattcataaactgtaccaagatcaatgggaatttgatctttctagtcactggtattcatggggacccttacaatgcaattgaagccatagacccagagaaactgaacgtctttcggacagtcagagagataacaggtttcctgaacatacagtcatggccaccaaacatgactgacttcagtgttttttctaacctggtgaccattggtggaagagtactctatagtggcctgtccttgcttatcctcaagcaacagggcatcacctctctacagttccagtccctgaaggaaatcagcgcaggaaacatctatattactgacaacagcaacctgtgttattatcataccattaactggacaacactcttcagcacaatcaaccagagaatagtaatccgggacaacagaaaagctgaaaattgtactgctgaaggaatggtgtgcaaccatctgtgttccagtgatggctgttggggacctgggccagaccaatgtctgtcgtgtcgccgcttcagtagaggaaggatctgcatagagtcttgtaacctctatgatggtgaatttcgggagtttgagaatggctccatctgtgtggagtgtgacccccagtgtgagaagatggaagatggcctcctcacatgccatggaccgggtcctgacaactgtacaaagtgctctcattttaaagatggcccaaactgtgtggaaaaatgtccagatggcttacagggggcaaacagtttcattttcaagtatgctgatccagatcgggagtgccacccatgccatccaaactgcacccaagggtgtaacggtcccactagtcatgactgcatttactacccatggacgggccattccactttaccacaacatgctagaactcccctgattgcagctggagtaattggtgggctcttcattctggtcattgtgggtctgacatttgctgtttatgttagaaggaagagcatcaaaaagaaaagagccttgagaagattcttggaaacagagttggtggaaccattaactcccagtggcacagcacccaatcaagctcaacttcgtattttgaaagaaactgagctgaagagggtaaaagtccttggctcaggtgcttttggaacggtttataaaggtatttgggtacctgaaggagaaactgtgaagattcctgtggctattaagattcttaatgagacaactggtcccaaggcaaatgtggagttcatggatgaagctctgatcatggcaagtatggatcatccacacctagtccggttgctgggtgtgtgtctgagcccaaccatccagctggttactcaacttatgccccatggctgcctgttggagtatgtccacgagcacaaggataacattggatcacaactgctgcttaactggtgtgtccagatagctaagggaatgatgtacctggaagaaagacgactcgttcatcgggatttggcagcccgtaatgtcttagtgaaatctccaaaccatgtgaaaatcacagattttgggctagccagactcttggaaggagatgaaaaagagtacaatgctgatggaggaaagatgccaattaaatggatggctctggagtgtatacattacaggaaattcacccatcagagtgacgtttggagctatggagttactatatgggaactgatgacctttggaggaaaaccctatgatggaattccaacgcgagaaatccctgatttattagagaaaggagaacgtttgcctcagcctcccatctgcactattgacgtttacatggtcatggtcaaatgttggatgattgatgctgacagtagacctaaatttaaggaactggctgctgagttttcaaggatggctcgagaccctcaaagatacctagttattcagggtgatgatcgtatgaagcttcccagtccaaatgacagcaagttctttcagaatctcttggatgaagaggatttggaagatatgatggatgctgaggagtacttggtccctcaggctttcaacatcccacctcccatctatacttccagagcaagaattgactcgaataggagtgaaattggacacagccctcctcctgcctacacccccatgtcaggaaaccagtttgtataccgagatggaggttttgctgctgaacaaggagtgtctgtgccctacagagccccaactagcacaattccagaagctcctgtggcacagggtgctactgctgagatttttgatgactcctgctgtaatggcaccctacgcaagccagtggcaccccatgtccaagaggacagtagcacccagaggtacagtgctgaccccaccgtgtttgccccagaacggagcccacgaggagagctggatgaggaaggttacatgactcctatgcgagacaaacccaaacaagaatacctgaatccagtggaggagaacccttttgtttctcggagaaaaaatggagaccttcaagcattggataatcccgaatatcacaatgcatccaatggtccacccaaggccgaggatgagtatgtgaatgagccactgtacctcaacacctttgccaacaccttgggaaaagctgagtacctgaagaacaacatactgtcaatgccagagaaggccaagaaagcgtttgacaaccctgactactggaaccacagcctgccacctcggagcacccttcagcacccagactacctgcaggagtacagcacaaaatatttttataaacagaatgggcggatccggcctattgtggcagagaatcctgaatacctctctgagttctccctgaagccaggcactgtgctgccgcctccaccttacagacaccggaatactgtggtgtaagctcagttgtggttttttaggtggagagacacacctgctccaatttccccacccccctctctttctctggtggtcttccttctaccccaaggccagtagttttgacacttcccagtggaagatacagagatgcaatgatagttatgtgcttacctaacttgaacattagagggaaagactgaaagagaaagataggaggaaccacaatgtttcttcatttctctgcatgggttggtcaggagaatgaaacagctagagaaggaccagaaaatgtaaggcaatgctgcctactatcaaactagctgtcactttttttctttttctttttctttctttgtttctttcttcctcttcttttttttttttttttttaaagcagatggttgaaacacccatgctatctgttcctatctgcaggaactgatgtgtgcatatttagcatccctggaaatcataataaagtttccattagaacaaaagaataacattttctataacatatgatggtgtctgaaattgagaatccagtttctttccccagcagtttctgtcctagcaagtaagaatggccaactcaactttcataatttaaaaatctccattaaagttataactagtaattatgttttcaacactttttggtttttttcattttgttttgctctgaccgattcctttatatttgctcccctatttttggctttaatttctaattgcaaagatgtttacatcaaagcttcttcacagaatttaagcaagaaatattttaatatagtgaaatggccactactttaagtatacaatctttaaaataagaaagggaggctaatatttttcatgctatcaaattatcttcaccctcatcctttacatttttcaacatttttttttctccataaatgacactacttgataggccgttggttgtctgaagagtagaagggaaactaagagacagttctctgtggttcaggaaaactactgatactttcaggggtggcccaatgagggaatccattgaactggaagaaacacactggattgggtatgtctacctggcagatactcagaaatgtagtttgcacttaagctgtaattttatttgttctttttctgaactccattttggattttgaatcaagcaatatggaagcaaccagcaaattaactaatttaagtacatttttaaaaaaagagctaagataaagactgtggaaatgccaaaccaagcaaattaggaaccttgcaacggtatccagggactatgatgagaggccagcacattatcttcatatgtcacctttgctacgcaaggaaatttgttcagttcgtatacttcgtaagaaggaatgcgagtaaggattggcttgaattccatggaatttctagtatgagactatttatatgaagtagaaggtaactctttgcacataaattggtataataaaaagaaaaacacaaacattcaaagcttagggataggtccttgggtcaaaagttgtaaataaatgtgaaacatcttctcatgcaattattttattatccaacacactaatcttttgatactttatataattccctttcttcatatactgcatccagtactagaaccatcattattatgtatcattttgaaagaatacctgatgagatgaaggatgagaacaaatgacagagatgagtctccaagtaaagggggcctcacatcaataattaggaaacttagatataagtcgcccttttctgaaaattctaccccaagtcatttagatttttaaaaaatatttctaatgttaaaatattgggaccaaattagaatcaatagtataagattaattaattagagtaaaaatatctattaaggcagagaaagtttagagaaaaaaatccaaagaaatttgtgtttcttcctattctgaacaagtaaatccatccatccatccatccaaacctcctttatctaactgtgtctactaaaagcaccatgttttgtggggaacactcagataaatggaatatcatcctcaacttcaaaattctatgatctaggagatttaattaaaatgacattttaatttttctatgcgttccaacaatcagattgcatagtctcttttgtgaatagctgtcatataatcagttgtactgtaagatatctcctttaaactcatttgggatataagttaaacatccttcaaattgttgatgttgacaaacaggataatttcaataatattattcaaacataaactggtctaggagaatattgcatcactgactaattagcctatctagagtctaacttcaccattaaaccaaaagcagatggtggtccttggccaagaatattggagacattggagttggtttttttctaagctataagaagtgaggcgagctgaaaaagtatggtagagcaggagaagggtttgtgagattccttctagtgaagttcaccctcaaacttttcaggggtaaagacacagagtgattcaggggccacaatctaatagctcagggctctcctatccattcagagaagtctctaggaaaagggatctcatatcagtacttatgaaaaattgaatataagcctccctttctaaataaatctgcatcgagtcatcacagccctctttttggatactataccttgattttttttttctgatttacaatatgcatatggtttctactgggctatagaaagcagaatcactcattttggagaaggaaaaaatgaatagttaaaacaaacttttaactgttaaggtaacagaaatgtatttagtgaatgtctctttcctcctaagaacacaagacttctacatgttgggtaatacctagagatgcatgtaggaataatccaaaatgacccaaatgctttataatagcaccactttataattcttttgaatgatttctgtagtatataattgacttcagttgtttgagtgttttttgttttatttttgtcccccctgggaaaacatatttcagcatgtataagagggagaaaaaaagtttcattccttccagagaataacttatttagtccagtagggtagaattttaaaatgtcagttaaagtcttcaaagtgcttggggggatatcagattccagaggccaattgtagcaattgaaatttgcagaatcaattatgtaaatctgagacaaattagtattaaaattacacggagtatattttttaaatcacccaactttgtagattatacctattttgggcaggtatggaaaaattttgcagttaaatgattgcctaaagaaagtggtaaacaggtgaggaaagatggcctctgatctaggatagatccagaaccacaaagcatctgcaccacaaaaggtgttagactaccaagcagctcctggttttctgcatagtattagtagcacagcttaggatgagaatcctttctccagtaacattcttaaaatagcatgaaaaacaacgcaaaactcaaatttctattaaaacacacaaactaaaatcaagtgattcttttttgtagattagggagaaggactgaatatctaatttaagagaaggaatagtgtttaagtgttatagtgtgtgagctaataccttctaaaggaaagacatggcatgaagattgtgcatacttacaatgctaaggaaaaatcaagaaaaggactgtgtgaggctctgctactagatgaagttggaaggactattaatgtgcttcttgaagtatcaaaaatgaaaagaaaattaaaattgtttaagcctgacagggaaggatgtaaatacaagtttttctagagctctctaacctttatttcaaaactggaattattcatccatctgtaattgttgataatttaactagtatatgtagttcataaggtaatagaaaaggtgatcatgaaagcatgtatataactggacagaaccacgataatgctataagatgtagatttagttaggttatcagatgttaaatgattttaatattattaaataaatcaaactagaaaactaaccacaagtataatgtaacaaagttaaatgcaggatataaaaatgtaggatggattttgcatagtaaaaagataagtttgccatttaaaattgttgtttgttgggtttagctgaaagtaggcatatatggttccacttgggaaaacttgctttaaagcattacaatgaacaattttttctcattctcttattcctttatcactttttaaatgtaaagaaaattgtatttatttatttttttaaataaacaccaccttgcagaatttaataggcaaacatgttacatatgactaagtaagggtcttcaagatgaagtaaagaaaatgtaaatgttctattaccttatgcagagacaaaaaaaaaaaggagtggtgtcatttagctagcaaacaaacaaaatacagttaattggtgatatgtcctttcttttctcactatgccctcttgcctccaaaaatgacaacaaagaatcacaatttttctgataaataaatgctaaaccaagcgtttcaaactattgcattgccattcttttggactttagttattagaatgatgattgttatagggcaaatgagaaatccatgtgcatcagcttctagttgttaaaaaaaccagataaattaacttctactgtatactgtgggcagaggatcctagagctgatcctacaacatcagcttctagttgttaaaaaaaaaaaaagaaacagataaattaacttctactgtatatactgtgggcagaggatcttactgtgcctctgtttgtgtacatggacttcggtgtgtatcagtttgaaggacagccttgccccatgtaaacatataaatgcagattggtatcgcctggttgctatttgcttaagaacaaatattatacagatgagatcaggcataattttaaaagatcattatcagtggagacctcattattactgatattacaatggggccagtttttatacttctgggtagaattaataaaatttttctgatcccagagatctgagttctctctgcagttggaaacaagaagctgttgtgggcattgtgtcgggccaggggcccttgtgtttgtgtgggcaaatatcttttagcagtgtgagctgcttttttcttttcattaaaagtctctctaaaataatagaaatttcagatactcggttcaagtctcactgattttgtagaggtccaaaaatgtaggatctgtcacttttgcaggcccctgcctcacctaattcctggccaggtgacattttgggcagaagtaaatgcttctatagtcacaagctaaaatgactctaagccccaatttcacggggggtattcacatgcttcctctggaaaatactctttgacagtcagctttgcaagtaagtgattaccttgttaggaatcaaagaaaaatgtatttctctctgacctttagaggaaaatagaatccttcccttttttgcccattgacacaactggcactgctctcttccctttctaccaccctggttcaaagtagtcccccgatgctgtcctgttcctttcttaagccatagtggatctctgagatcctacaccccactttgtgaaacactgacttcatctttgccctcgaatgcctgattttttcataagagattctagcaatttggacactgtttaagtgaactatcaaactaccgcatagagaatatttaagctattaaaattatggtttcccatgaagatcaattctctgtgtccttccctataggaatttgagacgagttagccctgtgatgaatcttgaaactcacatatgtccacatacacttggtagaacttcgatttaatctttacataaaagctgtacatataaccaagaagttatttttgccagtaaattaacttatttgctttattcatcttatttggttcctaatcgtaaatattttgtagctgctgtaaatttttttctcccaaatgaggagtcttattatcataaaggtaaaggctattcagctttgataaccacctgcaattcttttttggatcattcatccatctaacaaatacataatgaggacagttcatgttaatgaaaatccatgttgtttaatagaatgccatcctttacctacttttgctctttatggacgtttttcttttcatgctctagtgagctttccctatatcatgagaagtggttatatttgtgcaaatatacaaatataggaaaacaaagattcatacctgtaggcaatagtctaacttgtccaaaccactttgcctttactgctatttttatccccaatgcgtagatatttcccccaggcctatagcctttgtgaaggaaagcaaatcatacctcctgtatattgacacgaatctggttttcaaatgtcatttccagattttttagttaattgggggttgtccttttcccttaatgtgagagtcattttcctgtatatttctggatctctcaggggctgggaggggggagtgaggggactacaaccatagcactccaagaacccttttgggattactccagtaatcaactacgaaagttattttctaaatgtagatatgtaaggtgttcttttaaagtaaggtactttgaaatatgtagcataaactggtactgctgttaaatgggtcgattattaaacggagcagctgtgtgagggcagctaactttgaatgcctgtctccctggctggtgtgtctccttctcatgttgagagcaccagggattgcgtggctgcatgctgaaaccgcattttcccatggtgtatgactagttcatctctttcttgagcaccattacaagaagatcaaatgaaaatgagatcaatgtggaagacaattcatagcacaaaaaaagtcatcttaaatctactctcaaacattcatcttatacatgcatcaaagtaatttactgacatcagtttgggtgagagagggagtcactttactgaaaaggcagaggcttaaggtgtatacatttgtactcacttccttattttcttaacttgtaagcagaaaacaagccctctctcttgtgaagtatcttcaaaggattggggtgcaaaaataccttgctggtaagccatcaatgttttatttaaatccctgcattcaaagttagctgcctttttgaaataaacaaacaaaaaatactactgtatgtttgaaaatgtgaatagtatttttatagcttgttaaagacatggctagttgcatttgtaaataagtataatgttgctttgattttcttttgtggacatctttatttggaacataattgtctttagggttgatttgtatataagtaattggcctgtgattgtttcttttttggttggaagttatcattttgacattacttgtgattctgtgttcagcactattgtgatgtgttcaacctctgcactcgcttacacaataggatatgccaattgtgtgtggtgtaatgttattttgatttttttccatgttattgatgaaggatcatgcacctaacacatactaacttttttaatgttaggcatatttttagtatactttctcttattctttcttctcctccaaccttttacccatcctccttcctttccctcattcctgttgttatttgagaatgagggagaaacagtattttacatttatgtaattaggcttttccgttagttctcaaggatcctcttttggctcttgggaaagaattgtacctgtacaaggcaattatagaatgcgaactgctttgcctcattccatactgatcatcccagctgaacaatttgaaaactgttctgcctttttgttacatgaatctgtcagaaatatatttttaatttaatataaatgaaattcaataaaatatgaaacaaa

SEQ ID NO: 4422 - DNA, 3897 bp, Homo sapiens
  source 1..3897: mol_type = genomic DNA
atgaagccggcgacaggactttgggtctgggtgagccttctcgtggcggcggggaccgtccagcccagcgattctcagtcagtgtgtgcaggaacggagaataaactgagctctctctctgacctggaacagcagtaccgagccttgcgcaagtactatgaaaactgtgaggttgtcatgggcaacctggagataaccagcattgagcacaaccgggacctctccttcctgcggtctgttcgagaagtcacaggctacgtgttagtggctcttaatcagtttcgttacctgcctctggagaatttacgcattattcgtgggacaaaactttatgaggatcgatatgccttggcaatatttttaaactacagaaaagatggaaactttggacttcaagaacttggattaaagaacttgacagaaatcctaaatggtggagtctatgtagaccagaacaaattcctttgttatgcagacaccattcattggcaagatattgttcggaacccatggccttccaacttgactcttgtgtcaacaaatggtagttcaggatgtggacgttgccataagtcctgtactggccgttgctggggacccacagaaaatcattgccagactttgacaaggacggtgtgtgcagaacaatgtgacggcagatgctacggaccttacgtcagtgactgctgccatcgagaatgtgctggaggctgctcaggacctaaggacacagactgctttgcctgcatgaatttcaatgacagtggagcatgtgttactcagtgtccccaaacctttgtctacaatccaaccacctttcaactggagcacaatttcaatgcaaagtacacatatggagcattctgtgtcaagaaatgtccacataactttgtggtagattccagttcttgtgtgcgtgcctgccctagttccaagatggaagtagaagaaaatgggattaaaatgtgtaaaccttgcactgacatttgcccaaaagcttgtgatggcattggcacaggatcattgatgtcagctcagactgtggattccagtaacattgacaaattcataaactgtaccaagatcaatgggaatttgatctttctagtcactggtattcatggggacccttacaatgcaattgaagccatagacccagagaaactgaacgtctttcggacagtcagagagataacaggtttcctgaacatacagtcatggccaccaaacatgactgacttcagtgttttttctaacctggtgaccattggtggaagagtactctatagtggcctgtccttgcttatcctcaagcaacagggcatcacctctctacagttccagtccctgaaggaaatcagcgcaggaaacatctatattactgacaacagcaacctgtgttattatcataccattaactggacaacactcttcagcacaatcaaccagagaatagtaatccgggacaacagaaaagctgaaaattgtactgctgaaggaatggtgtgcaaccatctgtgttccagtgatggctgttggggacctgggccagaccaatgtctgtcgtgtcgccgcttcagtagaggaaggatctgcatagagtcttgtaacctctatgatggtgaatttcgggagtttgagaatggctccatctgtgtggagtgtgacccccagtgtgagaagatggaagatggcctcctcacatgccatggaccgggtcctgacaactgtacaaagtgctctcattttaaagatggcccaaactgtgtggaaaaatgtccagatggcttacagggggcaaacagtttcattttcaagtatgctgatccagatcgggagtgccacccatgccatccaaactgcacccaagggtgcataggctcaagtattgaagactgcatcggcctgatggatagaactcccctgattgcagctggagtaattggtgggctcttcattctggtcattgtgggtctgacatttgctgtttatgttagaaggaagagcatcaaaaagaaaagagccttgagaagattcttggaaacagagttggtggaaccattaactcccagtggcacagcacccaatcaagctcaacttcgtattttgaaagaaactgagctgaagagggtaaaagtccttggctcaggtgcttttggaacggtttataaaggtatttgggtacctgaaggagaaactgtgaagattcctgtggctattaagattcttaatgagacaactggtcccaaggcaaatgtggagttcatggatgaagctctgatcatggcaagtatggatcatccacacctagtccggttgctgggtgtgtgtctgagcccaaccatccagctggttactcaacttatgccccatggctgcctgttggagtatgtccacgagcacaaggataacattggatcacaactgctgcttaactggtgtgtccagatagctaagggaatgatgtacctggaagaaagacgactcgttcatcgggatttggcagcccgtaatgtcttagtgaaatctccaaaccatgtgaaaatcacagattttgggctagccagactcttggaaggagatgaaaaagagtacaatgctgatggaggaaagatgccaattaaatggatggctctggagtgtatacattacaggaaattcacccatcagagtgacgtttggagctatggagttactatatgggaactgatgacctttggaggaaaaccctatgatggaattccaacgcgagaaatccctgatttattagagaaaggagaacgtttgcctcagcctcccatctgcactattgacgtttacatggtcatggtcaaatgttggatgattgatgctgacagtagacctaaatttaaggaactggctgctgagttttcaaggatggctcgagaccctcaaagatacctagttattcagggtgatgatcgtatgaagcttcccagtccaaatgacagcaagttctttcagaatctcttggatgaagaggatttggaagatatgatggatgctgaggagtacttggtccctcaggctttcaacatcccacctcccatctatacttccagagcaagaattgactcgaataggagtgaaattggacacagccctcctcctgcctacacccccatgtcaggaaaccagtttgtataccgagatggaggttttgctgctgaacaaggagtgtctgtgccctacagagccccaactagcacaattccagaagctcctgtggcacagggtgctactgctgagatttttgatgactcctgctgtaatggcaccctacgcaagccagtggcaccccatgtccaagaggacagtagcacccagaggtacagtgctgaccccaccgtgtttgccccagaacggagcccacgaggagagctggatgaggaaggttacatgactcctatgcgagacaaacccaaacaagaatacctgaatccagtggaggagaacccttttgtttctcggagaaaaaatggagaccttcaagcattggataatcccgaatatcacaatgcatccaatggtccacccaaggccgaggatgagtatgtgaatgagccactgtacctcaacacctttgccaacaccttgggaaaagctgagtacctgaagaacaacatactgtcaatgccagagaaggccaagaaagcgtttgacaaccctgactactggaaccacagcctgccacctcggagcacccttcagcacccagactacctgcaggagtacagcacaaaatatttttataaacagaatgggcggatccggcctattgtggcagagaatcctgaatacctctctgagttctccctgaagccaggcactgtgctgccgcctccaccttacagacaccggaatactgtggtgtaa

SEQ ID NO: 4423 - DNA, 569 bp, Homo sapiens
  source 1..569: mol_type = genomic DNA
atttgttctcctggttccctctctgtgagatcttcttaatctgtgtctttcaagggaaggtcattgctgctctgaaggaagctgcattttgtgtgcaggaacggagaataaactgagctctctctctgacctggaacagcagtaccgagccttgcgcaagtactatgaaaactgtgaggttgtcatgggcaacctggagataaccagcattgagcacaaccgggacctctccttcctgcggtctgttcgagaagtcacaggctacgtgttagtggctcttaatcagtttcgttacctgcctctggagaatttacgcattattcgtgggacaaaactttatgaggatcgatatgccttggcaatatttttaaactacagaaaagatggaaactttggacttcaagaacttggattaaagaacttgacagaaatcctaaatggtggagtctatgtagaccagaacaaattcctttgttatgcagacaccattcattggcaagatattgttcggaacccatggccttccaacttgactcttgtgtcaacaaatggtagttcaggatgtggac

SEQ ID NO: 4424 - DNA, 12084 bp, Homo sapiens
  source 1..12084: mol_type = genomic DNA
ggagcgagcaagcgaaggctcacgcggggaaatagctgcacagtccggcccagagcgccaagcgcacacaccgagcacactcccacacgcgcacacacgcgctcacactcgccccctcctcgggccccggccctggacccgcgggcgcggactcggtcgcccgccctgggagtcgccacaccgcgcgcgccgcgcccgcccccctcgcacccccacgcgcgcccggctgggggatctcctccgcgtgcccgaaagggggatatgccatttggacatgtaattgtcagcacgggatctgagacttccaaaaaatgaagccggcgacaggactttgggtctgggtgagccttctcgtggcggcggggaccgtccagcccagcgattctcagtcagtgtgtgcaggaacggagaataaactgagctctctctctgacctggaacagcagtaccgagccttgcgcaagtactatgaaaactgtgaggttgtcatgggcaacctggagataaccagcattgagcacaaccgggacctctccttcctgcggtctgttcgagaagtcacaggctacgtgttagtggctcttaatcagtttcgttacctgcctctggagaatttacgcattattcgtgggacaaaactttatgaggatcgatatgccttggcaatatttttaaactacagaaaagatggaaactttggacttcaagaacttggattaaagaacttgacagaaatcctaaatggtggagtctatgtagaccagaacaaattcctttgttatgcagacaccattcattggcaagatattgttcggaacccatggccttccaacttgactcttgtgtcaacaaatggtagttcaggatgtggacgttgccataagtcctgtactggccgttgctggggacccacagaaaatcattgccagactttgacaaggacggtgtgtgcagaacaatgtgacggcagatgctacggaccttacgtcagtgactgctgccatcgagaatgtgctggaggctgctcaggacctaaggacacagactgctttgcctgcatgaatttcaatgacagtggagcatgtgttactcagtgtccccaaacctttgtctacaatccaaccacctttcaactggagcacaatttcaatgcaaagtacacatatggagcattctgtgtcaagaaatgtccacataactttgtggtagattccagttcttgtgtgcgtgcctgccctagttccaagatggaagtagaagaaaatgggattaaaatgtgtaaaccttgcactgacatttgcccaaaagcttgtgatggcattggcacaggatcattgatgtcagctcagactgtggattccagtaacattgacaaattcataaactgtaccaagatcaatgggaatttgatctttctagtcactggtattcatggggacccttacaatgcaattgaagccatagacccagagaaactgaacgtctttcggacagtcagagagataacaggtttcctgaacatacagtcatggccaccaaacatgactgacttcagtgttttttctaacctggtgaccattggtggaagagtactctatagtggcctgtccttgcttatcctcaagcaacagggcatcacctctctacagttccagtccctgaaggaaatcagcgcaggaaacatctatattactgacaacagcaacctgtgttattatcataccattaactggacaacactcttcagcacaatcaaccagagaatagtaatccgggacaacagaaaagctgaaaattgtactgctgaaggaatggtgtgcaaccatctgtgttccagtgatggctgttggggacctgggccagaccaatgtctgtcgtgtcgccgcttcagtagaggaaggatctgcatagagtcttgtaacctctatgatggtgaatttcgggagtttgagaatggctccatctgtgtggagtgtgacccccagtgtgagaagatggaagatggcctcctcacatgccatggaccgggtcctgacaactgtacaaagtgctctcattttaaagatggcccaaactgtgtggaaaaatgtccagatggcttacagggggcaaacagtttcattttcaagtatgctgatccagatcgggagtgccacccatgccatccaaactgcacccaagggtgtaacggtcccactagtcatgactgcatttactacccatggacgggccattccactttaccacaacatgctagaactcccctgattgcagctggagtaattggtgggctcttcattctggtcattgtgggtctgacatttgctgtttatgttagaaggaagagcatcaaaaagaaaagagccttgagaagattcttggaaacagagttggtggaaccattaactcccagtggcacagcacccaatcaagctcaacttcgtattttgaaagaaactgagctgaagagggtaaaagtccttggctcaggtgcttttggaacggtttataaaggtatttgggtacctgaaggagaaactgtgaagattcctgtggctattaagattcttaatgagacaactggtcccaaggcaaatgtggagttcatggatgaagctctgatcatggcaagtatggatcatccacacctagtccggttgctgggtgtgtgtctgagcccaaccatccagctggttactcaacttatgccccatggctgcctgttggagtatgtccacgagcacaaggataacattggatcacaactgctgcttaactggtgtgtccagatagctaagggaatgatgtacctggaagaaagacgactcgttcatcgggatttggcagcccgtaatgtcttagtgaaatctccaaaccatgtgaaaatcacagattttgggctagccagactcttggaaggagatgaaaaagagtacaatgctgatggaggaaagatgccaattaaatggatggctctggagtgtatacattacaggaaattcacccatcagagtgacgtttggagctatggagttactatatgggaactgatgacctttggaggaaaaccctatgatggaattccaacgcgagaaatccctgatttattagagaaaggagaacgtttgcctcagcctcccatctgcactattgacgtttacatggtcatggtcaaatgttggatgattgatgctgacagtagacctaaatttaaggaactggctgctgagttttcaaggatggctcgagaccctcaaagatacctagttattcagggtgatgatcgtatgaagcttcccagtccaaatgacagcaagttctttcagaatctcttggatgaagaggatttggaagatatgatggatgctgaggagtacttggtccctcaggctttcaacatcccacctcccatctatacttccagagcaagaattgactcgaataggaaccagtttgtataccgagatggaggttttgctgctgaacaaggagtgtctgtgccctacagagccccaactagcacaattccagaagctcctgtggcacagggtgctactgctgagatttttgatgactcctgctgtaatggcaccctacgcaagccagtggcaccccatgtccaagaggacagtagcacccagaggtacagtgctgaccccaccgtgtttgccccagaacggagcccacgaggagagctggatgaggaaggttacatgactcctatgcgagacaaacccaaacaagaatacctgaatccagtggaggagaacccttttgtttctcggagaaaaaatggagaccttcaagcattggataatcccgaatatcacaatgcatccaatggtccacccaaggccgaggatgagtatgtgaatgagccactgtacctcaacacctttgccaacaccttgggaaaagctgagtacctgaagaacaacatactgtcaatgccagagaaggccaagaaagcgtttgacaaccctgactactggaaccacagcctgccacctcggagcacccttcagcacccagactacctgcaggagtacagcacaaaatatttttataaacagaatgggcggatccggcctattgtggcagagaatcctgaatacctctctgagttctccctgaagccaggcactgtgctgccgcctccaccttacagacaccggaatactgtggtgtaagctcagttgtggttttttaggtggagagacacacctgctccaatttccccacccccctctctttctctggtggtcttccttctaccccaaggccagtagttttgacacttcccagtggaagatacagagatgcaatgatagttatgtgcttacctaacttgaacattagagggaaagactgaaagagaaagataggaggaaccacaatgtttcttcatttctctgcatgggttggtcaggagaatgaaacagctagagaaggaccagaaaatgtaaggcaatgctgcctactatcaaactagctgtcactttttttctttttctttttctttctttgtttctttcttcctcttcttttttttttttttttttaaagcagatggttgaaacacccatgctatctgttcctatctgcaggaactgatgtgtgcatatttagcatccctggaaatcataataaagtttccattagaacaaaagaataacattttctataacatatgatggtgtctgaaattgagaatccagtttctttccccagcagtttctgtcctagcaagtaagaatggccaactcaactttcataatttaaaaatctccattaaagttataactagtaattatgttttcaacactttttggtttttttcattttgttttgctctgaccgattcctttatatttgctcccctatttttggctttaatttctaattgcaaagatgtttacatcaaagcttcttcacagaatttaagcaagaaatattttaatatagtgaaatggccactactttaagtatacaatctttaaaataagaaagggaggctaatatttttcatgctatcaaattatcttcaccctcatcctttacatttttcaacatttttttttctccataaatgacactacttgataggccgttggttgtctgaagagtagaagggaaactaagagacagttctctgtggttcaggaaaactactgatactttcaggggtggcccaatgagggaatccattgaactggaagaaacacactggattgggtatgtctacctggcagatactcagaaatgtagtttgcacttaagctgtaattttatttgttctttttctgaactccattttggattttgaatcaagcaatatggaagcaaccagcaaattaactaatttaagtacatttttaaaaaaagagctaagataaagactgtggaaatgccaaaccaagcaaattaggaaccttgcaacggtatccagggactatgatgagaggccagcacattatcttcatatgtcacctttgctacgcaaggaaatttgttcagttcgtatacttcgtaagaaggaatgcgagtaaggattggcttgaattccatggaatttctagtatgagactatttatatgaagtagaaggtaactctttgcacataaattggtataataaaaagaaaaacacaaacattcaaagcttagggataggtccttgggtcaaaagttgtaaataaatgtgaaacatcttctcatgcaattattttattatccaacacactaatcttttgatactttatataattccctttcttcatatactgcatccagtactagaaccatcattattatgtatcattttgaaagaatacctgatgagatgaaggatgagaacaaatgacagagatgagtctccaagtaaagggggcctcacatcaataattaggaaacttagatataagtcgcccttttctgaaaattctaccccaagtcatttagatttttaaaaaatatttctaatgttaaaatattgggaccaaattagaatcaatagtataagattaattaattagagtaaaaatatctattaaggcagagaaagtttagagaaaaaaatccaaagaaatttgtgtttcttcctattctgaacaagtaaatccatccatccatccatccaaacctcctttatctaactgtgtctactaaaagcaccatgttttgtggggaacactcagataaatggaatatcatcctcaacttcaaaattctatgatctaggagatttaattaaaatgacattttaatttttctatgcgttccaacaatcagattgcatagtctcttttgtgaatagctgtcatataatcagttgtactgtaagatatctcctttaaactcatttgggatataagttaaacatccttcaaattgttgatgttgacaaacaggataatttcaataatattattcaaacataaactggtctaggagaatattgcatcactgactaattagcctatctagagtctaacttcaccattaaaccaaaagcagatggtggtccttggccaagaatattggagacattggagttggtttttttctaagctataagaagtgaggcgagctgaaaaagtatggtagagcaggagaagggtttgtgagattccttctagtgaagttcaccctcaaacttttcaggggtaaagacacagagtgattcaggggccacaatctaatagctcagggctctcctatccattcagagaagtctctaggaaaagggatctcatatcagtacttatgaaaaattgaatataagcctccctttctaaataaatctgcatcgagtcatcacagccctctttttggatactataccttgattttttttttctgatttacaatatgcatatggtttctactgggctatagaaagcagaatcactcattttggagaaggaaaaaatgaatagttaaaacaaacttttaactgttaaggtaacagaaatgtatttagtgaatgtctctttcctcctaagaacacaagacttctacatgttgggtaatacctagagatgcatgtaggaataatccaaaatgacccaaatgctttataatagcaccactttataattcttttgaatgatttctgtagtatataattgacttcagttgtttgagtgttttttgttttatttttgtcccccctgggaaaacatatttcagcatgtataagagggagaaaaaaagtttcattccttccagagaataacttatttagtccagtagggtagaattttaaaatgtcagttaaagtcttcaaagtgcttggggggatatcagattccagaggccaattgtagcaattgaaatttgcagaatcaattatgtaaatctgagacaaattagtattaaaattacacggagtatattttttaaatcacccaactttgtagattatacctattttgggcaggtatggaaaaattttgcagttaaatgattgcctaaagaaagtggtaaacaggtgaggaaagatggcctctgatctaggatagatccagaaccacaaagcatctgcaccacaaaaggtgttagactaccaagcagctcctggttttctgcatagtattagtagcacagcttaggatgagaatcctttctccagtaacattcttaaaatagcatgaaaaacaacgcaaaactcaaatttctattaaaacacacaaactaaaatcaagtgattcttttttgtagattagggagaaggactgaatatctaatttaagagaaggaatagtgtttaagtgttatagtgtgtgagctaataccttctaaaggaaagacatggcatgaagattgtgcatacttacaatgctaaggaaaaatcaagaaaaggactgtgtgaggctctgctactagatgaagttggaaggactattaatgtgcttcttgaagtatcaaaaatgaaaagaaaattaaaattgtttaagcctgacagggaaggatgtaaatacaagtttttctagagctctctaacctttatttcaaaactggaattattcatccatctgtaattgttgataatttaactagtatatgtagttcataaggtaatagaaaaggtgatcatgaaagcatgtatataactggacagaaccacgataatgctataagatgtagatttagttaggttatcagatgttaaatgattttaatattattaaataaatcaaactagaaaactaaccacaagtataatgtaacaaagttaaatgcaggatataaaaatgtaggatggattttgcatagtaaaaagataagtttgccatttaaaattgttgtttgttgggtttagctgaaagtaggcatatatggttccacttgggaaaacttgctttaaagcattacaatgaacaattttttctcattctcttattcctttatcactttttaaatgtaaagaaaattgtatttatttatttttttaaataaacaccaccttgcagaatttaataggcaaacatgttacatatgactaagtaagggtcttcaagatgaagtaaagaaaatgtaaatgttctattaccttatgcagagacaaaaaaaaaaaggagtggtgtcatttagctagcaaacaaacaaaatacagttaattggtgatatgtcctttcttttctcactatgccctcttgcctccaaaaatgacaacaaagaatcacaatttttctgataaataaatgctaaaccaagcgtttcaaactattgcattgccattcttttggactttagttattagaatgatgattgttatagggcaaatgagaaatccatgtgcatcagcttctagttgttaaaaaaaccagataaattaacttctactgtatactgtgggcagaggatcctagagctgatcctacaacatcagcttctagttgttaaaaaaaaaaaaagaaacagataaattaacttctactgtatatactgtgggcagaggatcttactgtgcctctgtttgtgtacatggacttcggtgtgtatcagtttgaaggacagccttgccccatgtaaacatataaatgcagattggtatcgcctggttgctatttgcttaagaacaaatattatacagatgagatcaggcataattttaaaagatcattatcagtggagacctcattattactgatattacaatggggccagtttttatacttctgggtagaattaataaaatttttctgatcccagagatctgagttctctctgcagttggaaacaagaagctgttgtgggcattgtgtcgggccaggggcccttgtgtttgtgtgggcaaatatcttttagcagtgtgagctgcttttttcttttcattaaaagtctctctaaaataatagaaatttcagatactcggttcaagtctcactgattttgtagaggtccaaaaatgtaggatctgtcacttttgcaggcccctgcctcacctaattcctggccaggtgacattttgggcagaagtaaatgcttctatagtcacaagctaaaatgactctaagccccaatttcacggggggtattcacatgcttcctctggaaaatactctttgacagtcagctttgcaagtaagtgattaccttgttaggaatcaaagaaaaatgtatttctctctgacctttagaggaaaatagaatccttcccttttttgcccattgacacaactggcactgctctcttccctttctaccaccctggttcaaagtagtcccccgatgctgtcctgttcctttcttaagccatagtggatctctgagatcctacaccccactttgtgaaacactgacttcatctttgccctcgaatgcctgattttttcataagagattctagcaatttggacactgtttaagtgaactatcaaactaccgcatagagaatatttaagctattaaaattatggtttcccatgaagatcaattctctgtgtccttccctataggaatttgagacgagttagccctgtgatgaatcttgaaactcacatatgtccacatacacttggtagaacttcgatttaatctttacataaaagctgtacatataaccaagaagttatttttgccagtaaattaacttatttgctttattcatcttatttggttcctaatcgtaaatattttgtagctgctgtaaatttttttctcccaaatgaggagtcttattatcataaaggtaaaggctattcagctttgataaccacctgcaattcttttttggatcattcatccatctaacaaatacataatgaggacagttcatgttaatgaaaatccatgttgtttaatagaatgccatcctttacctacttttgctctttatggacgtttttcttttcatgctctagtgagctttccctatatcatgagaagtggttatatttgtgcaaatatacaaatataggaaaacaaagattcatacctgtaggcaatagtctaacttgtccaaaccactttgcctttactgctatttttatccccaatgcgtagatatttcccccaggcctatagcctttgtgaaggaaagcaaatcatacctcctgtatattgacacgaatctggttttcaaatgtcatttccagattttttagttaattgggggttgtccttttcccttaatgtgagagtcattttcctgtatatttctggatctctcaggggctgggaggggggagtgaggggactacaaccatagcactccaagaacccttttgggattactccagtaatcaactacgaaagttattttctaaatgtagatatgtaaggtgttcttttaaagtaaggtactttgaaatatgtagcataaactggtactgctgttaaatgggtcgattattaaacggagcagctgtgtgagggcagctaactttgaatgcctgtctccctggctggtgtgtctccttctcatgttgagagcaccagggattgcgtggctgcatgctgaaaccgcattttcccatggtgtatgactagttcatctctttcttgagcaccattacaagaagatcaaatgaaaatgagatcaatgtggaagacaattcatagcacaaaaaaagtcatcttaaatctactctcaaacattcatcttatacatgcatcaaagtaatttactgacatcagtttgggtgagagagggagtcactttactgaaaaggcagaggcttaaggtgtatacatttgtactcacttccttattttcttaacttgtaagcagaaaacaagccctctctcttgtgaagtatcttcaaaggattggggtgcaaaaataccttgctggtaagccatcaatgttttatttaaatccctgcattcaaagttagctgcctttttgaaataaacaaacaaaaaatactactgtatgtttgaaaatgtgaatagtatttttatagcttgttaaagacatggctagttgcatttgtaaataagtataatgttgctttgattttcttttgtggacatctttatttggaacataattgtctttagggttgatttgtatataagtaattggcctgtgattgtttcttttttggttggaagttatcattttgacattacttgtgattctgtgttcagcactattgtgatgtgttcaacctctgcactcgcttacacaataggatatgccaattgtgtgtggtgtaatgttattttgatttttttccatgttattgatgaaggatcatgcacctaacacatactaacttttttaatgttaggcatatttttagtatactttctcttattctttcttctcctccaaccttttacccatcctccttcctttccctcattcctgttgttatttgagaatgagggagaaacagtattttacatttatgtaattaggcttttccgttagttctcaaggatcctcttttggctcttgggaaagaattgtacctgtacaaggcaattatagaatgcgaactgctttgcctcattccatactgatcatcccagctgaacaatttgaaaactgttctgcctttttgttacatgaatctgtcagaaatatatttttaatttaatataaatgaaattcaataaaatatgaaacaaa

SEQ ID NO: 4425 - DNA, 5919 bp, Homo sapiens
  source 1..5919: mol_type = genomic DNA
attacccttccctggatctgggggctttcggaatctcgacctccccttggcctatctcctgcagaaaaattagggtgagccccatcctcgatctgctccgccaagttgcgggaccgcggggcgtggcacgctcggggcaggcggtccgaggctccgcaatccctactccagcctcgcgcgggagggggcgcggccgtgactcacccccttccctctgcgttcctccctccctctctctctctctctcacacacacacacccctcccctgccatccctccccggactccggctccggctccgattgcaatttgcaacctccgctgccgtcgccgcagcagccaccaattcgccagcggttcaggtggctcttgcctcgatgtcctagcctaggggcccccgggccggacttggctgggctcccttcaccctctgcggagtcatgagggcgaacgacgctctgcaggtgctgggcttgcttttcagcctggcccggggctccgaggtgggcaactctcaggcagtgtgtcctgggactctgaatggcctgagtgtgaccggcgatgctgagaaccaataccagacactgtacaagctctacgagaggtgtgaggtggtgatggggaaccttgagattgtgctcacgggacacaatgccgacctctccttcctgcagtggattcgagaagtgacaggctatgtcctcgtggccatgaatgaattctctactctaccattgcccaacctccgcgtggtgcgagggacccaggtctacgatgggaagtttgccatcttcgtcatgttgaactataacaccaactccagccacgctctgcgccagctccgcttgactcagctcaccgagattctgtcagggggtgtttatattgagaagaacgataagctttgtcacatggacacaattgactggagggacatcgtgagggaccgagatgctgagatagtggtgaaggacaatggcagaagctgtcccccctgtcatgaggtttgcaaggggcgatgctggggtcctggatcagaagactgccagacattgaccaagaccatctgtgctcctcagtgtaatggtcactgctttgggcccaaccccaaccagtgctgccatgatgagtgtgccgggggctgctcaggccctcaggacacagactgctttgcctgccggcacttcaatgacagtggagcctgtgtacctcgctgtccacagcctcttgtctacaacaagctaactttccagctggaacccaatccccacaccaagtatcagtatggaggagtttgtgtagccagctgtccccataactttgtggtggatcaaacatcctgtgtcagggcctgtcctcctgacaagatggaagtagataaaaatgggctcaagatgtgtgagccttgtgggggactatgtcccaaagcctgtgagggaacaggctctgggagccgcttccagactgtggactcgagcaacattgatggatttgtgaactgcaccaagatcctgggcaacctggactttctgatcaccggcctcaatggagacccctggcacaagatccctgccctggacccagagaagctcaatgtcttccggacagtacgggagatcacaggttacctgaacatccagtcctggccgccccacatgcacaacttcagtgttttttccaatttgacaaccattggaggcagaagcctctacaaccggggcttctcattgttgatcatgaagaacttgaatgtcacatctctgggcttccgatccctgaaggaaattagtgctgggcgtatctatataagtgccaataggcagctctgctaccaccactctttgaactggaccaaggtgcttcgggggcctacggaagagcgactagacatcaagcataatcggccgcgcagagactgcgtggcagagggcaaagtgtgtgacccactgtgctcctctgggggatgctggggcccaggccctggtcagtgcttgtcctgtcgaaattatagccgaggaggtgtctgtgtgacccactgcaactttctgaatggggagcctcgagaatttgcccatgaggccgaatgcttctcctgccacccggaatgccaacccatggagggcactgccacatgcaatggctcgggctctgatacttgtgctcaatgtgcccattttcgagatgggccccactgtgtgagcagctgcccccatggagtcctaggtgccaagggcccaatctacaagtacccagatgttcagaatgaatgtcggccctgccatgagaactgcacccaggggtgtaaaggaccagagcttcaagactgtttaggacaaacactggtgctgatcggcaaaacccatctgacaatggctttgacagtgatagcaggattggtagtgattttcatgatgctgggcggcacttttctctactggcgtgggcgccggattcagaataaaagggctatgaggcgatacttggaacggggtgagagcatagagcctctggaccccagtgagaaggctaacaaagtcttggccagaatcttcaaagagacagagctaaggaagcttaaagtgcttggctcgggtgtctttggaactgtgcacaaaggagtgtggatccctgagggtgaatcaatcaagattccagtctgcattaaagtcattgaggacaagagtggacggcagagttttcaagctgtgacagatcatatgctggccattggcagcctggaccatgcccacattgtaaggctgctgggactatgcccagggtcatctctgcagcttgtcactcaatatttgcctctgggttctctgctggatcatgtgagacaacaccggggggcactggggccacagctgctgctcaactggggagtacaaattgccaagggaatgtactaccttgaggaacatggtatggtgcatagaaacctggctgcccgaaacgtgctactcaagtcacccagtcaggttcaggtggcagattttggtgtggctgacctgctgcctcctgatgataagcagctgctatacagtgaggccaagactccaattaagtggatggcccttgagagtatccactttgggaaatacacacaccagagtgatgtctggagctatggtgtgacagtttgggagttgatgaccttcggggcagagccctatgcagggctacgattggctgaagtaccagacctgctagagaagggggagcggttggcacagccccagatctgcacaattgatgtctacatggtgatggtcaagtgttggatgattgatgagaacattcgcccaacctttaaagaactagccaatgagttcaccaggatggcccgagacccaccacggtatctggtcataaagagagagagtgggcctggaatagcccctgggccagagccccatggtctgacaaacaagaagctagaggaagtagagctggagccagaactagacctagacctagacttggaagcagaggaggacaacctggcaaccaccacactgggctccgccctcagcctaccagttggaacacttaatcggccacgtgggagccagagccttttaagtccatcatctggatacatgcccatgaaccagggtaatcttggggagtcttgccaggagtctgcagtttctgggagcagtgaacggtgcccccgtccagtctctctacacccaatgccacggggatgcctggcatcagagtcatcagaggggcatgtaacaggctctgaggctgagctccaggagaaagtgtcaatgtgtaggagccggagcaggagccggagcccacggccacgcggagatagcgcctaccattcccagcgccacagtctgctgactcctgttaccccactctccccacccgggttagaggaagaggatgtcaacggttatgtcatgccagatacacacctcaaaggtactccctcctcccgggaaggcaccctttcttcagtgggtctcagttctgtcctgggtactgaagaagaagatgaagatgaggagtatgaatacatgaaccggaggagaaggcacagtccacctcatccccctaggccaagttcccttgaggagctgggttatgagtacatggatgtggggtcagacctcagtgcctctctgggcagcacacagagttgcccactccaccctgtacccatcatgcccactgcaggcacaactccagatgaagactatgaatatatgaatcggcaacgagatggaggtggtcctgggggtgattatgcagccatgggggcctgcccagcatctgagcaagggtatgaagagatgagagcttttcaggggcctggacatcaggccccccatgtccattatgcccgcctaaaaactctacgtagcttagaggctacagactctgcctttgataaccctgattactggcatagcaggcttttccccaaggctaatgcccagagaacgtaactcctgctccctgtggcactcagggagcatttaatggcagctagtgcctttagagggtaccgtcttctccctattccctctctctcccaggtcccagccccttttccccagtcccagacaattccattcaatctttggaggcttttaaacattttgacacaaaattcttatggtatgtagccagctgtgcactttcttctctttcccaaccccaggaaaggttttccttattttgtgtgctttcccagtcccattcctcagcttcttcacaggcactcctggagatatgaaggattactctccatatcccttcctctcaggctcttgactacttggaactaggctcttatgtgtgcctttgtttcccatcagactgtcaagaagaggaaagggaggaaacctagcagaggaaagtgtaattttggtttatgactcttaaccccctagaaagacagaagcttaaaatctgtgaagaaagaggttaggagtagatattgattactatcataattcagcacttaactatgagccaggcatcatactaaacttcacctacattatctcacttagtcctttatcatccttaaaacaattctgtgacatacatattatctcattttacacaaagggaagtcgggcatggtggctcatgcctgtaatctcagcactttgggaggctgaggcagaaggattacctgaggcaaggagtttgagaccagcttagccaacatagtaagacccccatctctttaaaaaaaaaaaaaaaaaaaaaaaaaaaactttagaactgggtgcagtggctcatgcctgtaatcccagccagcactttgggaggctgagatgggaagatcacttgagcccagaattagagataagcctatggaaacatagcaagacactgtctctacaggggaaaaaaaaaaaagaaactgagccttaaagagatgaaataaattaagcagtagatccaggatgcaaaatcctcccaattcctgtgcatgtgctcttattgtaaggtgccaagaaaaactgatttaagttacagcccttgtttaaggggcactgtttcttgtttttgcactgaatcaagtctaaccccaacagccacatcctcctatacctagacatctcatctcaggaagtggtggtgggggtagtcagaaggaaaaataactggacatctttgtgtaaaccataatccacatgtgccgtaaatgatcttcactccttatccgagggcaaattcacaaggatccccaagatccacttttagaagccattctcatccagcagtgagaagcttccaggtaggacagaaaaaagatccagcttcagctgcacacctctgtccccttggatggggaactaagggaaaacgtctgttgtatcactgaagttttttgttttgtttttatacgtgtctgaataaaaatgccaaagttttttttca

SEQ ID NO: 4426 - DNA, 1186 bp, Homo sapiens
  source 1..1186: mol_type = genomic DNA
acacacacacacccctcccctgccatccctccccggactccggctccggctccgattgcaatttgcaacctccgctgccgtcgccgcagcagccaccaattcgccagcggttcaggtggctcttgcctcgatgtcctagcctaggggcccccgggccggacttggctgggctcccttcaccctctgcggagtcatgagggcgaacgacgctctgcaggtgctgggcttgcttttcagcctggcccggggctccgaggtgggcaactctcaggcagtgtgtcctgggactctgaatggcctgagtgtgaccggcgatgctgagaaccaataccagacactgtacaagctctacgagaggtgtgaggtggtgatggggaaccttgagattgtgctcacgggacacaatgccgacctctccttcctgcagtggattcgagaagtgacaggctatgtcctcgtggccatgaatgaattctctactctaccattgcccaacctccgcgtggtgcgagggacccaggtctacgatgggaagtttgccatcttcgtcatgttgaactataacaccaactccagccacgctctgcgccagctccgcttgactcagctcaccgagattctgtcagggggtgtttatattgagaagaacgataagctttgtcacatggacacaattgactggagggacatcgtgagggaccgagatgctgagatagtggtgaaggacaatggcagaagctgtcccccctgtcatgaggtttgcaaggggcgatgctggggtcctggatcagaagactgccagacattgaccaagaccatctgtgctcctcagtgtaatggtcactgctttgggcccaaccccaaccagtgctgccatgatgagtgtgccgggggctgctcaggccctcaggacacagactgctttgcctgccggcacttcaatgacagtggagcctgtgtacctcgctgtccacagcctcttgtctacaacaagctaactttccagctggaacccaatccccacaccaagtatcagtatggaggagtttgtgtagccagctgtccccataactttgtggtggatcaaacatcctgtgtcagggcctgtcctcctgacaagatggaagtagataaaaatgggctcaagatgtgtgagccttgtgggggactatgtcccaaagttttc

SEQ ID NO: 4427 - DNA, 1020 bp, Homo sapiens
  source 1..1020: mol_type = genomic DNA
tccccggactccggctccggctccgattgcaatttgcaacctccgctgccgtcgccgcagcagccaccaattcgccagcggttcaggtggctcttgcctcgatgtcctagcctaggggcccccgggccggacttggctgggctcccttcaccctctgcggagtcatgagggcgaacgacgctctgcaggtgctgggcttgcttttcagcctggcccggggctccgaggtgggcaactctcaggcagtgtgtcctgggactctgaatggcctgagtgtgaccggcgatgctgagaaccaataccagacactgtacaagctctacgagaggtgtgaggtggtgatggggaaccttgagattgtgctcacgggacacaatgccgacctctccttcctgcagtggattcgagaagtgacaggctatgtcctcgtggccatgaatgaattctctactctaccattgcccaacctccgcgtggtgcgagggacccaggtctacgatgggaagtttgccatcttcgtcatgttgaactataacaccaactccagccacgctctgcgccagctccgcttgactcagctcaccggtcagttcccgatggttccttctggcctcacccctcagccagcccaagactggtacctccttgatgatgacccaagactgctcactctaagtgcctcttccaaggtgcctgtcaccttggccgctgtctaaaggtccattgctccctaagcaatagagggcccccagtagggggagctaggggcatctgctccagggaaaggaaccctgtgtccttgtggggctggagtcagagctggatctgttaaccgtttttctaatttcaaagtacagtgtaccggaggccaggcctgatggcttacacctgtaatcccagcattttgggaggccaaggagggcagatcacttgagatcaggagtttgagaccagcctggccaacatggcgaaaccctgtctctactaaaaatacaaaaaaataaaataaaataaaaaatt

SEQ ID NO: 4428 - DNA, 4353 bp, Homo sapiens
  source 1..4353: mol_type = genomic DNA
atttattccaggacctagagagaggcaggatgagggtagagaattaaccccttagtacccaaaagaagcacagaggggtcccaggttgaaaaaggaaatcttttcaccttcccattcatggaatgtgtgtcctgggactctgaatggcctgagtgtgaccggcgatgctgagaaccaataccagacactgtacaagctctacgagaggtgtgaggtggtgatggggaaccttgagattgtgctcacgggacacaatgccgacctctccttcctgcagtggattcgagaagtgacaggctatgtcctcgtggccatgaatgaattctctactctaccattgcccaacctccgcgtggtgcgagggacccaggtctacgatgggaagtttgccatcttcgtcatgttgaactataacaccaactccagccacgctctgcgccagctccgcttgactcagctcaccgagattctgtcagggggtgtttatattgagaagaacgataagctttgtcacatggacacaattgactggagggacatcgtgagggaccgagatgctgagatagtggtgaaggacaatggcagaagctgtcccccctgtcatgaggtttgcaaggggcgatgctggggtcctggatcagaagactgccagacattgaccaagaccatctgtgctcctcagtgtaatggtcactgctttgggcccaaccccaaccagtgctgccatgatgagtgtgccgggggctgctcaggccctcaggacacagactgctttgcctgccggcacttcaatgacagtggagcctgtgtacctcgctgtccacagcctcttgtctacaacaagctaactttccagctggaacccaatccccacaccaagtatcagtatggaggagtttgtgtagccagctgtccccataactttgtggtggatcaaacatcctgtgtcagggcctgtcctcctgacaagatggaagtagataaaaatgggctcaagatgtgtgagccttgtgggggactatgtcccaaagcctgtgagggaacaggctctgggagccgcttccagactgtggactcgagcaacattgatggatttgtgaactgcaccaagatcctgggcaacctggactttctgatcaccggcctcaatggagacccctggcacaagatccctgccctggacccagagaagctcaatgtcttccggacagtacgggagatcacaggttacctgaacatccagtcctggccgccccacatgcacaacttcagtgttttttccaatttgacaaccattggaggcagaagcctctacaaccggggcttctcattgttgatcatgaagaacttgaatgtcacatctctgggcttccgatccctgaaggaaattagtgctgggcgtatctatataagtgccaataggcagctctgctaccaccactctttgaactggaccaaggtgcttcgggggcctacggaagagcgactagacatcaagcataatcggccgcgcagagactgcgtggcagagggcaaagtgtgtgacccactgtgctcctctgggggatgctggggcccaggccctggtcagtgcttgtcctgtcgaaattatagccgaggaggtgtctgtgtgacccactgcaactttctgaatggggagcctcgagaatttgcccatgaggccgaatgcttctcctgccacccggaatgccaacccatggagggcactgccacatgcaatggctcgggctctgatacttgtgctcaatgtgcccattttcgagatgggccccactgtgtgagcagctgcccccatggagtcctaggtgccaagggcccaatctacaagtacccagatgttcagaatgaatgtcggccctgccatgagaactgcacccaggggtgtaaaggaccagagcttcaagactgtttaggacaaacactggtgctgatcggcaaaacccatctgacaatggctttgacagtgatagcaggattggtagtgattttcatgatgctgggcggcacttttctctactggcgtgggcgccggattcagaataaaagggctatgaggcgatacttggaacggggtgagagcatagagcctctggaccccagtgagaaggctaacaaagtcttggccagaatcttcaaagagacagagctaaggaagcttaaagtgcttggctcgggtgtctttggaactgtgcacaaaggagtgtggatccctgagggtgaatcaatcaagattccagtctgcattaaagtcattgaggacaagagtggacggcagagttttcaagctgtgacagatcatatgctggccattggcagcctggaccatgcccacattgtaaggctgctgggactatgcccagggtcatctctgcagcttgtcactcaatatttgcctctgggttctctgctggatcatgtgagacaacaccggggggcactggggccacagctgctgctcaactggggagtacaaattgccaagggaatgtactaccttgaggaacatggtatggtgcatagaaacctggctgcccgaaacgtgctactcaagtcacccagtcaggttcaggtggcagattttggtgtggctgacctgctgcctcctgatgataagcagctgctatacagtgaggccaagactccaattaagtggatggcccttgagagtatccactttgggaaatacacacaccagagtgatgtctggagctatggtgtgacagtttgggagttgatgaccttcggggcagagccctatgcagggctacgattggctgaagtaccagacctgctagagaagggggagcggttggcacagccccagatctgcacaattgatgtctacatggtgatggtcaagtgttggatgattgatgagaacattcgcccaacctttaaagaactagccaatgagttcaccaggatggcccgagacccaccacggtatctggtcataaagagagagagtgggcctggaatagcccctgggccagagccccatggtctgacaaacaagaagctagaggaagtagagctggagccagaactagacctagacctagacttggaagcagaggaggacaacctggcaaccaccacactgggctccgccctcagcctaccagttggaacacttaatcggccacgtgggagccagagccttttaagtccatcatctggatacatgcccatgaaccagggtaatcttggggagtcttgccaggagtctgcagtttctgggagcagtgaacggtgcccccgtccagtctctctacacccaatgccacggggatgcctggcatcagagtcatcagaggggcatgtaacaggctctgaggctgagctccaggagaaagtgtcaatgtgtaggagccggagcaggagccggagcccacggccacgcggagatagcgcctaccattcccagcgccacagtctgctgactcctgttaccccactctccccacccgggttagaggaagaggatgtcaacggttatgtcatgccagatacacacctcaaaggtactccctcctcccgggaaggcaccctttcttcagtgggtctcagttctgtcctgggtactgaagaagaagatgaagatgaggagtatgaatacatgaaccggaggagaaggcacagtccacctcatccccctaggccaagttcccttgaggagctgggttatgagtacatggatgtggggtcagacctcagtgcctctctgggcagcacacagagttgcccactccaccctgtacccatcatgcccactgcaggcacaactccagatgaagactatgaatatatgaatcggcaacgagatggaggtggtcctgggggtgattatgcagccatgggggcctgcccagcatctgagcaagggtatgaagagatgagagcttttcaggggcctggacatcaggccccccatgtccattatgcccgcctaaaaactctacgtagcttagaggctacagactctgcctttgataaccctgattactggcatagcaggcttttccccaaggctaatgcccagagaacgtaactcctgctccctgtggcactcagggagcatttaatggcagctagtgcctttagagggtaccgtcttctccctattccctctctctcccaggtcccagccccttttccccagtcccagacaattccattcaatctttggaggcttttaaacattttgacacaaaattcttatggtatgtagccagctgtgcactttcttctctttcccaaccccaggaaaggttttccttattttgtgtgctttcccagtcccattcctcagcttcttcacaggcactcctg

SEQ ID NO: 4429 - DNA, 2723 bp, Homo sapiens
  source 1..2723: mol_type = genomic DNA
aatttgcaacctccgctgccgtcgccgcagcagccaccaattcgccagcggttcaggtggctcttgcctcgatgtcctagcctaggggcccccgggccggacttggctgggctcccttcaccctctgcggagtcatgagggcgaacgacgctctgcaggtgccaagggcccaatctacaagtacccagatgttcagaatgaatgtcggccctgccatgagaactgcacccaggggtgtaaaggaccagagcttcaagactgtttaggacaaacactggtgctgatcggcaaaacccatctgacaatggctttgacagtgatagcaggattggtagtgattttcatgatgctgggcggcacttttctctactggcgtgggcgccggattcagaataaaagggctatgaggcgatacttggaacggggtgagagcatagagcctctggaccccagtgagaaggctaacaaagtcttggccagaatcttcaaagagacagagctaaggaagcttaaagtgcttggctcgggtgtctttggaactgtgcacaaaggagtgtggatccctgagggtgaatcaatcaagattccagtctgcattaaagtcattgaggacaagagtggacggcagagttttcaagctgtgacagatcatatgctggccattggcagcctggaccatgcccacattgtaaggctgctgggactatgcccagggtcatctctgcagcttgtcactcaatatttgcctctgggttctctgctggatcatgtgagacaacaccggggggcactggggccacagctgctgctcaactggggagtacaaattgccaagggaatgtactaccttgaggaacatggtatggtgcatagaaacctggctgcccgaaacgtgctactcaagtcacccagtcaggttcaggtggcagattttggtgtggctgacctgctgcctcctgatgataagcagctgctatacagtgaggccaagactccaattaagtggatggcccttgagagtatccactttgggaaatacacacaccagagtgatgtctggagctatggtgtgacagtttgggagttgatgaccttcggggcagagccctatgcagggctacgattggctgaagtaccagacctgctagagaagggggagcggttggcacagccccagatctgcacaattgatgtctacatggtgatggtcaagtgttggatgattgatgagaacattcgcccaacctttaaagaactagccaatgagttcaccaggatggcccgagacccaccacggtatctggtcataaagagagagagtgggcctggaatagcccctgggccagagccccatggtctgacaaacaagaagctagaggaagtagagctggagccagaactagacctagacctagacttggaagcagaggaggacaacctggcaaccaccacactgggctccgccctcagcctaccagttggaacacttaatcggccacgtgggagccagagccttttaagtccatcatctggatacatgcccatgaaccagggtaatcttggggagtcttgccaggagtctgcagtttctgggagcagtgaacggtgcccccgtccagtctctctacacccaatgccacggggatgcctggcatcagagtcatcagaggggcatgtaacaggctctgaggctgagctccaggagaaagtgtcaatgtgtaggagccggagcaggagccggagcccacggccacgcggagatagcgcctaccattcccagcgccacagtctgctgactcctgttaccccactctccccacccgggttagaggaagaggatgtcaacggttatgtcatgccagatacacacctcaaaggtactccctcctcccgggaaggcaccctttcttcagtgggtctcagttctgtcctgggtactgaagaagaagatgaagatgaggagtatgaatacatgaaccggaggagaaggcacagtccacctcatccccctaggccaagttcccttgaggagctgggttatgagtacatggatgtggggtcagacctcagtgcctctctgggcagcacacagagttgcccactccaccctgtacccatcatgcccactgcaggcacaactccagatgaagactatgaatatatgaatcggcaacgagatggaggtggtcctgggggtgattatgcagccatgggggcctgcccagcatctgagcaagggtatgaagagatgagagcttttcaggggcctggacatcaggccccccatgtccattatgcccgcctaaaaactctacgtagcttagaggctacagactctgcctttgataaccctgattactggcatagcaggcttttccccaaggctaatgcccagagaacgtaactcctgctccctgtggcactcagggagcatttaatggcagctagtgcctttagagggtaccgtcttctccctattccctctctctcccaggtcccagccccttttccccagtcccagacaattccattcaatctttggaggcttttaaacattttgacacaaaattcttatggtatgtagccagctgtgcactttcttctctttcccaaccccaggaaaggttttccttattttgtgtgctttcccagtcccattcctcagcttcttcacaggcactcctggagatatgaaggattactctccatatcccttcctctca

SEQ ID NO: 4430 - DNA, 561 bp, Homo sapiens
  source 1..561: mol_type = genomic DNA
attcattacccttccctggatctgggggctttcggaatctcgacctccccttggcctatctcctgcagaaaaattaggcagccaccaattcgccagcggttcaggtggctcttgcctcgatgtcctagcctaggggcccccgggccggacttggctgggctcccttcaccctctgcggagtcatgagggcgaacgacgctctgcaggtgctgggcttgcttttcagcctggcccggggctccgaggtgggcaactctcaggcagtgtgtcctgggactctgaatggcctgagtgtgaccggcgatgctgagaaccaataccagacactgtacaagctctacgagaggtgtgaggtggtgatggggaaccttgagattgtgctcacgggacacaatgccgacctctccttcctgcagtggattcgagaagtgacaggctatgtcctcgtggccatgaatgaattctctactctaccattgcccaacctccgcgtggtgcgagggacccaggtctacgatgggaagtttgccatcttcgtcatgttgaactataacaccaact

SEQ ID NO: 4431 - DNA, 4382 bp, Homo sapiens
  source 1..4382: mol_type = genomic DNA
atttgcaacctccgctgccgtcgccgcagcagccaccaattcgccagcggttcaggtggctcttgcctcgatgtcctagcctaggggcccccgggccggacttggctgggctcccttcaccctctgcggagtcatgagggcgaacgacgctctgcaggtgctgggcttgcttttcagcctggcccggggctccgaggtgggcaactctcaggcagtgtgtcctgggactctgaatggcctgagtgtgaccggcgatgctgagaaccaataccagacactgtacaagctctacgagaggtgtgaggtggtgatggggaaccttgagattgtgctcacgggacacaatgccgacctctccttcctgcagtggattcgagaagtgacaggctatgtcctcgtggccatgaatgaattctctactctaccattgcccaacctccgcgtggtgcgagggacccaggtctacgatgggaagtttgccatcttcgtcatgttgaactataacaccaactccagccacgctctgcgccagctccgcttgactcagctcaccgagattctgtcagggggtgtttatattgagaagaacgataagctttgtcacatggacacaattgactggagggacatcgtgagggaccgagatgctgagatagtggtgaaggacaatggcagaagctgtcccccctgtcatgaggtttgcaaggggcgatgctggggtcctggatcagaagactgccagacattgaccaagaccatctgtgctcctcagtgtaatggtcactgctttgggcccaaccccaaccagtgctgccatgatgagtgtgccgggggctgctcaggccctcaggacacagactgctttgcctgccggcacttcaatgacagtggagcctgtgtacctcgctgtccacagcctcttgtctacaacaagctaactttccagctggaacccaatccccacaccaagtatcagtatggaggagtttgtgtagccagctgtccccataactttgtggtggatcaaacatcctgtgtcagggcctgtcctcctgacaagatggaagtagataaaaatgggctcaagatgtgtgagccttgtgggggactatgtcccaaagcctgtgagggaacaggctctgggagccgcttccagactgtggactcgagcaacattgatggatttgtgaactgcaccaagatcctgggcaacctggactttctgatcaccggcctcaatggagacccctggcacaagatccctgccctggacccagagaagctcaatgtcttccggacagtacgggagatcacaggttacctgaacatccagtcctggccgccccacatgcacaacttcagtgttttttccaatttgacaaccattggaggcagaagcctctacaaccggggcttctcattgttgatcatgaagaacttgaatgtcacatctctgggcttccgatccctgaaggaaattagtgctgggcgtatctatataagtgccaataggcagctctgctaccaccactctttgaactggaccaaggtgcttcgggggcctacggaagagcgactagacatcaagcataatcggccgcgcagagactgcgtggcagagggcaaagtgtgtgacccactgtgctcctctgggggatgctggggcccaggccctggtcagtgcttgtcctgtcgaaattatagccgaggaggtgtctgtgtgacccactgcaactttctgaatggggagcctcgagaatttgcccatgaggccgaatgcttctcctgccacccggaatgccaacccatggagggcactgccacatgcaatggctcgggctctgatacttgtgctcaatgtgcccattttcgagatgggccccactgtgtgagcagctgcccccatggagtcctaggtgccaagggcccaatctacaagtacccagatgttcagaatgaatgtcggccctgccatgagaactgcacccaggggtgtaaaggaccagagcttcaagactgtttaggacaaacactggtgctgatcggcaaaacccatctgacaatggctttgacagtgatagcaggattggtagtgattttcatgatgctgggcggcacttttctctactggcgtgggcgccggattcagaataaaagggctatgaggcgatacttggaacggggtgagagcatagagcctctggaccccagtgagaaggctaacaaagtcttggccagaatcttcaaagagacagagctaaggaagcttaaagtgcttggctcgggtgtctttggaactgtgcacaaaggagtgtggatccctgagggtgaatcaatcaagattccagtctgcattaaagtcattgaggacaagagtggacggcagagttttcaagctgtgacagatcatatgctggccattggcagcctggaccatgcccacattgtaaggctgctgggactatgcccagggtcatctctgcagcttgtcactcaatatttgcctctgggttctctgctggatcatgtgagacaacaccggggggcactggggccacagctgctgctcaactggggagtacaaattgccaagggaatgtactaccttgaggaacatggtatggtgcatagaaacctggctgcccgaaacgtgctactcaagtcacccagtcaggttcaggtggcagattttggtgtggctgacctgctgcctcctgatgataagcagctgctatacagtgaggccaagactccaattaagtggatggcccttgagagtatccactttgggaaatacacacaccagagtgatgtctggagctatggtcagtgcatctggatgccctctctaccatcactggccccagtttcaaatttaccttttgagaccccctcttagaatctctaagcacttcagatttttgtgttagatcaggttctgccttcccttcacttcatgcccatgtctactattttgccagtgactagtccatgtcttcctgcaacaggtgtgacagtttgggagttgatgaccttcggggcagagccctatgcagggctacgattggctgaagtaccagacctgctagagaagggggagcggttggcacagccccagatctgcacaattgatgtctacatggtgatggtcaagtgttggatgattgatgagaacattcgcccaacctttaaagaactagccaatgagttcaccaggatggcccgagacccaccacggtatctggtcataaagagagagagtgggcctggaatagcccctgggccagagccccatggtctgacaaacaagaagctagaggaagtagagctggagccagaactagacctagacctagacttggaagcagaggaggacaacctggcaaccaccacactgggctccgccctcagcctaccagttggaacacttaatcggccacgtgggagccagagccttttaagtccatcatctggatacatgcccatgaaccagggtaatcttggggagtcttgccaggagtctgcagtttctgggagcagtgaacggtgcccccgtccagtctctctacacccaatgccacggggatgcctggcatcagagtcatcagaggggcatgtaacaggctctgaggctgagctccaggagaaagtgtcaatgtgtaggagccggagcaggagccggagcccacggccacgcggagatagcgcctaccattcccagcgccacagtctgctgactcctgttaccccactctccccacccgggttagaggaagaggatgtcaacggttatgtcatgccagatacacacctcaaaggtactccctcctcccgggaaggcaccctttcttcagtgggtctcagttctgtcctgggtactgaagaagaagatgaagatgaggagtatgaatacatgaaccggaggagaaggcacagtccacctcatccccctaggccaagttcccttgaggagctgggttatgagtacatggatgtggggtcagacctcagtgcctctctgggcagcacacagagttgcccactccaccctgtacccatcatgcccactgcaggcacaactccagatgaagactatgaatatatgaatcggcaacgagatggaggtggtcctgggggtgattatgcagccatgggggcctgcccagcatctgagcaagggtatgaagagatgagagcttttcaggggcctggacatcaggccccccatgtccattatgcccgcctaaaaactctacgtagcttagaggctacagactctgcctttgataaccctgattactggcatagcaggcttttccccaaggctaatgcccagagaacgtaactcctgctccctgtggcactcagggagcatttaatgg

SEQ ID NO: 4432 - DNA, 12625 bp, Homo sapiens
  source 1..12625: mol_type = genomic DNA
gctgtccccaagccgattggtacttcttgtcaggaagaaacgccaagaggtgggagtgcctggggagggaggcaggcggtccctaccgcaggcgcggggagctgcctttccgcccctccgcctgctttccaagcctggactcttaggagtggctgaagctgcggagcgcttttggagcctgtgaatgaaccctcctcctctccctcctccttcttctcgctgagtctcctcctcggctctgacggtacagtgatataatgatgatgggtgtcacaacccgcatttgaacttgcaggcgagctgccccgagcctttctggggaagaactccaggcgtgcggacgcaacagccgagaacattaggtgttgtggacaggagctgggaccaagatcttcggccagccccgcatcctcccgcatcttccagcaccgtcccgcaccctccgcatccttccccgggccaccacgcttcctatgtgacccgcctgggcaacgccgaacccagtcgcgcagcgctgcagtgaattttccccccaaactgcaataagccgccttccaaggccaagatgttcataaatataaagagcatcttatggatgtgttcaaccttaatagtaacccatgcgctacataaagtcaaagtgggaaaaagcccaccggtgaggggctccctctctggaaaagtcagcctaccttgtcatttttcaacgatgcctactttgccacccagttacaacaccagtgaatttctccgcatcaaatggtctaagattgaagtggacaaaaatggaaaagatttgaaagagactactgtccttgtggcccaaaatggaaatatcaagattggtcaggactacaaagggagagtgtctgtgcccacacatcccgaggctgtgggcgatgcctccctcactgtggtcaagctgctggcaagtgatgcgggtctttaccgctgtgacgtcatgtacgggattgaagacacacaagacacggtgtcactgactgtggatggggttgtgtttcactacagggcggcaaccagcaggtacacactgaattttgaggctgctcagaaggcttgtttggacgttggggcagtcatagcaactccagagcagctctttgctgcctatgaagatggatttgagcagtgtgacgcaggctggctggctgatcagactgtcagatatcccatccgggctcccagagtaggctgttatggagataagatgggaaaggcaggagtcaggacttatggattccgttctccccaggaaacttacgatgtgtattgttatgtggatcatctggatggtgatgtgttccacctcactgtccccagtaaattcaccttcgaggaggctgcaaaagagtgtgaaaaccaggatgccaggctggcaacagtgggggaactccaggcggcatggaggaacggctttgaccagtgcgattacgggtggctgtcggatgccagcgtgcgccaccctgtgactgtggccagggcccagtgtggaggtggtctacttggggtgagaaccctgtatcgttttgagaaccagacaggcttccctccccctgatagcagatttgatgcctactgctttaaacctaaagaggctacaaccatcgatttgagtatcctcgcagaaactgcatcacccagtttatccaaagaaccacaaatggtttctgatagaactacaccaatcatccctttagttgatgaattacctgtcattccaacagagttccctcccgtgggaaatattgtcagttttgaacagaaagccacagtccaacctcaggctatcacagatagtttagccaccaaattacccacacctactggcagtaccaagaagccctgggatatggatgactactcaccttctgcttcaggacctcttggaaagctagacatatcagaaattaaggaagaagtgctccagagtacaactggcgtctctcattatgctacggattcatgggatggtgtcgtggaagataaacaaacacaagaatcggttacacagattgaacaaatagaagtgggtcctttggtaacatctatggaaatcttaaagcacattccttccaaggaattccctgtaactgaaacaccattggtaactgcaagaatgatcctggaatccaaaactgaaaagaaaatggtaagcactgtttctgaattggtaaccacaggtcactatggattcaccttgggagaagaggatgatgaagacagaacacttacagttggatctgatgagagcaccttgatctttgaccaaattcctgaagtcattacggtgtcaaagacttcagaagacaccatccacactcatttagaagacttggagtcagtctcagcatccacaactgtttcccctttaattatgcctgataataatggatcatccatggatgactgggaagagagacaaactagtggtaggataacggaagagtttcttggcaaatatctgtctactacaccttttccatcacagcatcgtacagaaatagaattgtttccttattctggtgataaaatattagtagagggaatttccacagttatttatccttctctacaaacagaaatgacacatagaagagaaagaacagaaacactaataccagagatgagaacagatacttatacagatgaaatacaagaagagatcactaaaagtccatttatgggaaaaacagaagaagaagtcttctctgggatgaaactctctacatctctctcagagccaattcatgttacagagtcttctgtggaaatgaccaagtcttttgatttcccaacattgataacaaagttaagtgcagagccaacagaagtaagagatatggaggaagactttacagcaactccaggtactacaaaatatgatgaaaatattacaacagtgcttttggcccatggtactttaagtgttgaagcagccactgtatcaaaatggtcatgggatgaagataatacaacatccaagcctttagagtctacagaaccttcagcctcttcaaaattgccccctgccttactcacaactgtggggatgaatggaaaggataaagacatcccaagtttcactgaagatggagcagatgaatttactcttattccagatagtactcaaaagcagttagaggaggttactgatgaagacatagcagcccatggaaaattcacaattagatttcagccaactacatcaactggtattgcagaaaagtcaactttgagagattctacaactgaagaaaaagttccacctatcacaagcactgaaggccaagtttatgcaaccatggaaggaagtgctttgggtgaagtagaagatgtggacctctctaagccagtatctactgttccccaatttgcacacacttcagaggtggaaggattagcatttgttagttatagtagcacccaagagcctactacttatgtagactcttcccataccattcctctttctgtaattcccaagacagactggggagtgttagtaccttctgttccatcagaagatgaagttctaggtgaaccctctcaagacatacttgtcattgatcagactcgccttgaagcgactatttctccagaaactatgagaacaacaaaaatcacagagggaacaactcaggaagaattcccttggaaagaacagactgcagagaaaccagttcctgctctcagttctacagcttggactcccaaggaggcagtaacaccactggatgaacaagagggcgatggatcagcatatacagtctctgaagatgaattgttgacaggttctgagagggtcccagttttagaaacaactccagttggaaaaattgatcacagtgtgtcttatccaccaggtgctgtaactgagcacaaagtgaaaacagatgaagtggtaacactaacaccacgcattgggccaaaagtatctttaagtccagggcctgaacaaaaatatgaaacagaaggtagtagtacaacaggatttacatcatctttgagtccttttagtacccacattacccagcttatggaagaaaccactactgagaaaacatccctagaggatattgatttaggctcaggattatttgaaaagcccaaagccacagaactcatagaattttcaacaatcaaagtcacagttccaagtgatattaccactgccttcagttcagtagacagacttcacacaacttcagcattcaagccatcttccgcgatcactaagaaaccacctctcatcgacagggaacctggtgaagaaacaaccagtgacatggtaatcattggagaatcaacatctcatgttcctcccactacccttgaagatattgtagccaaggaaacagaaaccgatattgatagagagtatttcacgacttcaagtcctcctgctacacagccaacaagaccacccactgtggaagacaaagaggcctttggacctcaggcgctttctacgccacagcccccagcaagcacaaaatttcaccctgacattaatgtttatattattgaggtcagagaaaataagacaggtcgaatgagtgatttgagtgtaattggtcatccaatagattcagaatctaaagaagatgaaccttgtagtgaagaaacagatccagtgcatgatctaatggctgaaattttacctgaattccctgacataattgaaatagacctataccacagtgaagaaaatgaagaagaagaagaagagtgtgcaaatgctactgatgtgacaaccaccccatctgtgcagtacataaatgggaagcatctcgttaccactgtgcccaaggacccagaagctgcagaagctaggcgtggccagtttgaaagtgttgcaccttctcagaatttctcggacagctctgaaagtgatactcatccatttgtaatagccaaaacggaattgtctactgctgtgcaacctaatgaatctacagaaacaactgagtctcttgaagttacatggaagcctgagacttaccctgaaacatcagaacatttttcaggtggtgagcctgatgttttccccacagtcccattccatgaggaatttgaaagtggaacagccaaaaaaggggcagaatcagtcacagagagagatactgaagttggtcatcaggcacatgaacatactgaacctgtatctctgtttcctgaagagtcttcaggagagattgccattgaccaagaatctcagaaaatagcctttgcaagggctacagaagtaacatttggtgaagaggtagaaaaaagtacttctgtcacatacactcccactatagttccaagttctgcatcagcatatgtttcagaggaagaagcagttaccctaataggaaatccttggccagatgacctgttgtctaccaaagaaagctgggtagaagcaactcctagacaagttgtagagctctcagggagttcttcgattccaattacagaaggctctggagaagcagaagaagatgaagatacaatgttcaccatggtaactgatttatcacagagaaatactactgatacactcattactttagacactagcaggataatcacagaaagcttttttgaggttcctgcaaccaccatttatccagtttctgaacaaccttctgcaaaagtggtgcctaccaagtttgtaagtgaaacagacacttctgagtggatttccagtaccactgttgaggaaaagaaaaggaaggaggaggagggaactacaggtacggcttctacatttgaggtatattcatctacacagagatcggatcaattaattttaccctttgaattagaaagtccaaatgtagctacatctagtgattcaggtaccaggaaaagttttatgtccttgacaacaccaacacagtctgaaagggaaatgacagattctactcctgtctttacagaaacaaatacattagaaaatttgggggcacagaccactgagcacagcagtatccatcaacctggggttcaggaagggctgaccactctcccacgtagtcctgcctctgtctttatggagcagggctctggagaagctgctgccgacccagaaaccaccactgtttcttcattttcattaaacgtagagtatgcaattcaagccgaaaaggaagtagctggcactttgtctccgcatgtggaaactacattctccactgagccaacaggactggttttgagtacagtaatggacagagtagttgctgaaaatataacccaaacatccagggaaatagtgatttcagagcgattaggagaaccaaattatggggcagaaataaggggcttttccacaggttttcctttggaggaagatttcagtggtgactttagagaatactcaacagtgtctcatcccatagcaaaagaagaaacggtaatgatggaaggctctggagatgcagcatttagggacacccagacttcaccatctacagtacctacttcagttcacatcagtcacatatctgactcagaaggacccagtagcaccatggtcagcacttcagccttcccctgggaagagtttacatcctcagctgagggctcaggtgagcaactggtcacagtcagcagctctgttgttccagtgcttcccagtgctgtgcaaaagttttctggtacagcttcctccattatcgacgaaggattgggagaagtgggtactgtcaatgaaattgatagaagatccaccattttaccaacagcagaagtggaaggtacgaaagctccagtagagaaggaggaagtaaaggtcagtggcacagtttcaacaaactttccccaaactatagagccagccaaattatggtctaggcaagaagtcaaccctgtaagacaagaaattgaaagtgaaacaacatcagaggaacaaattcaagaagaaaagtcatttgaatcccctcaaaactctcctgcaacagaacaaacaatctttgattcacagacatttactgaaactgaactcaaaaccacagattattctgtactaacaacaaagaaaacttacagtgatgataaagaaatgaaggaggaagacacttctttagttaacatgtctactccagatccagatgcaaatggcttggaatcttacacaactctccctgaagctactgaaaagtcacattttttcttagctactgcattagtaactgaatctataccagctgaacatgtagtcacagattcaccaatcaaaaaggaagaaagtacaaaacattttccgaaaggcatgagaccaacaattcaagagtcagatactgagctcttattctctggactgggatcaggagaagaagttttacctactctaccaacagagtcagtgaattttactgaagtggaacaaatcaataacacattatatccccacacttctcaagtggaaagtacctcaagtgacaaaattgaagactttaacagaatggaaaatgtggcaaaagaagttggaccactcgtatctcaaacagacatctttgaaggtagtgggtcagtaaccagcacaacattaatagaaattttaagtgacactggagcagaaggacccacggtggcacctctccctttctccacggacatcggacatcctcaaaatcagactgtcaggtgggcagaagaaatccagactagtagaccacaaaccataactgaacaagactctaacaagaattcttcaacagcagaaattaacgaaacaacaacctcatctactgattttctggctagagcttatggttttgaaatggccaaagaatttgttacatcagcaccaaaaccatctgacttgtattatgaaccttctggagaaggatctggagaagtggatattgttgattcatttcacacttctgcaactactcaggcaaccagacaagaaagcagcaccacatttgtttctgatgggtccctggaaaaacatcctgaggtgccaagcgctaaagctgttactgctgatggattcccaacagtttcagtgatgctgcctcttcattcagagcagaacaaaagctcccctgatccaactagcacactgtcaaatacagtgtcatatgagaggtccacagacggtagtttccaagaccgtttcagggaattcgaggattccaccttaaaacctaacagaaaaaaacccactgaaaatattatcatagacctggacaaagaggacaaggatttaatattgacaattacagagagtaccatccttgaaattctacctgagctgacatcggataaaaatactatcatagatattgatcatactaaacctgtgtatgaagacattcttggaatgcaaacagatatagatacagaggtaccatcagaaccacatgacagtaatgatgaaagtaatgatgacagcactcaagttcaagagatctatgaggcagctgtcaacctttctttaactgaggaaacatttgagggctctgctgatgttctggctagctacactcaggcaacacatgatgaatcaatgacttatgaagatagaagccaactagatcacatgggctttcacttcacaactgggatccctgctcctagcacagaaacagaattagacgttttacttcccacggcaacatccctgccaattcctcgtaagtctgccacagttattccagagattgaaggaataaaagctgaagcaaaagccctggatgacatgtttgaatcaagcactttgtctgatggtcaagctattgcagaccaaagtgaaataataccaacattgggccaatttgaaaggactcaggaggagtatgaagacaaaaaacatgctggtccttcttttcagccagaattctcttcaggagctgaggaggcattagtagaccatactccctatctaagtattgctactacccaccttatggatcagagtgtaacagaggtgcctgatgtgatggaaggatccaatcccccatattacactgatacaacattagcagtttcaacatttgcgaagttgtcttctcagacaccatcatctcccctcactatctactcaggcagtgaagcctctggacacacagagatcccccagcccagtgctctgccaggaatagacgtcggctcatctgtaatgtccccacaggattcttttaaggaaattcatgtaaatattgaagcgactttcaaaccatcaagtgaggaataccttcacataactgagcctccctctttatctcctgacacaaaattagaaccttcagaagatgatggtaaacctgagttattagaagaaatggaagcttctcccacagaacttattgctgtggaaggaactgagattctccaagatttccaaaacaaaaccgatggtcaagtttctggagaagcaatcaagatgtttcccaccattaaaacacctgaggctggaactgttattacaactgccgatgaaattgaattagaaggtgctacacagtggccacactctacttctgcttctgccacctatggggtcgaggcaggtgtggtgccttggctaagtccacagacttctgagaggcccacgctttcttcttctccagaaataaaccctgaaactcaagcagctttaatcagagggcaggattccacgatagcagcatcagaacagcaagtggcagcgagaattcttgattccaatgatcaggcaacagtaaaccctgtggaatttaatactgaggttgcaacaccaccattttcccttctggagacttctaatgaaacagatttcctgattggcattaatgaagagtcagtggaaggcacggcaatctatttaccaggacctgatcgctgcaaaatgaacccgtgccttaacggaggcacctgttatcctactgaaacttcctacgtatgcacctgtgtgccaggatacagcggagaccagtgtgaacttgattttgatgaatgtcactctaatccctgtcgtaatggagccacttgtgttgatggttttaacacattcaggtgcctctgccttccaagttatgttggtgcactttgtgagcaagataccgagacatgtgactatggctggcacaaattccaagggcagtgctacaaatactttgcccatcgacgcacatgggatgcagctgaacgggaatgccgtctgcagggtgcccatctcacaagcatcctgtctcacgaagaacaaatgtttgttaatcgtgtgggccatgattatcagtggataggcctcaatgacaagatgtttgagcatgacttccgttggactgatggcagcacactgcaatacgagaattggagacccaaccagccagacagcttcttttctgctggagaagactgtgttgtaatcatttggcatgagaatggccagtggaatgatgttccctgcaattaccatctcacctatacgtgcaagaaaggaacagtcgcttgcggccagccccctgttgtagaaaatgccaagacctttggaaagatgaaacctcgttatgaaatcaactccctgattagataccactgcaaagatggtttcattcaacgtcaccttccaactatccggtgcttaggaaatggaagatgggctatacctaaaattacctgcatgaacccatctgcataccaaaggacttattctatgaaatactttaaaaattcctcatcagcaaaggacaattcaataaatacatccaaacatgatcatcgttggagccggaggtggcaggagtcgaggcgctgatccctaaaatggcgaacatgtgttttcatcatttcagccaaagtcctaacttcctgtgcctttcctatcacctcgagaagtaattatcagttggtttggatttttggaccaccgttcagtcattttgggttgccgtgctcccaaaacattttaaatgaaagtattggcattcaaaaagacagcagacaaaatgaaagaaaatgagagcagaaagtaagcatttccagcctatctaatttctttagttttctatttgcctccagtgcagtccatttcctaatgtataccagcctactgtactatttaaaatgctcaatttcagcaccgatggccatgtaaataagatgatttaatgttgattttaatcctgtatataaaataaaaagtcacaatgagtttgggcatatttaatgatgattatggagccttagaggtctttaatcattggttcggctgcttttatgtagtttaggctggaaatggtttcacttgctctttgactgtcagcaagactgaagatggcttttcctggacagctagaaaacacaaaatcttgtaggtcattgcacctatctcagccataggtgcagtttgcttctacatgatgctaaaggctgcgaatgggatcctgatggaactaaggactccaatgtcgaactcttctttgctgcattcctttttcttcacttacaagaaaggcctgaatggaggacttttctgtaaccaggaacattttttaggggtcaaagtgctaataattaactcaaccaggtctactttttaatggctttcataacactaactcataaggttaccgatcaatgcatttcatacggatatagacctagggctctggagggtgggggattgttaaaacacatgcaaaaaaaaaaaaaaaaaaaaaaaaagaaattttgtatatataaccattttaatcttttataaagttttgaatgttcatgtatgaatgctgcagctgtgaagcatacataaataaatgaagtaagccatactgatttaatttattggatgttattttccctaagacctgaaaatgaacatagtatgctagttatttttcagtgttagccttttactttcctcacacaatttggaatcatataatataggtactttgtccctgattaaataatgtgacggatagaatgcatcaagtgtttattatgaaaagagtggaaaagtatatagcttttagcaaaaggtgtttgcccattctaagaaatgagcgaatatatagaaatagtgtgggcatttcttcctgttaggtggagtgtatgtgttgacatttctccccatctcttcccactctgttttctccccattatttgaataaagtgactgctgaagatgactttgaatccttatccacttaatttaatgtttaaagaaaaacctgtaatggaaagtaagactccttccctaatttcagtttagagcaacttgaagaagagtagacaaaaaataaaatgcacatagaaaaagagaaaaagggcacaaagggattggcccaatattgattctttttttataaaacctcctttggcttagaaggaatgactctagctacaataatacacagtatgtttaagcaggttcccttggttgttgcattaaatgtaatccacctttaggtattttagagcacagaacaacactgtgttgatctagtaggtttctatttttcctttctctttacaatgcacataatactttcctgtatttatatcataacgtgtatagtgtaaaatgtgaatgactttttttgtgaatgaaaatctaaaatctttgtaactttttatatctgcttttgtttcaccaaagaaacctaaaatccttcttttactacac

SEQ ID NO: 4433 - DNA, 7154 bp, Homo sapiens
  source 1..7154: mol_type = genomic DNA
cttcttctcgctgagtctcctcctcggctctgacggtacagtgatataatgatgatgggtgtcacaacccgcatttgaacttgcaggcgagctgccccgagcctttctggggaagaactccaggcgtgcggacgcaacagccgagaacattaggtgttgtggacaggagctgggaccaagatcttcggccagccccgcatcctcccgcatcttccagcaccgtcccgcaccctccgcatccttccccgggccaccacgcttcctatgtgacccgcctgggcaacgccgaacccagtcgcgcagcgctgcagtgaattttccccccaaactgcaataagccgccttccaaggccaagatgttcataaatataaagagcatcttatggatgtgttcaaccttaatagtaacccatgcgctacataaagtcaaagtgggaaaaagcccaccggtgaggggctccctctctggaaaagtcagcctaccttgtcatttttcaacgatgcctactttgccacccagttacaacaccagtgaatttctccgcatcaaatggtctaagattgaagtggacaaaaatggaaaagatttgaaagagactactgtccttgtggcccaaaatggaaatatcaagattggtcaggactacaaagggagagtgtctgtgcccacacatcccgaggctgtgggcgatgcctccctcactgtggtcaagctgctggcaagtgatgcgggtctttaccgctgtgacgtcatgtacgggattgaagacacacaagacacggtgtcactgactgtggatggggttgtgtttcactacagggcggcaaccagcaggtacacactgaattttgaggctgctcagaaggcttgtttggacgttggggcagtcatagcaactccagagcagctctttgctgcctatgaagatggatttgagcagtgtgacgcaggctggctggctgatcagactgtcagatatcccatccgggctcccagagtaggctgttatggagataagatgggaaaggcaggagtcaggacttatggattccgttctccccaggaaacttacgatgtgtattgttatgtggatcatctggatggtgatgtgttccacctcactgtccccagtaaattcaccttcgaggaggctgcaaaagagtgtgaaaaccaggatgccaggctggcaacagtgggggaactccaggcggcatggaggaacggctttgaccagtgcgattacgggtggctgtcggatgccagcgtgcgccaccctgtgactgtggccagggcccagtgtggaggtggtctacttggggtgagaaccctgtatcgttttgagaaccagacaggcttccctccccctgatagcagatttgatgcctactgctttaaacctaaagaggctacaaccatcgatttgagtatcctcgcagaaactgcatcacccagtttatccaaagaaccacaaatggtttctgatagaactacaccaatcatccctttagttgatgaattacctgtcattccaacagagttccctcccgtgggaaatattgtcagttttgaacagaaagccacagtccaacctcaggctatcacagatagtttagccaccaaattacccacacctactggcagtaccaagaagccctgggatatggatgactactcaccttctgcttcaggacctcttggaaagctagacatatcagaaattaaggaagaagtgctccagagtacaactggcgtctctcattatgctacggattcatgggatggtgtcgtggaagataaacaaacacaagaatcggttacacagattgaacaaatagaagtgggtcctttggtaacatctatggaaatcttaaagcacattccttccaaggaattccctgtaactgaaacaccattggtaactgcaagaatgatcctggaatccaaaactgaaaagaaaatggtaagcactgtttctgaattggtaaccacaggtcactatggattcaccttgggagaagaggatgatgaagacagaacacttacagttggatctgatgagagcaccttgatctttgaccaaattcctgaagtcattacggtgtcaaagacttcagaagacaccatccacactcatttagaagacttggagtcagtctcagcatccacaactgtttcccctttaattatgcctgataataatggatcatccatggatgactgggaagagagacaaactagtggtaggataacggaagagtttcttggcaaatatctgtctactacaccttttccatcacagcatcgtacagaaatagaattgtttccttattctggtgataaaatattagtagagggaatttccacagttatttatccttctctacaaacagaaatgacacatagaagagaaagaacagaaacactaataccagagatgagaacagatacttatacagatgaaatacaagaagagatcactaaaagtccatttatgggaaaaacagaagaagaagtcttctctgggatgaaactctctacatctctctcagagccaattcatgttacagagtcttctgtggaaatgaccaagtcttttgatttcccaacattgataacaaagttaagtgcagagccaacagaagtaagagatatggaggaagactttacagcaactccaggtactacaaaatatgatgaaaatattacaacagtgcttttggcccatggtactttaagtgttgaagcagccactgtatcaaaatggtcatgggatgaagataatacaacatccaagcctttagagtctacagaaccttcagcctcttcaaaattgccccctgccttactcacaactgtggggatgaatggaaaggataaagacatcccaagtttcactgaagatggagcagatgaatttactcttattccagatagtactcaaaagcagttagaggaggttactgatgaagacatagcagcccatggaaaattcacaattagatttcagccaactacatcaactggtattgcagaaaagtcaactttgagagattctacaactgaagaaaaagttccacctatcacaagcactgaaggccaagtttatgcaaccatggaaggaagtgctttgggtgaagtagaagatgtggacctctctaagccagtatctactgttccccaatttgcacacacttcagaggtggaaggattagcatttgttagttatagtagcacccaagagcctactacttatgtagactcttcccataccattcctctttctgtaattcccaagacagactggggagtgttagtaccttctgttccatcagaagatgaagttctaggtgaaccctctcaagacatacttgtcattgatcagactcgccttgaagcgactatttctccagaaactatgagaacaacaaaaatcacagagggaacaactcaggaagaattcccttggaaagaacagactgcagagaaaccagttcctgctctcagttctacagcttggactcccaaggaggcagtaacaccactggatgaacaagagggcgatggatcagcatatacagtctctgaagatgaattgttgacaggttctgagagggtcccagttttagaaacaactccagttggaaaaattgatcacagtgtgtcttatccaccaggtgctgtaactgagcacaaagtgaaaacagatgaagtggtaacactaacaccacgcattgggccaaaagtatctttaagtccagggcctgaacaaaaatatgaaacagaaggtagtagtacaacaggatttacatcatctttgagtccttttagtacccacattacccagcttatggaagaaaccactactgagaaaacatccctagaggatattgatttaggctcaggattatttgaaaagcccaaagccacagaactcatagaattttcaacaatcaaagtcacagttccaagtgatattaccactgccttcagttcagtagacagacttcacacaacttcagcattcaagccatcttccgcgatcactaagaaaccacctctcatcgacagggaacctggtgaagaaacaaccagtgacatggtaatcattggagaatcaacatctcatgttcctcccactacccttgaagatattgtagccaaggaaacagaaaccgatattgatagagagtatttcacgacttcaagtcctcctgctacacagccaacaagaccacccactgtggaagacaaagaggcctttggacctcaggcgctttctacgccacagcccccagcaagcacaaaatttcaccctgacattaatgtttatattattgaggtcagagaaaataagacaggacctgatcgctgcaaaatgaacccgtgccttaacggaggcacctgttatcctactgaaacttcctacgtatgcacctgtgtgccaggatacagcggagaccagtgtgaacttgattttgatgaatgtcactctaatccctgtcgtaatggagccacttgtgttgatggttttaacacattcaggtgcctctgccttccaagttatgttggtgcactttgtgagcaagataccgagacatgtgactatggctggcacaaattccaagggcagtgctacaaatactttgcccatcgacgcacatgggatgcagctgaacgggaatgccgtctgcagggtgcccatctcacaagcatcctgtctcacgaagaacaaatgtttgttaatcgtgtgggccatgattatcagtggataggcctcaatgacaagatgtttgagcatgacttccgttggactgatggcagcacactgcaatacgagaattggagacccaaccagccagacagcttcttttctgctggagaagactgtgttgtaatcatttggcatgagaatggccagtggaatgatgttccctgcaattaccatctcacctatacgtgcaagaaaggaacagtcgcttgcggccagccccctgttgtagaaaatgccaagacctttggaaagatgaaacctcgttatgaaatcaactccctgattagataccactgcaaagatggtttcattcaacgtcaccttccaactatccggtgcttaggaaatggaagatgggctatacctaaaattacctgcatgaacccatctgcataccaaaggacttattctatgaaatactttaaaaattcctcatcagcaaaggacaattcaataaatacatccaaacatgatcatcgttggagccggaggtggcaggagtcgaggcgctgatccctaaaatggcgaacatgtgttttcatcatttcagccaaagtcctaacttcctgtgcctttcctatcacctcgagaagtaattatcagttggtttggatttttggaccaccgttcagtcattttgggttgccgtgctcccaaaacattttaaatgaaagtattggcattcaaaaagacagcagacaaaatgaaagaaaatgagagcagaaagtaagcatttccagcctatctaatttctttagttttctatttgcctccagtgcagtccatttcctaatgtataccagcctactgtactatttaaaatgctcaatttcagcaccgatggccatgtaaataagatgatttaatgttgattttaatcctgtatataaaataaaaagtcacaatgagtttgggcatatttaatgatgattatggagccttagaggtctttaatcattggttcggctgcttttatgtagtttaggctggaaatggtttcacttgctctttgactgtcagcaagactgaagatggcttttcctggacagctagaaaacacaaaatcttgtaggtcattgcacctatctcagccataggtgcagtttgcttctacatgatgctaaaggctgcgaatgggatcctgatggaactaaggactccaatgtcgaactcttctttgctgcattcctttttcttcacttacaagaaaggcctgaatggaggacttttctgtaaccaggaacattttttaggggtcaaagtgctaataattaactcaaccaggtctactttttaatggctttcataacactaactcataaggttaccgatcaatgcatttcatacggatatagacctagggctctggagggtgggggattgttaaaacacatgcaaaaaaaaaaaaaaaaaaaaaaaaagaaattttgtatatataaccattttaatcttttataaagttttgaatgttcatgtatgaatgctgcagctgtgaagcatacataaataaatgaagtaagccatactgatttaatttattggatgttattttccctaagacctgaaaatgaacatagtatgctagttatttttcagtgttagccttttactttcctcacacaatttggaatcatataatataggtactttgtccctgattaaataatgtgacggatagaatgcatcaagtgtttattatgaaaagagtggaaaagtatatagcttttagcaaaaggtgtttgcccattctaagaaatgagcgaatatatagaaatagtgtgggcatttcttcctgttaggtggagtgtatgtgttgacatttctccccatctcttcccactctgttttctccccattatttgaataaagtgactgctgaagatgactttgaatccttatccacttaatttaatgtttaaagaaaaacctgtaatggaaagtaagactccttccctaatttcagtttagagcaacttgaagaagagtagacaaaaaataaaatgcacatagaaaaagagaaaaagggcacaaagggattggcccaatattgattctttttttataaaacctcctttggcttagaaggaatgactctagctacaataatacacagtatgtttaagcaggttcccttggttgttgcattaaatgtaatccacctttaggtattttagagcacagaacaacactgtgttgatctagtaggtttctatttttcctttctctttacaatgcacataatactttcctgtatttatatcataacgtgtatagtgtaaaatgtgaatgactttttttgtgaatgaaaatctaaaatctttgtaactttttatatctgcttttgtttcaccaaagaaacctaaaatccttcttttactacac

SEQ ID NO: 4434 - DNA, 9455 bp, Homo sapiens
  source 1..9455: mol_type = genomic DNA
cttcttctcgctgagtctcctcctcggctctgacggtacagtgatataatgatgatgggtgtcacaacccgcatttgaacttgcaggcgagctgccccgagcctttctggggaagaactccaggcgtgcggacgcaacagccgagaacattaggtgttgtggacaggagctgggaccaagatcttcggccagccccgcatcctcccgcatcttccagcaccgtcccgcaccctccgcatccttccccgggccaccacgcttcctatgtgacccgcctgggcaacgccgaacccagtcgcgcagcgctgcagtgaattttccccccaaactgcaataagccgccttccaaggccaagatgttcataaatataaagagcatcttatggatgtgttcaaccttaatagtaacccatgcgctacataaagtcaaagtgggaaaaagcccaccggtgaggggctccctctctggaaaagtcagcctaccttgtcatttttcaacgatgcctactttgccacccagttacaacaccagtgaatttctccgcatcaaatggtctaagattgaagtggacaaaaatggaaaagatttgaaagagactactgtccttgtggcccaaaatggaaatatcaagattggtcaggactacaaagggagagtgtctgtgcccacacatcccgaggctgtgggcgatgcctccctcactgtggtcaagctgctggcaagtgatgcgggtctttaccgctgtgacgtcatgtacgggattgaagacacacaagacacggtgtcactgactgtggatggggttgtgtttcactacagggcggcaaccagcaggtacacactgaattttgaggctgctcagaaggcttgtttggacgttggggcagtcatagcaactccagagcagctctttgctgcctatgaagatggatttgagcagtgtgacgcaggctggctggctgatcagactgtcagatatcccatccgggctcccagagtaggctgttatggagataagatgggaaaggcaggagtcaggacttatggattccgttctccccaggaaacttacgatgtgtattgttatgtggatcatctggatggtgatgtgttccacctcactgtccccagtaaattcaccttcgaggaggctgcaaaagagtgtgaaaaccaggatgccaggctggcaacagtgggggaactccaggcggcatggaggaacggctttgaccagtgcgattacgggtggctgtcggatgccagcgtgcgccaccctgtgactgtggccagggcccagtgtggaggtggtctacttggggtgagaaccctgtatcgttttgagaaccagacaggcttccctccccctgatagcagatttgatgcctactgctttaaacgtcgaatgagtgatttgagtgtaattggtcatccaatagattcagaatctaaagaagatgaaccttgtagtgaagaaacagatccagtgcatgatctaatggctgaaattttacctgaattccctgacataattgaaatagacctataccacagtgaagaaaatgaagaagaagaagaagagtgtgcaaatgctactgatgtgacaaccaccccatctgtgcagtacataaatgggaagcatctcgttaccactgtgcccaaggacccagaagctgcagaagctaggcgtggccagtttgaaagtgttgcaccttctcagaatttctcggacagctctgaaagtgatactcatccatttgtaatagccaaaacggaattgtctactgctgtgcaacctaatgaatctacagaaacaactgagtctcttgaagttacatggaagcctgagacttaccctgaaacatcagaacatttttcaggtggtgagcctgatgttttccccacagtcccattccatgaggaatttgaaagtggaacagccaaaaaaggggcagaatcagtcacagagagagatactgaagttggtcatcaggcacatgaacatactgaacctgtatctctgtttcctgaagagtcttcaggagagattgccattgaccaagaatctcagaaaatagcctttgcaagggctacagaagtaacatttggtgaagaggtagaaaaaagtacttctgtcacatacactcccactatagttccaagttctgcatcagcatatgtttcagaggaagaagcagttaccctaataggaaatccttggccagatgacctgttgtctaccaaagaaagctgggtagaagcaactcctagacaagttgtagagctctcagggagttcttcgattccaattacagaaggctctggagaagcagaagaagatgaagatacaatgttcaccatggtaactgatttatcacagagaaatactactgatacactcattactttagacactagcaggataatcacagaaagcttttttgaggttcctgcaaccaccatttatccagtttctgaacaaccttctgcaaaagtggtgcctaccaagtttgtaagtgaaacagacacttctgagtggatttccagtaccactgttgaggaaaagaaaaggaaggaggaggagggaactacaggtacggcttctacatttgaggtatattcatctacacagagatcggatcaattaattttaccctttgaattagaaagtccaaatgtagctacatctagtgattcaggtaccaggaaaagttttatgtccttgacaacaccaacacagtctgaaagggaaatgacagattctactcctgtctttacagaaacaaatacattagaaaatttgggggcacagaccactgagcacagcagtatccatcaacctggggttcaggaagggctgaccactctcccacgtagtcctgcctctgtctttatggagcagggctctggagaagctgctgccgacccagaaaccaccactgtttcttcattttcattaaacgtagagtatgcaattcaagccgaaaaggaagtagctggcactttgtctccgcatgtggaaactacattctccactgagccaacaggactggttttgagtacagtaatggacagagtagttgctgaaaatataacccaaacatccagggaaatagtgatttcagagcgattaggagaaccaaattatggggcagaaataaggggcttttccacaggttttcctttggaggaagatttcagtggtgactttagagaatactcaacagtgtctcatcccatagcaaaagaagaaacggtaatgatggaaggctctggagatgcagcatttagggacacccagacttcaccatctacagtacctacttcagttcacatcagtcacatatctgactcagaaggacccagtagcaccatggtcagcacttcagccttcccctgggaagagtttacatcctcagctgagggctcaggtgagcaactggtcacagtcagcagctctgttgttccagtgcttcccagtgctgtgcaaaagttttctggtacagcttcctccattatcgacgaaggattgggagaagtgggtactgtcaatgaaattgatagaagatccaccattttaccaacagcagaagtggaaggtacgaaagctccagtagagaaggaggaagtaaaggtcagtggcacagtttcaacaaactttccccaaactatagagccagccaaattatggtctaggcaagaagtcaaccctgtaagacaagaaattgaaagtgaaacaacatcagaggaacaaattcaagaagaaaagtcatttgaatcccctcaaaactctcctgcaacagaacaaacaatctttgattcacagacatttactgaaactgaactcaaaaccacagattattctgtactaacaacaaagaaaacttacagtgatgataaagaaatgaaggaggaagacacttctttagttaacatgtctactccagatccagatgcaaatggcttggaatcttacacaactctccctgaagctactgaaaagtcacattttttcttagctactgcattagtaactgaatctataccagctgaacatgtagtcacagattcaccaatcaaaaaggaagaaagtacaaaacattttccgaaaggcatgagaccaacaattcaagagtcagatactgagctcttattctctggactgggatcaggagaagaagttttacctactctaccaacagagtcagtgaattttactgaagtggaacaaatcaataacacattatatccccacacttctcaagtggaaagtacctcaagtgacaaaattgaagactttaacagaatggaaaatgtggcaaaagaagttggaccactcgtatctcaaacagacatctttgaaggtagtgggtcagtaaccagcacaacattaatagaaattttaagtgacactggagcagaaggacccacggtggcacctctccctttctccacggacatcggacatcctcaaaatcagactgtcaggtgggcagaagaaatccagactagtagaccacaaaccataactgaacaagactctaacaagaattcttcaacagcagaaattaacgaaacaacaacctcatctactgattttctggctagagcttatggttttgaaatggccaaagaatttgttacatcagcaccaaaaccatctgacttgtattatgaaccttctggagaaggatctggagaagtggatattgttgattcatttcacacttctgcaactactcaggcaaccagacaagaaagcagcaccacatttgtttctgatgggtccctggaaaaacatcctgaggtgccaagcgctaaagctgttactgctgatggattcccaacagtttcagtgatgctgcctcttcattcagagcagaacaaaagctcccctgatccaactagcacactgtcaaatacagtgtcatatgagaggtccacagacggtagtttccaagaccgtttcagggaattcgaggattccaccttaaaacctaacagaaaaaaacccactgaaaatattatcatagacctggacaaagaggacaaggatttaatattgacaattacagagagtaccatccttgaaattctacctgagctgacatcggataaaaatactatcatagatattgatcatactaaacctgtgtatgaagacattcttggaatgcaaacagatatagatacagaggtaccatcagaaccacatgacagtaatgatgaaagtaatgatgacagcactcaagttcaagagatctatgaggcagctgtcaacctttctttaactgaggaaacatttgagggctctgctgatgttctggctagctacactcaggcaacacatgatgaatcaatgacttatgaagatagaagccaactagatcacatgggctttcacttcacaactgggatccctgctcctagcacagaaacagaattagacgttttacttcccacggcaacatccctgccaattcctcgtaagtctgccacagttattccagagattgaaggaataaaagctgaagcaaaagccctggatgacatgtttgaatcaagcactttgtctgatggtcaagctattgcagaccaaagtgaaataataccaacattgggccaatttgaaaggactcaggaggagtatgaagacaaaaaacatgctggtccttcttttcagccagaattctcttcaggagctgaggaggcattagtagaccatactccctatctaagtattgctactacccaccttatggatcagagtgtaacagaggtgcctgatgtgatggaaggatccaatcccccatattacactgatacaacattagcagtttcaacatttgcgaagttgtcttctcagacaccatcatctcccctcactatctactcaggcagtgaagcctctggacacacagagatcccccagcccagtgctctgccaggaatagacgtcggctcatctgtaatgtccccacaggattcttttaaggaaattcatgtaaatattgaagcgactttcaaaccatcaagtgaggaataccttcacataactgagcctccctctttatctcctgacacaaaattagaaccttcagaagatgatggtaaacctgagttattagaagaaatggaagcttctcccacagaacttattgctgtggaaggaactgagattctccaagatttccaaaacaaaaccgatggtcaagtttctggagaagcaatcaagatgtttcccaccattaaaacacctgaggctggaactgttattacaactgccgatgaaattgaattagaaggtgctacacagtggccacactctacttctgcttctgccacctatggggtcgaggcaggtgtggtgccttggctaagtccacagacttctgagaggcccacgctttcttcttctccagaaataaaccctgaaactcaagcagctttaatcagagggcaggattccacgatagcagcatcagaacagcaagtggcagcgagaattcttgattccaatgatcaggcaacagtaaaccctgtggaatttaatactgaggttgcaacaccaccattttcccttctggagacttctaatgaaacagatttcctgattggcattaatgaagagtcagtggaaggcacggcaatctatttaccaggacctgatcgctgcaaaatgaacccgtgccttaacggaggcacctgttatcctactgaaacttcctacgtatgcacctgtgtgccaggatacagcggagaccagtgtgaacttgattttgatgaatgtcactctaatccctgtcgtaatggagccacttgtgttgatggttttaacacattcaggtgcctctgccttccaagttatgttggtgcactttgtgagcaagataccgagacatgtgactatggctggcacaaattccaagggcagtgctacaaatactttgcccatcgacgcacatgggatgcagctgaacgggaatgccgtctgcagggtgcccatctcacaagcatcctgtctcacgaagaacaaatgtttgttaatcgtgtgggccatgattatcagtggataggcctcaatgacaagatgtttgagcatgacttccgttggactgatggcagcacactgcaatacgagaattggagacccaaccagccagacagcttcttttctgctggagaagactgtgttgtaatcatttggcatgagaatggccagtggaatgatgttccctgcaattaccatctcacctatacgtgcaagaaaggaacagtcgcttgcggccagccccctgttgtagaaaatgccaagacctttggaaagatgaaacctcgttatgaaatcaactccctgattagataccactgcaaagatggtttcattcaacgtcaccttccaactatccggtgcttaggaaatggaagatgggctatacctaaaattacctgcatgaacccatctgcataccaaaggacttattctatgaaatactttaaaaattcctcatcagcaaaggacaattcaataaatacatccaaacatgatcatcgttggagccggaggtggcaggagtcgaggcgctgatccctaaaatggcgaacatgtgttttcatcatttcagccaaagtcctaacttcctgtgcctttcctatcacctcgagaagtaattatcagttggtttggatttttggaccaccgttcagtcattttgggttgccgtgctcccaaaacattttaaatgaaagtattggcattcaaaaagacagcagacaaaatgaaagaaaatgagagcagaaagtaagcatttccagcctatctaatttctttagttttctatttgcctccagtgcagtccatttcctaatgtataccagcctactgtactatttaaaatgctcaatttcagcaccgatggccatgtaaataagatgatttaatgttgattttaatcctgtatataaaataaaaagtcacaatgagtttgggcatatttaatgatgattatggagccttagaggtctttaatcattggttcggctgcttttatgtagtttaggctggaaatggtttcacttgctctttgactgtcagcaagactgaagatggcttttcctggacagctagaaaacacaaaatcttgtaggtcattgcacctatctcagccataggtgcagtttgcttctacatgatgctaaaggctgcgaatgggatcctgatggaactaaggactccaatgtcgaactcttctttgctgcattcctttttcttcacttacaagaaaggcctgaatggaggacttttctgtaaccaggaacattttttaggggtcaaagtgctaataattaactcaaccaggtctactttttaatggctttcataacactaactcataaggttaccgatcaatgcatttcatacggatatagacctagggctctggagggtgggggattgttaaaacacatgcaaaaaaaaaaaaaaaaaaaaaaaaagaaattttgtatatataaccattttaatcttttataaagttttgaatgttcatgtatgaatgctgcagctgtgaagcatacataaataaatgaagtaagccatactgatttaatttattggatgttattttccctaagacctgaaaatgaacatagtatgctagttatttttcagtgttagccttttactttcctcacacaatttggaatcatataatataggtactttgtccctgattaaataatgtgacggatagaatgcatcaagtgtttattatgaaaagagtggaaaagtatatagcttttagcaaaaggtgtttgcccattctaagaaatgagcgaatatatagaaatagtgtgggcatttcttcctgttaggtggagtgtatgtgttgacatttctccccatctcttcccactctgttttctccccattatttgaataaagtgactgctgaagatgactttgaatccttatccacttaatttaatgtttaaagaaaaacctgtaatggaaagtaagactccttccctaatttcagtttagagcaacttgaagaagagtagacaaaaaataaaatgcacatagaaaaagagaaaaagggcacaaagggattggcccaatattgattctttttttataaaacctcctttggcttagaaggaatgactctagctacaataatacacagtatgtttaagcaggttcccttggttgttgcattaaatgtaatccacctttaggtattttagagcacagaacaacactgtgttgatctagtaggtttctatttttcctttctctttacaatgcacataatactttcctgtatttatatcataacgtgtatagtgtaaaatgtgaatgactttttttgtgaatgaaaatctaaaatctttgtaactttttatatctgcttttgtttcaccaaagaaacctaaaatccttcttttactacac

SEQ ID NO: 4435 - DNA, 5923 bp, Homo sapiens
  source 1..5923: mol_type = genomic DNA
gctgccccgagcctttctggggaagaactccaggcgtgcggacgcaacagccgagaacattaggtgttgtggacaggagctgggaccaagatcttcggccagccccgcatcctcccgcatcttccagcaccgtcccgcaccctccgcatccttccccgggccaccacgcttcctatgtgacccgcctgggcaacgccgaacccagtcgcgcagcgctgcagtgaattttccccccaaactgcaataagccgccttccaaggccaagatgttcataaatataaagagcatcttatggatgtgttcaaccttaatagtaacccatgcgctacataaagtcaaagtgggaaaaagcccaccggtgaggggctccctctctggaaaagtcagcctaccttgtcatttttcaacgatgcctactttgccacccagttacaacaccagtgaatttctccgcatcaaatggtctaagattgaagtggacaaaaatggaaaagatttgaaagagactactgtccttgtggcccaaaatggaaatatcaagattggtcaggactacaaagggagagtgtctgtgcccacacatcccgaggctgtgggcgatgcctccctcactgtggtcaagctgctggcaagtgatgcgggtctttaccgctgtgacgtcatgtacgggattgaagacacacaagacacggtgtcactgactgtggatggggttgtgtttcactacagggcggcaaccagcaggtacacactgaattttgaggctgctcagaaggcttgtttggacgttggggcagtcatagcaactccagagcagctctttgctgcctatgaagatggatttgagcagtgtgacgcaggctggctggctgatcagactgtcagatatcccatccgggctcccagagtaggctgttatggagataagatgggaaaggcaggagtcaggacttatggattccgttctccccaggaaacttacgatgtgtattgttatgtggatcatctggatggtgatgtgttccacctcactgtccccagtaaattcaccttcgaggaggctgcaaaagagtgtgaaaaccaggatgccaggctggcaacagtgggggaactccaggcggcatggaggaacggctttgaccagtgcgattacgggtggctgtcggatgccagcgtgcgccaccctgtgactgtggccagggcccagtgtggaggtggtctacttggggtgagaaccctgtatcgttttgagaaccagacaggcttccctccccctgatagcagatttgatgcctactgctttaaacctaaagaggctacaaccatcgatttgagtatcctcgcagaaactgcatcacccagtttatccaaagaaccacaaatggtttctgatagaactacaccaatcatccctttagttgatgaattacctgtcattccaacagagttccctcccgtgggaaatattgtcagttttgaacagaaagccacagtccaacctcaggctatcacagatagtttagccaccaaattacccacacctactggcagtaccaagaagccctgggatatggatgactactcaccttctgcttcaggacctcttggaaagctagacatatcagaaattaaggaagaagtgctccagagtacaactggcgtctctcattatgctacggattcatgggatggtgtcgtggaagataaacaaacacaagaatcggttacacagattgaacaaatagaagtgggtcctttggtaacatctatggaaatcttaaagcacattccttccaaggaattccctgtaactgaaacaccattggtaactgcaagaatgatcctggaatccaaaactgaaaagaaaatggtaagcactgtttctgaattggtaaccacaggtcactatggattcaccttgggagaagaggatgatgaagacagaacacttacagttggatctgatgagagcaccttgatctttgaccaaattcctgaagtcattacggtgtcaaagacttcagaagacaccatccacactcatttagaagacttggagtcagtctcagcatccacaactgtttcccctttaattatgcctgataataatggatcatccatggatgactgggaagagagacaaactagtggtaggataacggaagagtttcttggcaaatatctgtctactacaccttttccatcacagcatcgtacagaaatagaattgtttccttattctggtgataaaatattagtagagggaatttccacagttatttatccttctctacaaacagaaatgacacatagaagagaaagaacagaaacactaataccagagatgagaacagatacttatacagatgaaatacaagaagagatcactaaaagtccatttatgggaaaaacagaagaagaagtcttctctgggatgaaactctctacatctctctcagagccaattcatgttacagagtcttctgtggaaatgaccaagtcttttgatttcccaacattgataacaaagttaagtgcagagccaacagaagtaagagatatggaggaagactttacagcaactccaggtactacaaaatatgatgaaaatattacaacagtgcttttggcccatggtactttaagtgttgaagcagccactgtatcaaaatggtcatgggatgaagataatacaacatccaagcctttagagtctacagaaccttcagcctcttcaaaattgccccctgccttactcacaactgtggggatgaatggaaaggataaagacatcccaagtttcactgaagatggagcagatgaatttactcttattccagatagtactcaaaagcagttagaggaggttactgatgaagacatagcagcccatggaaaattcacaattagatttcagccaactacatcaactggtattgcagaaaagtcaactttgagagattctacaactgaagaaaaagttccacctatcacaagcactgaaggccaagtttatgcaaccatggaaggaagtgctttgggtgaagtagaagatgtggacctctctaagccagtatctactgttccccaatttgcacacacttcagaggtggaaggattagcatttgttagttatagtagcacccaagagcctactacttatgtagactcttcccataccattcctctttctgtaattcccaagacagactggggagtgttagtaccttctgttccatcagaagatgaagttctaggtgaaccctctcaagacatacttgtcattgatcagactcgccttgaagcgactatttctccagaaactatgagaacaacaaaaatcacagagggaacaactcaggaagaattcccttggaaagaacagactgcagagaaaccagttcctgctctcagttctacagcttggactcccaaggaggcagtaacaccactggatgaacaagagggcgatggatcagcatatacagtctctgaagatgaattgttgacaggttctgagagggtcccagttttagaaacaactccagttggaaaaattgatcacagtgtgtcttatccaccaggtgctgtaactgagcacaaagtgaaaacagatgaagtggtaacactaacaccacgcattgggccaaaagtatctttaagtccagggcctgaacaaaaatatgaaacagaaggtagtagtacaacaggatttacatcatctttgagtccttttagtacccacattacccagcttatggaagaaaccactactgagaaaacatccctagaggatattgatttaggctcaggattatttgaaaagcccaaagccacagaactcatagaattttcaacaatcaaagtcacagttccaagtgatattaccactgccttcagttcagtagacagacttcacacaacttcagcattcaagccatcttccgcgatcactaagaaaccacctctcatcgacagggaacctggtgaagaaacaaccagtgacatggtaatcattggagaatcaacatctcatgttcctcccactacccttgaagatattgtagccaaggaaacagaaaccgatattgatagagagtatttcacgacttcaagtcctcctgctacacagccaacaagaccacccactgtggaagacaaagaggcctttggacctcaggcgctttctacgccacagcccccagcaagcacaaaatttcaccctgacattaatgtttatattattgaggtcagagaaaataagacaggacctgatcgctgcaaaatgaacccgtgccttaacggaggcacctgttatcctactgaaacttcctacgtatgcacctgtgtgccaggatacagcggagaccagtgtgaacttgattttgatgaatgtcactctaatccctgtcgtaatggagccacttgtgttgatggttttaacacattcaggtgcctctgccttccaagttatgttggtgcactttgtgagcaagataccgagacatgtgactatggctggcacaaattccaagggcagtgctacaaatactttgcccatcgacgcacatgggatgcagctgaacgggaatgccgtctgcagggtgcccatctcacaagcatcctgtctcacgaagaacaaatgtttgttaatcgtgtgggccatgattatcagtggataggcctcaatgacaagatgtttgagcatgacttccgttggactgatggcagcacactgcaatacgagaattggagacccaaccagccagacagcttcttttctgctggagaagactgtgttgtaatcatttggcatgagaatggccagtggaatgatgttccctgcaattaccatctcacctatacgtgcaagaaaggaacagtcgcttgcggccagccccctgttgtagaaaatgccaagacctttggaaagatgaaacctcgttatgaaatcaactccctgattagataccactgcaaagatggtttcattcaacgtcaccttccaactatccggtgcttaggaaatggaagatgggctatacctaaaattacctgcatgaacccatctgcataccaaaggacttattctatgaaatactttaaaaattcctcatcagcaaaggacaattcaataaatacatccaaacatgatcatcgttggagccggaggtggcaggagtcgaggcgctgatccctaaaatggcgaacatgtgttttcatcatttcagccaaagtcctaacttcctgtgcctttcctatcacctcgagaagtaattatcagttggtttggatttttggaccaccgttcagtcattttgggttgccgtgctcccaaaacattttaaatgaaagtattggcattcaaaaagacagcagacaaaatgaaagaaaatgagagcagaaagtaagcatttccagcctatctaatttctttagttttctatttgcctccagtgcagtccatttcctaatgtataccagcctactgtactatttaaaatgctcaatttcagcaccgatggccatgtaaataagatgatttaatgttgattttaatcctgtatataaaataaaaagtcacaatgagtttgggcatatttaatgatgattatggagccttagaggtctttaatcattggttcggctgcttttatgtagtttaggctggaaatggtttcacttgctctttgactgtcagcaagactgaagatggcttttcctggacagctagaaaacacaaaatcttgtaggtcattgcacctatctcagccataggtgcagtttgcttctacatgatgctaaaggctgcgaatgggatcctgatggaactaaggactccaatgtcgaactcttctttgctgcattcctttttcttcacttacaagaaaggcctgaatggaggacttttctgtaaccagg

SEQ ID NO: 4436 - DNA, 2087 bp, Homo sapiens
  source 1..2087: mol_type = genomic DNA
caccacgcttcctatgtgacccgcctgggcaacgccgaacccagtcgcgcagcgctgcagtgaattttccccccaaactgcaataagccgccttccaaggccaagatgttcataaatataaagagcatcttatggatgtgttcaaccttaatagtaacccatgcgctacataaagtcaaagtgggaaaaagcccaccggtgaggggctccctctctggaaaagtcagcctaccttgtcatttttcaacgatgcctactttgccacccagttacaacaccagtgaatttctccgcatcaaatggtctaagattgaagtggacaaaaatggaaaagatttgaaagagactactgtccttgtggcccaaaatggaaatatcaagattggtcaggactacaaagggagagtgtctgtgcccacacatcccgaggctgtgggcgatgcctccctcactgtggtcaagctgctggcaagtgatgcgggtctttaccgctgtgacgtcatgtacgggattgaagacacacaagacacggtgtcactgactgtggatggggttgtgtttcactacagggcggcaaccagcaggtacacactgaattttgaggctgctcagaaggcttgtttggacgttggggcagtcatagcaactccagagcagctctttgctgcctatgaagatggatttgagcagtgtgacgcaggctggctggctgatcagactgtcagatatcccatccgggctcccagagtaggctgttatggagataagatgggaaaggcaggagtcaggacttatggattccgttctccccaggaaacttacgatgtgtattgttatgtggatcatctggatggtgatgtgttccacctcactgtccccagtaaattcaccttcgaggaggctgcaaaagagtgtgaaaaccaggatgccaggctggcaacagtgggggaactccaggcggcatggaggaacggctttgaccagtgcgattacgggtggctgtcggatgccagcgtgcgccaccctgtgactgtggccagggcccagtgtggaggtggtctacttggggtgagaaccctgtatcgttttgagaaccagacaggcttccctccccctgatagcagatttgatgcctactgctttaaacgacctgatcgctgcaaaatgaacccgtgccttaacggaggcacctgttatcctactgaaacttcctacgtatgcacctgtgtgccaggatacagcggagaccagtgtgaacttgattttgatgaatgtcactctaatccctgtcgtaatggagccacttgtgttgatggttttaacacattcaggtgcctctgccttccaagttatgttggtgcactttgtgagcaagataccgagacatgtgactatggctggcacaaattccaagggcagtgctacaaatactttgcccatcgacgcacatgggatgcagctgaacgggaatgccgtctgcagggtgcccatctcacaagcatcctgtctcacgaagaacaaatgtttgttaatcgtgtgggccatgattatcagtggataggcctcaatgacaagatgtttgagcatgacttccgttggactgatggcagcacactgcaatacgagaattggagacccaaccagccagacagcttcttttctgctggagaagactgtgttgtaatcatttggcatgagaatggccagtggaatgatgttccctgcaattaccatctcacctatacgtgcaagaaaggaacagtcgcttgcggccagccccctgttgtagaaaatgccaagacctttggaaagatgaaacctcgttatgaaatcaactccctgattagataccactgcaaagatggtttcattcaacgtcaccttccaactatccggtgcttaggaaatggaagatgggctatacctaaaattacctgcatgaacccatctgcataccaaaggacttattctatgaaatactttaaaaattcctcatcagcaaaggacaattcaataaatacatccaaacatgatcatcgttggagccggaggtggcaggagtcgaggcgctgatccctaaaatggcg

SEQ ID NO: 4437 - DNA, 4919 bp, Homo sapiens
  source 1..4919: mol_type = genomic DNA
aatctcatccgctctaaacaacctcatcaaaactactttctggtcagagagaagcaataattattattaacatttattaacgatcaataaacttgatcgcattatggccagcactattaaggaagccttatcagttgtgagtgaggaccagtcgttgtttgagtgtgcctacggaacgccacacctggctaagacagagatgaccgcgtcctcctccagcgactatggacagacttccaagatgagcccacgcgtccctcagcaggattggctgtctcaacccccagccagggtcaccatcaaaatggaatgtaaccctagccaggtgaatggctcaaggaactctcctgatgaatgcagtgtggccaaaggcgggaagatggtgggcagcccagacaccgttgggatgaactacggcagctacatggaggagaagcacatgccacccccaaacatgaccacgaacgagcgcagagttatcgtgccagcagatcctacgctatggagtacagaccatgtgcggcagtggctggagtgggcggtgaaagaatatggccttccagacgtcaacatcttgttattccagaacatcgatgggaaggaactgtgcaagatgaccaaggacgacttccagaggctcacccccagctacaacgccgacatccttctctcacatctccactacctcagagagactcctcttccacatttgacttcagatgatgttgataaagccttacaaaactctccacggttaatgcatgctagaaacacagggggtgcagcttttattttcccaaatacttcagtatatcctgaagctacgcaaagaattacaactaggccagatttaccatatgagccccccaggagatcagcctggaccggtcacggccaccccacgccccagtcgaaagctgctcaaccatctccttccacagtgcccaaaactgaagaccagcgtcctcagttagatccttatcagattcttggaccaacaagtagccgccttgcaaatccaggcagtggccagatccagctttggcagttcctcctggagctcctgtcggacagctccaactccagctgcatcacctgggaaggcaccaacggggagttcaagatgacggatcccgacgaggtggcccggcgctggggagagcggaagagcaaacccaacatgaactacgataagctcagccgcgccctccgttactactatgacaagaacatcatgaccaaggtccatgggaagcgctacgcctacaagttcgacttccacgggatcgcccaggccctccagccccaccccccggagtcatctctgtacaagtacccctcagacctcccgtacatgggctcctatcacgcccacccacagaagatgaactttgtggcgccccaccctccagccctccccgtgacatcttccagtttttttgctgccccaaacccatactggaattcaccaactgggggtatataccccaacactaggctccccaccagccatatgccttctcatctgggcacttactactaaagacctggcggaggcttttcccatcagcgtgcattcaccagcccatcgccacaaactctatcggagaacatgaatcaaaagtgcctcaagaggaatgaaaaaagctttactggggctggggaaggaagccggggaagagatccaaagactcttgggagggagttactgaagtcttactacagaaatgaggaggatgctaaaaatgtcacgaatatggacatatcatctgtggactgaccttgtaaaagacagtgtatgtagaagcatgaagtcttaaggacaaagtgccaaagaaagtggtcttaagaaatgtataaactttagagtagagtttggaatcccactaatgcaaactgggatgaaactaaagcaatagaaacaacacagttttgacctaacataccgtttataatgccattttaaggaaaactacctgtatttaaaaatagaaacatatcaaaaacaagagaaaagacacgagagagactgtggcccatcaacagacgttgatatgcaactgcatggcatgtgctgttttggttgaaatcaaatacattccgtttgatggacagctgtcagctttctcaaactgtgaagatgacccaaagtttccaactcctttacagtattaccgggactatgaactaaaaggtgggactgaggatgtgtatagagtgagcgtgtgattgtagacagaggggtgaagaaggaggaggaagaggcagagaaggaggagaccagggctgggaaagaaacttctcaagcaatgaagactggactcaggacatttggggactgtgtacaatgagttatggagactcgagggttcatgcagtcagtgttataccaaacccagtgttaggagaaaggacacagcgtaatggagaaaggggaagtagtagaattcagaaacaaaaatgcgcatctctttctttgtttgtcaaatgaaaattttaactggaattgtctgatatttaagagaaacattcaggacctcatcattatgtgggggctttgttctccacagggtcaggtaagagatggccttcttggctgccacaatcagaaatcacgcaggcattttgggtaggcggcctccagttttcctttgagtcgcgaacgctgtgcgtttgtcagaatgaagtatacaagtcaatgtttttccccctttttatataataattatataacttatgcatttatacactacgagttgatctcggccagccaaagacacacgacaaaagagacaatcgatataatgtggccttgaattttaactctgtatgcttaatgtttacaatatgaagttattagttcttagaatgcagaatgtatgtaataaaataagcttggcctagcatggcaaatcagatttatacaggagtctgcatttgcactttttttagtgactaaagttgcttaatgaaaacatgtgctgaatgttgtggattttgtgttataatttactttgtccaggaacttgtgcaagggagagccaaggaaataggatgtttggcacccaaatggcgtcagcctctccaggtccttcttgcctcccctcctgtcttttatttctagccccttttggaacagaaggaccccgggtttcacattggagcctccatatttatgcctggaatggaaagaggcctatgaagctggggttgtcattgagaaattctagttcagcacctggtcacaaatcacccttaattcctgctatgattaaaatacatttgttgaacagtgaacaagctaccactcgtaaggcaaactgtattattactggcaaataaagcgtcatggatagctgcaatttctcactttacagaaacaagggataacgtctagatttgctgcggggtttctctttcaggagctctcactaggtagacagctttagtcctgctacatcagagttacctgggcactgtggcttgggattcactagccctgagcctgatgttgctggctatcccttgaagacaatgtttatttccataatctagagtcagtttccctgggcatcttttctttgaatcacaaatgctgccaaccttggtccaggtgaaggcaactcaaaaggtgaaaatacaaggtgaccgtgcgaaggcgctagccgaaacatcttagctgaataggtttctgaactggcccttttcatagctgtttcagggcctgtttttttcacgttgcagtccttttgctatgattatgtgaagttgccaaacctctgtgctgtggatgttttggcagtgggctttgaagtcggcaggacacgattaccaatgctcctgacaccccgtgtcatttggattagacggagcccaaccatccatcattttgcagcagcctgggaaggcccacaaagtgcccgtatctccttagggaaaataaataaatacaatcatgaaagctggcagttaggctgacccaaactgtgctaatggaaaagatcagtcatttttattttggaatgcaaagtcaagacacacctacattcttcatagaaatacacatttacttggataatcactcagttctctcttcaagactgtctcatgagcaagatcataaaaacaagacatgattatcatattcaattttaacagatgttttccattagatccctcaaccctccacccccagtccaggttattagcaagtcttatgagcaactgggataattttggataacatgataatactgagttccttcaaatacataattcttaaattgtttcaaaatggcattaactctctgttactgttgtaatctaattccaaagccccctccaggtcatattcataattgcatgaaccttttctctctgtttgtccctgtctcttggcttgccctgatgtatactcagactcctgtacaatcttactcctgctggcaagagatttgtcttcttttcttgtcttcaattggctttcgggccttgtatgtggtaaaatcaccaaatcacagtcaagactgtgtttttgttcctagtttgatgcccttatgtcccggaggggttcacaaagtgctttgtcaggactgctgcagttagaaggctcactgcttctcctaagccttctgcacagatgtggcacctgcaacccaggagcaggagccggaggagctgccctctgacagcaggtgcagcagagatggctacagctcaggagctgggaaggtgatggggcacagggaaagcacagatgttctgcagcgccccaaagtgacccattgcctggagaaagagaagaaaatattttttaaaaagctagtttatttagcttctcattaattcattcaaataaagtcgtgaggtgactaattagagaataaaaattactttggactactcaaaaatacaccaaa

SEQ ID NO: 4438 - DNA, 4651 bp, Homo sapiens
  source 1..4651: mol_type = genomic DNA
aaagcaagacaaatgactcacagagaaaaaagatggcagaaccaagggcaactaaagccgtcaggttctgaacagctggtagatgggctggcttactgaaggacatgattcagactgtcccggacccagcagctcatatcaaggaactctcctgatgaatgcagtgtggccaaaggcgggaagatggtgggcagcccagacaccgttgggatgaactacggcagctacatggaggagaagcacatgccacccccaaacatgaccacgaacgagcgcagagttatcgtgccagcagatcctacgctatggagtacagaccatgtgcggcagtggctggagtgggcggtgaaagaatatggccttccagacgtcaacatcttgttattccagaacatcgatgggaaggaactgtgcaagatgaccaaggacgacttccagaggctcacccccagctacaacgccgacatccttctctcacatctccactacctcagagagactcctcttccacatttgacttcagatgatgttgataaagccttacaaaactctccacggttaatgcatgctagaaacacagatttaccatatgagccccccaggagatcagcctggaccggtcacggccaccccacgccccagtcgaaagctgctcaaccatctccttccacagtgcccaaaactgaagaccagcgtcctcagttagatccttatcagattcttggaccaacaagtagccgccttgcaaatccaggcagtggccagatccagctttggcagttcctcctggagctcctgtcggacagctccaactccagctgcatcacctgggaaggcaccaacggggagttcaagatgacggatcccgacgaggtggcccggcgctggggagagcggaagagcaaacccaacatgaactacgataagctcagccgcgccctccgttactactatgacaagaacatcatgaccaaggtccatgggaagcgctacgcctacaagttcgacttccacgggatcgcccaggccctccagccccaccccccggagtcatctctgtacaagtacccctcagacctcccgtacatgggctcctatcacgcccacccacagaagatgaactttgtggcgccccaccctccagccctccccgtgacatcttccagtttttttgctgccccaaacccatactggaattcaccaactgggggtatataccccaacactaggctccccaccagccatatgccttctcatctgggcacttactactaaagacctggcggaggcttttcccatcagcgtgcattcaccagcccatcgccacaaactctatcggagaacatgaatcaaaagtgcctcaagaggaatgaaaaaagctttactggggctggggaaggaagccggggaagagatccaaagactcttgggagggagttactgaagtcttactacagaaatgaggaggatgctaaaaatgtcacgaatatggacatatcatctgtggactgaccttgtaaaagacagtgtatgtagaagcatgaagtcttaaggacaaagtgccaaagaaagtggtcttaagaaatgtataaactttagagtagagtttggaatcccactaatgcaaactgggatgaaactaaagcaatagaaacaacacagttttgacctaacataccgtttataatgccattttaaggaaaactacctgtatttaaaaatagaaacatatcaaaaacaagagaaaagacacgagagagactgtggcccatcaacagacgttgatatgcaactgcatggcatgtgctgttttggttgaaatcaaatacattccgtttgatggacagctgtcagctttctcaaactgtgaagatgacccaaagtttccaactcctttacagtattaccgggactatgaactaaaaggtgggactgaggatgtgtatagagtgagcgtgtgattgtagacagaggggtgaagaaggaggaggaagaggcagagaaggaggagaccagggctgggaaagaaacttctcaagcaatgaagactggactcaggacatttggggactgtgtacaatgagttatggagactcgagggttcatgcagtcagtgttataccaaacccagtgttaggagaaaggacacagcgtaatggagaaaggggaagtagtagaattcagaaacaaaaatgcgcatctctttctttgtttgtcaaatgaaaattttaactggaattgtctgatatttaagagaaacattcaggacctcatcattatgtgggggctttgttctccacagggtcaggtaagagatggccttcttggctgccacaatcagaaatcacgcaggcattttgggtaggcggcctccagttttcctttgagtcgcgaacgctgtgcgtttgtcagaatgaagtatacaagtcaatgtttttccccctttttatataataattatataacttatgcatttatacactacgagttgatctcggccagccaaagacacacgacaaaagagacaatcgatataatgtggccttgaattttaactctgtatgcttaatgtttacaatatgaagttattagttcttagaatgcagaatgtatgtaataaaataagcttggcctagcatggcaaatcagatttatacaggagtctgcatttgcactttttttagtgactaaagttgcttaatgaaaacatgtgctgaatgttgtggattttgtgttataatttactttgtccaggaacttgtgcaagggagagccaaggaaataggatgtttggcacccaaatggcgtcagcctctccaggtccttcttgcctcccctcctgtcttttatttctagccccttttggaacagaaggaccccgggtttcacattggagcctccatatttatgcctggaatggaaagaggcctatgaagctggggttgtcattgagaaattctagttcagcacctggtcacaaatcacccttaattcctgctatgattaaaatacatttgttgaacagtgaacaagctaccactcgtaaggcaaactgtattattactggcaaataaagcgtcatggatagctgcaatttctcactttacagaaacaagggataacgtctagatttgctgcggggtttctctttcaggagctctcactaggtagacagctttagtcctgctacatcagagttacctgggcactgtggcttgggattcactagccctgagcctgatgttgctggctatcccttgaagacaatgtttatttccataatctagagtcagtttccctgggcatcttttctttgaatcacaaatgctgccaaccttggtccaggtgaaggcaactcaaaaggtgaaaatacaaggtgaccgtgcgaaggcgctagccgaaacatcttagctgaataggtttctgaactggcccttttcatagctgtttcagggcctgtttttttcacgttgcagtccttttgctatgattatgtgaagttgccaaacctctgtgctgtggatgttttggcagtgggctttgaagtcggcaggacacgattaccaatgctcctgacaccccgtgtcatttggattagacggagcccaaccatccatcattttgcagcagcctgggaaggcccacaaagtgcccgtatctccttagggaaaataaataaatacaatcatgaaagctggcagttaggctgacccaaactgtgctaatggaaaagatcagtcatttttattttggaatgcaaagtcaagacacacctacattcttcatagaaatacacatttacttggataatcactcagttctctcttcaagactgtctcatgagcaagatcataaaaacaagacatgattatcatattcaattttaacagatgttttccattagatccctcaaccctccacccccagtccaggttattagcaagtcttatgagcaactgggataattttggataacatgataatactgagttccttcaaatacataattcttaaattgtttcaaaatggcattaactctctgttactgttgtaatctaattccaaagccccctccaggtcatattcataattgcatgaaccttttctctctgtttgtccctgtctcttggcttgccctgatgtatactcagactcctgtacaatcttactcctgctggcaagagatttgtcttcttttcttgtcttcaattggctttcgggccttgtatgtggtaaaatcaccaaatcacagtcaagactgtgtttttgttcctagtttgatgcccttatgtcccggaggggttcacaaagtgctttgtcaggactgctgcagttagaaggctcactgcttctcctaagccttctgcacagatgtggcacctgcaacccaggagcaggagccggaggagctgccctctgacagcaggtgcagcagagatggctacagctcaggagctgggaaggtgatggggcacagggaaagcacagatgttctgcagcgccccaaagtgacccattgcctggagaaagagaagaaaatattttttaaaaagctagtttatttagcttctcattaattcattcaaataaagtcgtgaggtgactaattagagaataaaaattactttggactactcaaaaatacaccaaa

SEQ ID NO: 4439 - DNA, 4914 bp, Homo sapiens
  source 1..4914: mol_type = genomic DNA
gttattccaggatctttggagacccgaggaaagccgtgttgaccaaaagcaagacaaatgactcacagagaaaaaagatggcagaaccaagggcaactaaagccgtcaggttctgaacagctggtagatgggctggcttactgaaggacatgattcagactgtcccggacccagcagctcatatcaaggaagccttatcagttgtgagtgaggaccagtcgttgtttgagtgtgcctacggaacgccacacctggctaagacagagatgaccgcgtcctcctccagcgactatggacagacttccaagatgagcccacgcgtccctcagcaggattggctgtctcaacccccagccagggtcaccatcaaaatggaatgtaaccctagccaggtgaatggctcaaggaactctcctgatgaatgcagtgtggccaaaggcgggaagatggtgggcagcccagacaccgttgggatgaactacggcagctacatggaggagaagcacatgccacccccaaacatgaccacgaacgagcgcagagttatcgtgccagcagatcctacgctatggagtacagaccatgtgcggcagtggctggagtgggcggtgaaagaatatggccttccagacgtcaacatcttgttattccagaacatcgatgggaaggaactgtgcaagatgaccaaggacgacttccagaggctcacccccagctacaacgccgacatccttctctcacatctccactacctcagagagactcctcttccacatttgacttcagatgatgttgataaagccttacaaaactctccacggttaatgcatgctagaaacacagatttaccatatgagccccccaggagatcagcctggaccggtcacggccaccccacgccccagtcgaaagctgctcaaccatctccttccacagtgcccaaaactgaagaccagcgtcctcagttagatccttatcagattcttggaccaacaagtagccgccttgcaaatccaggcagtggccagatccagctttggcagttcctcctggagctcctgtcggacagctccaactccagctgcatcacctgggaaggcaccaacggggagttcaagatgacggatcccgacgaggtggcccggcgctggggagagcggaagagcaaacccaacatgaactacgataagctcagccgcgccctccgttactactatgacaagaacatcatgaccaaggtccatgggaagcgctacgcctacaagttcgacttccacgggatcgcccaggccctccagccccaccccccggagtcatctctgtacaagtacccctcagacctcccgtacatgggctcctatcacgcccacccacagaagatgaactttgtggcgccccaccctccagccctccccgtgacatcttccagtttttttgctgccccaaacccatactggaattcaccaactgggggtatataccccaacactaggctccccaccagccatatgccttctcatctgggcacttactactaaagacctggcggaggcttttcccatcagcgtgcattcaccagcccatcgccacaaactctatcggagaacatgaatcaaaagtgcctcaagaggaatgaaaaaagctttactggggctggggaaggaagccggggaagagatccaaagactcttgggagggagttactgaagtcttactacagaaatgaggaggatgctaaaaatgtcacgaatatggacatatcatctgtggactgaccttgtaaaagacagtgtatgtagaagcatgaagtcttaaggacaaagtgccaaagaaagtggtcttaagaaatgtataaactttagagtagagtttggaatcccactaatgcaaactgggatgaaactaaagcaatagaaacaacacagttttgacctaacataccgtttataatgccattttaaggaaaactacctgtatttaaaaatagaaacatatcaaaaacaagagaaaagacacgagagagactgtggcccatcaacagacgttgatatgcaactgcatggcatgtgctgttttggttgaaatcaaatacattccgtttgatggacagctgtcagctttctcaaactgtgaagatgacccaaagtttccaactcctttacagtattaccgggactatgaactaaaaggtgggactgaggatgtgtatagagtgagcgtgtgattgtagacagaggggtgaagaaggaggaggaagaggcagagaaggaggagaccagggctgggaaagaaacttctcaagcaatgaagactggactcaggacatttggggactgtgtacaatgagttatggagactcgagggttcatgcagtcagtgttataccaaacccagtgttaggagaaaggacacagcgtaatggagaaaggggaagtagtagaattcagaaacaaaaatgcgcatctctttctttgtttgtcaaatgaaaattttaactggaattgtctgatatttaagagaaacattcaggacctcatcattatgtgggggctttgttctccacagggtcaggtaagagatggccttcttggctgccacaatcagaaatcacgcaggcattttgggtaggcggcctccagttttcctttgagtcgcgaacgctgtgcgtttgtcagaatgaagtatacaagtcaatgtttttccccctttttatataataattatataacttatgcatttatacactacgagttgatctcggccagccaaagacacacgacaaaagagacaatcgatataatgtggccttgaattttaactctgtatgcttaatgtttacaatatgaagttattagttcttagaatgcagaatgtatgtaataaaataagcttggcctagcatggcaaatcagatttatacaggagtctgcatttgcactttttttagtgactaaagttgcttaatgaaaacatgtgctgaatgttgtggattttgtgttataatttactttgtccaggaacttgtgcaagggagagccaaggaaataggatgtttggcacccaaatggcgtcagcctctccaggtccttcttgcctcccctcctgtcttttatttctagccccttttggaacagaaggaccccgggtttcacattggagcctccatatttatgcctggaatggaaagaggcctatgaagctggggttgtcattgagaaattctagttcagcacctggtcacaaatcacccttaattcctgctatgattaaaatacatttgttgaacagtgaacaagctaccactcgtaaggcaaactgtattattactggcaaataaagcgtcatggatagctgcaatttctcactttacagaaacaagggataacgtctagatttgctgcggggtttctctttcaggagctctcactaggtagacagctttagtcctgctacatcagagttacctgggcactgtggcttgggattcactagccctgagcctgatgttgctggctatcccttgaagacaatgtttatttccataatctagagtcagtttccctgggcatcttttctttgaatcacaaatgctgccaaccttggtccaggtgaaggcaactcaaaaggtgaaaatacaaggtgaccgtgcgaaggcgctagccgaaacatcttagctgaataggtttctgaactggcccttttcatagctgtttcagggcctgtttttttcacgttgcagtccttttgctatgattatgtgaagttgccaaacctctgtgctgtggatgttttggcagtgggctttgaagtcggcaggacacgattaccaatgctcctgacaccccgtgtcatttggattagacggagcccaaccatccatcattttgcagcagcctgggaaggcccacaaagtgcccgtatctccttagggaaaataaataaatacaatcatgaaagctggcagttaggctgacccaaactgtgctaatggaaaagatcagtcatttttattttggaatgcaaagtcaagacacacctacattcttcatagaaatacacatttacttggataatcactcagttctctcttcaagactgtctcatgagcaagatcataaaaacaagacatgattatcatattcaattttaacagatgttttccattagatccctcaaccctccacccccagtccaggttattagcaagtcttatgagcaactgggataattttggataacatgataatactgagttccttcaaatacataattcttaaattgtttcaaaatggcattaactctctgttactgttgtaatctaattccaaagccccctccaggtcatattcataattgcatgaaccttttctctctgtttgtccctgtctcttggcttgccctgatgtatactcagactcctgtacaatcttactcctgctggcaagagatttgtcttcttttcttgtcttcaattggctttcgggccttgtatgtggtaaaatcaccaaatcacagtcaagactgtgtttttgttcctagtttgatgcccttatgtcccggaggggttcacaaagtgctttgtcaggactgctgcagttagaaggctcactgcttctcctaagccttctgcacagatgtggcacctgcaacccaggagcaggagccggaggagctgccctctgacagcaggtgcagcagagatggctacagctcaggagctgggaaggtgatggggcacagggaaagcacagatgttctgcagcgccccaaagtgacccattgcctggagaaagagaagaaaatattttttaaaaagctagtttatttagcttctcattaattcattcaaataaagtcgtgaggtgactaattagagaataaaaattactttggactactcaaaaatacaccaaa

SEQ ID NO: 4440 - DNA, 1868 bp, Homo sapiens
  source 1..1868: mol_type = genomic DNA
gctgagcccgtcggcgccgagggagttagtgcgacccggctcggcgcgcacggccaaggcacgcgcgctggcacacgcgggcgcggacacgcgcggacacacacgtgcgggacacgccctcccccgacggcggcgctaacctctcggttattccaggatctttggagacccgaggaaagccgtgttgaccaaaagcaagacaaatgactcacagagaaaaaagatggcagaaccaagggcaactaaagccgtcaggttctgaacagctggtagatgggctggcttactgaaggacatgattcagactgtcccggacccagcagctcatatcaaggaagccttatcagttgtgagtgaggaccagtcgttgtttgagtgtgcctacggaacgccacacctggctaagacagagatgaccgcgtcctcctccagcgactatggacagacttccaagatgagcccacgcgtccctcagcaggattggctgtctcaacccccagccagggtcaccatcaaaatggaatgtaaccctagccaggtgaatggctcaaggaactctcctgatgaatgcagtgtggccaaaggcgggaagatggtgggcagcccagacaccgttgggatgaactacggcagctacatggaggagaagcacatgccacccccaaacatgaccacgaacgagcgcagagttatcgtgccagcagatcctacgctatggagtacagaccatgtgcggcagtggctggagtgggcggtgaaagaatatggccttccagacgtcaacatcttgttattccagaacatcgatgggaaggaactgtgcaagatgaccaaggacgacttccagaggctcacccccagctacaacgccgacatccttctctcacatctccactacctcagagagactcctcttccacatttgacttcagatgatgttgataaagccttacaaaactctccacggttaatgcatgctagaaacacagggggtgcagcttttattttcccaaatacttcagtatatcctgaagctacgcaaagaattacaactaggccagatttaccatatgagccccccaggagatcagcctggaccggtcacggccaccccacgccccagtcgaaagctgctcaaccatctccttccacagtgcccaaaactgaagaccagcgtcctcagttagatccttatcagattcttggaccaacaagtagccgccttgcaaatccaggcagtggccagatccagctttggcagttcctcctggagctcctgtcggacagctccaactccagctgcatcacctgggaaggcaccaacggggagttcaagatgacggatcccgacgaggtggcccggcgctggggagagcggaagagcaaacccaacatgaactacgataagctcagccgcgccctccgttactactatgacaagaacatcatgaccaaggtccatgggaagcgctacgcctacaagttcgacttccacgggatcgcccaggccctccagccccaccccccggagtcatctctgtacaagtacccctcagacctcccgtacatgggctcctatcacgcccacccacagaagatgaactttgtggcgccccaccctccagccctccccgtgacatcttccagtttttttgctgccccaaacccatactggaattcaccaactgggggtatataccccaacactaggctccccaccagccatatgccttctcatctgggcacttactactaaagacctggcggaggcttttcccatcagcgtgcattcaccagcccatcgccacaaactctatcggagaacatgaatcaaaagtgcctcaagaggaatgaaaaaagctttactg

SEQ ID NO: 4441 - DNA, 5023 bp, Homo sapiens
  source 1..5023: mol_type = genomic DNA
cccccgagggacatgagagaagaggagcggcgctcaggttattccaggatctttggagacccgaggaaagccgtgttgaccaaaagcaagacaaatgactcacagagaaaaaagatggcagaaccaagggcaactaaagccgtcaggttctgaacagctggtagatgggctggcttactgaaggacatgattcagactgtcccggacccagcagctcatatcaaggaagccttatcagttgtgagtgaggaccagtcgttgtttgagtgtgcctacggaacgccacacctggctaagacagagatgaccgcgtcctcctccagcgactatggacagacttccaagatgagcccacgcgtccctcagcaggattggctgtctcaacccccagccagggtcaccatcaaaatggaatgtaaccctagccaggtgaatggctcaaggaactctcctgatgaatgcagtgtggccaaaggcgggaagatggtgggcagcccagacaccgttgggatgaactacggcagctacatggaggagaagcacatgccacccccaaacatgaccacgaacgagcgcagagttatcgtgccagcagatcctacgctatggagtacagaccatgtgcggcagtggctggagtgggcggtgaaagaatatggccttccagacgtcaacatcttgttattccagaacatcgatgggaaggaactgtgcaagatgaccaaggacgacttccagaggctcacccccagctacaacgccgacatccttctctcacatctccactacctcagagagactcctcttccacatttgacttcagatgatgttgataaagccttacaaaactctccacggttaatgcatgctagaaacacagggggtgcagcttttattttcccaaatacttcagtatatcctgaagctacgcaaagaattacaactaggccagatttaccatatgagccccccaggagatcagcctggaccggtcacggccaccccacgccccagtcgaaagctgctcaaccatctccttccacagtgcccaaaactgaagaccagcgtcctcagttagatccttatcagattcttggaccaacaagtagccgccttgcaaatccaggcagtggccagatccagctttggcagttcctcctggagctcctgtcggacagctccaactccagctgcatcacctgggaaggcaccaacggggagttcaagatgacggatcccgacgaggtggcccggcgctggggagagcggaagagcaaacccaacatgaactacgataagctcagccgcgccctccgttactactatgacaagaacatcatgaccaaggtccatgggaagcgctacgcctacaagttcgacttccacgggatcgcccaggccctccagccccaccccccggagtcatctctgtacaagtacccctcagacctcccgtacatgggctcctatcacgcccacccacagaagatgaactttgtggcgccccaccctccagccctccccgtgacatcttccagtttttttgctgccccaaacccatactggaattcaccaactgggggtatataccccaacactaggctccccaccagccatatgccttctcatctgggcacttactactaaagacctggcggaggcttttcccatcagcgtgcattcaccagcccatcgccacaaactctatcggagaacatgaatcaaaagtgcctcaagaggaatgaaaaaagctttactggggctggggaaggaagccggggaagagatccaaagactcttgggagggagttactgaagtcttactacagaaatgaggaggatgctaaaaatgtcacgaatatggacatatcatctgtggactgaccttgtaaaagacagtgtatgtagaagcatgaagtcttaaggacaaagtgccaaagaaagtggtcttaagaaatgtataaactttagagtagagtttggaatcccactaatgcaaactgggatgaaactaaagcaatagaaacaacacagttttgacctaacataccgtttataatgccattttaaggaaaactacctgtatttaaaaatagaaacatatcaaaaacaagagaaaagacacgagagagactgtggcccatcaacagacgttgatatgcaactgcatggcatgtgctgttttggttgaaatcaaatacattccgtttgatggacagctgtcagctttctcaaactgtgaagatgacccaaagtttccaactcctttacagtattaccgggactatgaactaaaaggtgggactgaggatgtgtatagagtgagcgtgtgattgtagacagaggggtgaagaaggaggaggaagaggcagagaaggaggagaccagggctgggaaagaaacttctcaagcaatgaagactggactcaggacatttggggactgtgtacaatgagttatggagactcgagggttcatgcagtcagtgttataccaaacccagtgttaggagaaaggacacagcgtaatggagaaaggggaagtagtagaattcagaaacaaaaatgcgcatctctttctttgtttgtcaaatgaaaattttaactggaattgtctgatatttaagagaaacattcaggacctcatcattatgtgggggctttgttctccacagggtcaggtaagagatggccttcttggctgccacaatcagaaatcacgcaggcattttgggtaggcggcctccagttttcctttgagtcgcgaacgctgtgcgtttgtcagaatgaagtatacaagtcaatgtttttccccctttttatataataattatataacttatgcatttatacactacgagttgatctcggccagccaaagacacacgacaaaagagacaatcgatataatgtggccttgaattttaactctgtatgcttaatgtttacaatatgaagttattagttcttagaatgcagaatgtatgtaataaaataagcttggcctagcatggcaaatcagatttatacaggagtctgcatttgcactttttttagtgactaaagttgcttaatgaaaacatgtgctgaatgttgtggattttgtgttataatttactttgtccaggaacttgtgcaagggagagccaaggaaataggatgtttggcacccaaatggcgtcagcctctccaggtccttcttgcctcccctcctgtcttttatttctagccccttttggaacagaaggaccccgggtttcacattggagcctccatatttatgcctggaatggaaagaggcctatgaagctggggttgtcattgagaaattctagttcagcacctggtcacaaatcacccttaattcctgctatgattaaaatacatttgttgaacagtgaacaagctaccactcgtaaggcaaactgtattattactggcaaataaagcgtcatggatagctgcaatttctcactttacagaaacaagggataacgtctagatttgctgcggggtttctctttcaggagctctcactaggtagacagctttagtcctgctacatcagagttacctgggcactgtggcttgggattcactagccctgagcctgatgttgctggctatcccttgaagacaatgtttatttccataatctagagtcagtttccctgggcatcttttctttgaatcacaaatgctgccaaccttggtccaggtgaaggcaactcaaaaggtgaaaatacaaggtgaccgtgcgaaggcgctagccgaaacatcttagctgaataggtttctgaactggcccttttcatagctgtttcagggcctgtttttttcacgttgcagtccttttgctatgattatgtgaagttgccaaacctctgtgctgtggatgttttggcagtgggctttgaagtcggcaggacacgattaccaatgctcctgacaccccgtgtcatttggattagacggagcccaaccatccatcattttgcagcagcctgggaaggcccacaaagtgcccgtatctccttagggaaaataaataaatacaatcatgaaagctggcagttaggctgacccaaactgtgctaatggaaaagatcagtcatttttattttggaatgcaaagtcaagacacacctacattcttcatagaaatacacatttacttggataatcactcagttctctcttcaagactgtctcatgagcaagatcataaaaacaagacatgattatcatattcaattttaacagatgttttccattagatccctcaaccctccacccccagtccaggttattagcaagtcttatgagcaactgggataattttggataacatgataatactgagttccttcaaatacataattcttaaattgtttcaaaatggcattaactctctgttactgttgtaatctaattccaaagccccctccaggtcatattcataattgcatgaaccttttctctctgtttgtccctgtctcttggcttgccctgatgtatactcagactcctgtacaatcttactcctgctggcaagagatttgtcttcttttcttgtcttcaattggctttcgggccttgtatgtggtaaaatcaccaaatcacagtcaagactgtgtttttgttcctagtttgatgcccttatgtcccggaggggttcacaaagtgctttgtcaggactgctgcagttagaaggctcactgcttctcctaagccttctgcacagatgtggcacctgcaacccaggagcaggagccggaggagctgccctctgacagcaggtgcagcagagatggctacagctcaggagctgggaaggtgatggggcacagggaaagcacagatgttctgcagcgccccaaagtgacccattgcctggagaaagagaagaaaatattttttaaaaagctagtttatttagcttctcattaattcattcaaataaagtcgtgaggtgactaattagagaataaaaattactttggactactcaaaaatacaccaaa

SEQ ID NO: 4442 - DNA, 924 bp, Homo sapiens
  source 1..924: mol_type = genomic DNA
attattaacatttattaacgatcaataaacttgatcgcattatggccagcactattaaggaagccttatcagttgtgagtgaggaccagtcgttgtttgagtgtgcctacggaacgccacacctggctaagacagagatgaccgcgtcctcctccagcgactatggacagacttccaagatgagcccacgcgtccctcagcaggattggctgtctcaacccccagccagggtcaccatcaaaatggaatgtaaccctagccaggtgaatggctcaaggaactctcctgatgaatgcagtgtggccaaaggcgggaagatggtgggcagcccagacaccgttgggatgaactacggcagctacatggaggagaagcacatgccacccccaaacatgaccacgaacgagcgcagagttatcgtgccagcagatttaccatatgagccccccaggagatcagcctggaccggtcacggccaccccacgccccagtcgaaaggtacagtgttggctcccatgaccctgagtttcatgtcacaggcagtggatgactgttgatggagtatataataatttctgtggttaatctgtgattttgcaacatgtgatgggtttgttccattgacgacaagagtacaattgatctttcactgcagtgattctttctccatttgggtcatcaggactttcataacaaaaataaaggaatgatgtagtgtatgtcaaccttcacaaatgcatgtttcatgggatgtttgagtacacattaaataatcggtgttttcctgaatcttggccatgcttaaaagtatccctggctttactttatttgactggtggtttccctttatgtgtttatcttagactatgatttattgtaatctgtttggtaagccattccaaattcttttttttttttactttt

SEQ ID NO: 4443 - DNA, 5034 bp, Homo sapiens
  source 1..5034: mol_type = genomic DNA
gttttcacttggtcggaatggggagagtgtgcaagagatcgctgcgggacaggttcctagagatcgctccgggacggtcgtgacggcccccgagggacatgagagaagaggagcggcgctcaggttattccaggatctttggagacccgaggaaagccgtgttgaccaaaagcaagacaaatgactcacagagaaaaaagatggcagaaccaagggcaactaaagccgtcaggttctgaacagctggtagatgggctggcttactgaaggacatgattcagactgtcccggacccagcagctcatatcaaggaagccttatcagttgtgagtgaggaccagtcgttgtttgagtgtgcctacggaacgccacacctggctaagacagagatgaccgcgtcctcctccagcgactatggacagacttccaagatgagcccacgcgtccctcagcaggattggctgtctcaacccccagccagggtcaccatcaaaatggaatgtaaccctagccaggtgaatggctcaaggaactctcctgatgaatgcagtgtggccaaaggcgggaagatggtgggcagcccagacaccgttgggatgaactacggcagctacatggaggagaagcacatgccacccccaaacatgaccacgaacgagcgcagagttatcgtgccagcagatcctacgctatggagtacagaccatgtgcggcagtggctggagtgggcggtgaaagaatatggccttccagacgtcaacatcttgttattccagaacatcgatgggaaggaactgtgcaagatgaccaaggacgacttccagaggctcacccccagctacaacgccgacatccttctctcacatctccactacctcagagagactcctcttccacatttgacttcagatgatgttgataaagccttacaaaactctccacggttaatgcatgctagaaacacagatttaccatatgagccccccaggagatcagcctggaccggtcacggccaccccacgccccagtcgaaagctgctcaaccatctccttccacagtgcccaaaactgaagaccagcgtcctcagttagatccttatcagattcttggaccaacaagtagccgccttgcaaatccaggcagtggccagatccagctttggcagttcctcctggagctcctgtcggacagctccaactccagctgcatcacctgggaaggcaccaacggggagttcaagatgacggatcccgacgaggtggcccggcgctggggagagcggaagagcaaacccaacatgaactacgataagctcagccgcgccctccgttactactatgacaagaacatcatgaccaaggtccatgggaagcgctacgcctacaagttcgacttccacgggatcgcccaggccctccagccccaccccccggagtcatctctgtacaagtacccctcagacctcccgtacatgggctcctatcacgcccacccacagaagatgaactttgtggcgccccaccctccagccctccccgtgacatcttccagtttttttgctgccccaaacccatactggaattcaccaactgggggtatataccccaacactaggctccccaccagccatatgccttctcatctgggcacttactactaaagacctggcggaggcttttcccatcagcgtgcattcaccagcccatcgccacaaactctatcggagaacatgaatcaaaagtgcctcaagaggaatgaaaaaagctttactggggctggggaaggaagccggggaagagatccaaagactcttgggagggagttactgaagtcttactacagaaatgaggaggatgctaaaaatgtcacgaatatggacatatcatctgtggactgaccttgtaaaagacagtgtatgtagaagcatgaagtcttaaggacaaagtgccaaagaaagtggtcttaagaaatgtataaactttagagtagagtttggaatcccactaatgcaaactgggatgaaactaaagcaatagaaacaacacagttttgacctaacataccgtttataatgccattttaaggaaaactacctgtatttaaaaatagaaacatatcaaaaacaagagaaaagacacgagagagactgtggcccatcaacagacgttgatatgcaactgcatggcatgtgctgttttggttgaaatcaaatacattccgtttgatggacagctgtcagctttctcaaactgtgaagatgacccaaagtttccaactcctttacagtattaccgggactatgaactaaaaggtgggactgaggatgtgtatagagtgagcgtgtgattgtagacagaggggtgaagaaggaggaggaagaggcagagaaggaggagaccagggctgggaaagaaacttctcaagcaatgaagactggactcaggacatttggggactgtgtacaatgagttatggagactcgagggttcatgcagtcagtgttataccaaacccagtgttaggagaaaggacacagcgtaatggagaaaggggaagtagtagaattcagaaacaaaaatgcgcatctctttctttgtttgtcaaatgaaaattttaactggaattgtctgatatttaagagaaacattcaggacctcatcattatgtgggggctttgttctccacagggtcaggtaagagatggccttcttggctgccacaatcagaaatcacgcaggcattttgggtaggcggcctccagttttcctttgagtcgcgaacgctgtgcgtttgtcagaatgaagtatacaagtcaatgtttttccccctttttatataataattatataacttatgcatttatacactacgagttgatctcggccagccaaagacacacgacaaaagagacaatcgatataatgtggccttgaattttaactctgtatgcttaatgtttacaatatgaagttattagttcttagaatgcagaatgtatgtaataaaataagcttggcctagcatggcaaatcagatttatacaggagtctgcatttgcactttttttagtgactaaagttgcttaatgaaaacatgtgctgaatgttgtggattttgtgttataatttactttgtccaggaacttgtgcaagggagagccaaggaaataggatgtttggcacccaaatggcgtcagcctctccaggtccttcttgcctcccctcctgtcttttatttctagccccttttggaacagaaggaccccgggtttcacattggagcctccatatttatgcctggaatggaaagaggcctatgaagctggggttgtcattgagaaattctagttcagcacctggtcacaaatcacccttaattcctgctatgattaaaatacatttgttgaacagtgaacaagctaccactcgtaaggcaaactgtattattactggcaaataaagcgtcatggatagctgcaatttctcactttacagaaacaagggataacgtctagatttgctgcggggtttctctttcaggagctctcactaggtagacagctttagtcctgctacatcagagttacctgggcactgtggcttgggattcactagccctgagcctgatgttgctggctatcccttgaagacaatgtttatttccataatctagagtcagtttccctgggcatcttttctttgaatcacaaatgctgccaaccttggtccaggtgaaggcaactcaaaaggtgaaaatacaaggtgaccgtgcgaaggcgctagccgaaacatcttagctgaataggtttctgaactggcccttttcatagctgtttcagggcctgtttttttcacgttgcagtccttttgctatgattatgtgaagttgccaaacctctgtgctgtggatgttttggcagtgggctttgaagtcggcaggacacgattaccaatgctcctgacaccccgtgtcatttggattagacggagcccaaccatccatcattttgcagcagcctgggaaggcccacaaagtgcccgtatctccttagggaaaataaataaatacaatcatgaaagctggcagttaggctgacccaaactgtgctaatggaaaagatcagtcatttttattttggaatgcaaagtcaagacacacctacattcttcatagaaatacacatttacttggataatcactcagttctctcttcaagactgtctcatgagcaagatcataaaaacaagacatgattatcatattcaattttaacagatgttttccattagatccctcaaccctccacccccagtccaggttattagcaagtcttatgagcaactgggataattttggataacatgataatactgagttccttcaaatacataattcttaaattgtttcaaaatggcattaactctctgttactgttgtaatctaattccaaagccccctccaggtcatattcataattgcatgaaccttttctctctgtttgtccctgtctcttggcttgccctgatgtatactcagactcctgtacaatcttactcctgctggcaagagatttgtcttcttttcttgtcttcaattggctttcgggccttgtatgtggtaaaatcaccaaatcacagtcaagactgtgtttttgttcctagtttgatgcccttatgtcccggaggggttcacaaagtgctttgtcaggactgctgcagttagaaggctcactgcttctcctaagccttctgcacagatgtggcacctgcaacccaggagcaggagccggaggagctgccctctgacagcaggtgcagcagagatggctacagctcaggagctgggaaggtgatggggcacagggaaagcacagatgttctgcagcgccccaaagtgacccattgcctggagaaagagaagaaaatattttttaaaaagctagtttatttagcttctcattaattcattcaaataaagtcgtgaggtgactaattagagaataaaaattactttggactactcaaaaatacacc

SEQ ID NO: 4444 - DNA, 1595 bp, Homo sapiens
  source 1..1595: mol_type = genomic DNA
tccgctctaaacaacctcatcaaaactactttctggtcagagagaagcaataattattattaacatttattaacgatcaataaacttgatcgcattatggccagcactattaaggaactctcctgatgaatgcagtgtggccaaaggcgggaagatggtgggcagcccagacaccgttgggatgaactacggcagctacatggaggagaagcacatgccacccccaaacatgaccacgaacgagcgcagagttatcgtgccagcagatcctacgctatggagtacagaccatgtgcggcagtggctggagtgggcggtgaaagaatatggccttccagacgtcaacatcttgttattccagaacatcgatgggaaggaactgtgcaagatgaccaaggacgacttccagaggctcacccccagctacaacgccgacatccttctctcacatctccactacctcagagagactcctcttccacatttgacttcagatgatgttgataaagccttacaaaactctccacggttaatgcatgctagaaacacagggggtgcagcttttattttcccaaatacttcagtatatcctgaagctacgcaaagaattacaactaggccagatttaccatatgagccccccaggagatcagcctggaccggtcacggccaccccacgccccagtcgaaagctgctcaaccatctccttccacagtgcccaaaactgaagaccagcgtcctcagttagatccttatcagattcttggaccaacaagtagccgccttgcaaatccaggcagtggccagatccagctttggcagttcctcctggagctcctgtcggacagctccaactccagctgcatcacctgggaaggcaccaacggggagttcaagatgacggatcccgacgaggtggcccggcgctggggagagcggaagagcaaacccaacatgaactacgataagctcagccgcgccctccgttactactatgacaagaacatcatgaccaaggtccatgggaagcgctacgcctacaagttcgacttccacgggatcgcccaggccctccagccccaccccccggagtcatctctgtacaagtacccctcagacctcccgtacatgggctcctatcacgcccacccacagaagatgaactttgtggcgccccaccctccagccctccccgtgacatcttccagtttttttgctgccccaaacccatactggaattcaccaactgggggtatataccccaacactaggctccccaccagccatatgccttctcatctgggcacttactactaaagacctggcggaggcttttcccatcagcgtgcattcaccagcccatcgccacaaactctatcggagaacatgaatcaaaagtgcctcaagaggaatgaaaaaagctttactggggctggggaaggaagccggggaagagatccaaagactcttgggagggagttactgaagtcttactacagaaatgaggaggatgctaaaaatgtcacgaatatggacatatcatctgtggactgaccttgtaaaagacagtgtatgtagaagcatgaagtcttaa

SEQ ID NO: 4445 - DNA, 3936 bp, Homo sapiens
  source 1..3936: mol_type = genomic DNA
agaatgatcattagtcctaagcccattcagaggttcaagaatggggtcggctcaatttcagggccttattacccaagcccggctgcccttcggtgccaccagcaccactgctccgtcgctgcggaattccaaaggcaggtttggcgttagggccttggccccagagaggacgccgagcgctccacggaaagtctccgcccggctcccagggcgcacactcgcgcgcacgtggggccgaggccctgctcccggggcctcagggccagccggcgagggacccagccgagtgacagcaggaggcggagggaagctcagagctcccggagccgcccggccagcgtccggcctccctgatcgtctctggccggcgccctcgccctcgcccggcgcgcaccgagcagccgcgggcgccgagcagccaccgtcccgaccaagcgccggccctgcccgcagcggcaggatgaatgatttcggaatcaagaatatggaccaggtagcccctgtggctaacagttacagagggacactcaagcgccagccagcctttgacacctttgatgggtccctgtttgctgtttttccttctctaaatgaagagcaaacactgcaagaagtgccaacaggcttggattccatttctcatgactccgccaactgtgaattgcctttgttaaccccgtgcagcaaggctgtgatgagtcaagccttaaaagctaccttcagtggcttcaaaaaggaacagcggcgcctgggcattccaaagaacccctggctgtggagtgagcaacaggtatgccagtggcttctctgggccaccaatgagttcagtctggtgaacgtgaatctgcagaggttcggcatgaatggccagatgctgtgtaaccttggcaaggaacgctttctggagctggcacctgactttgtgggtgacattctctgggaacatctggagcaaatgatcaaagaaaaccaagaaaagacagaagatcaatatgaagaaaattcacacctcacctccgttcctcattggattaacagcaatacattaggttttggcacagagcaggcgccctatggaatgcagacacagaattaccccaaaggcggcctcctggacagcatgtgtccggcctccacacccagcgtactcagctctgagcaggagtttcagatgttccccaagtctcggctcagctccgtcagcgtcacctactgctctgtcagtcaggacttcccaggcagcaacttgaatttgctcaccaacaattctgggactcccaaagaccacgactcccctgagaacggtgcggacagcttcgagagctcagactccctcctccagtcctggaacagccagtcgtccttgctggatgtgcaacgggttccttccttcgagagcttcgaagatgactgcagccagtctctctgcctcaataagccaaccatgtctttcaaggattacatccaagagaggagtgacccagtggagcaaggcaaaccagttatacctgcagctgtgctggccggcttcacaggaagtggacctattcagctgtggcagtttctcctggagctgctatcagacaaatcctgccagtcattcatcagctggactggagacggatgggagtttaagctcgccgaccccgatgaggtggcccgccggtggggaaagaggaaaaataagcccaagatgaactacgagaagctgagccggggcttacgctactattacgacaagaacatcatccacaagacgtcggggaagcgctacgtgtaccgcttcgtgtgcgacctccagaacttgctggggttcacgcccgaggaactgcacgccatcctgggcgtccagcccgacacggaggactgaggtcgccgggaccaccctgagccggccccaggctcgtggactgagtgggaagcccatcctgaccagctgctccgaggacccaggaaaggcaggattgaaaatgtccaggaaagtggccaagaagcagtggccttattgcatcccaaaccacgcctcttgaccaggctgcctcccttgtggcagcaacggcacagctaattctactcacagtgcttttaagtgaaaatggtcgagaaagaggcaccaggaagccgtcctggcgcctggcagtccgtgggacgggatggttctggctgtttgagattctcaaaggagcgagcatgtcgtggacacacacagactatttttagattttcttttgccttttgcaaccaggaacagcaaatgcaaaaactctttgagagggtaggagggtgggaaggaaacaaccatgtcatttcagaagttagtttgtatatattattataatcttataattgttctcagaatcccttaacagttgtatttaacagaaattgtatattgtaatttaaaataattatataactgtatttgaaataagaattcagacatctgaggttttatttcatttttcaatagcacatatggaattttgcaaagatttaatctgccaagggccgactaagagaagttgtaaagtatgtattatttacatttaatagacttacagggataaggcctgtggggggtaatccctgctttttgtgtttttttgtttgtttgtttgtttgtttttggggggttttcttgccttggttgtctggcaaggactttgtacatttgggagtttttatgagaaacttaaatgttattatctgggcttatatctggcctctgctttctcctttaattgtaaagtaaaagctataaagcagtatttttcttgacaaatggcatatgttttccacttctttgcatgcgtttaagtcagtttatacacaaaatggattttattttttagtttaactgtgtttctccgacagctcacctctctctgaccacccagccatttccttcctgtgctccacgttcttctgtgtgattaaaataagaatattatttttggaaatatgcaactccttttcagagatcaggagggatttatgtagcagctatttttactgcaaaagtaattcactggaaaaaaaatgtaatttgtaagaaagctttatttttatctcagctctatgtaaagttaaagttactgtacagagctgaaggacggggggcggtaggggtcttgatgaaacctcttgaacgaagcacagtttgtcccatctttgttcactcgtgtgtctcaaccatcttaatagcatgctgctcctttttgctcagtgtccacagcaagatgacgtgattcttattttcttggacacagactattctgaggcacagagcggggacttaagatgggaaagagaaagcatcggagccattcattcggagaaaacgttttgatcaaaatggagacttttgtagtcgtttcaaaagagcacctgagtcatgtgtattcccggcctttataaatgacccggtcaagttggtttcaaagtccgacaggcttgtctgtttactagctgcgtggccttggacgggtggctgacatctgtaaagaatcctcctgtgatgaaactgaggaatcgggtggccgggcaagctgggaagagcaaagccagagctgcgctgcctcaatacccacaaaagaccattcccagtatacataagcacaggatgtttttctcaagagggatgtatttatcacttggacatctgtttataatataaacagacatgtgactgggaacatcttgctgccaaaagaatcctaggcagtggctcattgtatgtgaggttgaaccacgtgaaattgccaatattaggctggcttttatctacaaagaaggagtttcatggggttcagcctaacagttatggaaactacagtccttataaaccattggcatggtaataaacagatcttaagtataaaaattttgtaattgggcctttactctctcaataataaagtattttgtttatataaa

SEQ ID NO: 4446 - DNA, 3766 bp, Homo sapiens
  source 1..3766: mol_type = genomic DNA
cgtttcctcccctcccctccactcggccgtccctccttcctcctccctcctccctcctcctcccgctcctgaagagcgcgccgcgtgggggacggcccggttacttcctccagagactgacgagtgcggtgtcgctccagctcagagctcccggagccgcccggccagcgtccggcctccctgatcgtctctggccggcgccctcgccctcgcccggcgcgcaccgagcagccgcgggcgccgagcagccaccgtcccgaccaagcgccggccctgcccgcagcggcaggatgaatgatttcggaatcaagaatatggaccaggtagcccctgtggctaacagttacagagggacactcaagcgccagccagcctttgacacctttgatgggtccctgtttgctgtttttccttctctaaatgaagagcaaacactgcaagaagtgccaacaggcttggattccatttctcatgactccgccaactgtgaattgcctttgttaaccccgtgcagcaaggctgtgatgagtcaagccttaaaagctaccttcagtggcttcaaaaaggaacagcggcgcctgggcattccaaagaacccctggctgtggagtgagcaacaggtatgccagtggcttctctgggccaccaatgagttcagtctggtgaacgtgaatctgcagaggttcggcatgaatggccagatgctgtgtaaccttggcaaggaacgctttctggagctggcacctgactttgtgggtgacattctctgggaacatctggagcaaatgatcaaagaaaaccaagaaaagacagaagatcaatatgaagaaaattcacacctcacctccgttcctcattggattaacagcaatacattaggttttggcacagagcaggcgccctatggaatgcagacacagaattaccccaaaggcggcctcctggacagcatgtgtccggcctccacacccagcgtactcagctctgagcaggagtttcagatgttccccaagtctcggctcagctccgtcagcgtcacctactgctctgtcagtcaggacttcccaggcagcaacttgaatttgctcaccaacaattctgggactcccaaagaccacgactcccctgagaacggtgcggacagcttcgagagctcagactccctcctccagtcctggaacagccagtcgtccttgctggatgtgcaacgggttccttccttcgagagcttcgaagatgactgcagccagtctctctgcctcaataagccaaccatgtctttcaaggattacatccaagagaggagtgacccagtggagcaaggcaaaccagttatacctgcagctgtgctggccggcttcacaggaagtggacctattcagctgtggcagtttctcctggagctgctatcagacaaatcctgccagtcattcatcagctggactggagacggatgggagtttaagctcgccgaccccgatgaggtggcccgccggtggggaaagaggaaaaataagcccaagatgaactacgagaagctgagccggggcttacgctactattacgacaagaacatcatccacaagacgtcggggaagcgctacgtgtaccgcttcgtgtgcgacctccagaacttgctggggttcacgcccgaggaactgcacgccatcctgggcgtccagcccgacacggaggactgaggtcgccgggaccaccctgagccggccccaggctcgtggactgagtgggaagcccatcctgaccagctgctccgaggacccaggaaaggcaggattgaaaatgtccaggaaagtggccaagaagcagtggccttattgcatcccaaaccacgcctcttgaccaggctgcctcccttgtggcagcaacggcacagctaattctactcacagtgcttttaagtgaaaatggtcgagaaagaggcaccaggaagccgtcctggcgcctggcagtccgtgggacgggatggttctggctgtttgagattctcaaaggagcgagcatgtcgtggacacacacagactatttttagattttcttttgccttttgcaaccaggaacagcaaatgcaaaaactctttgagagggtaggagggtgggaaggaaacaaccatgtcatttcagaagttagtttgtatatattattataatcttataattgttctcagaatcccttaacagttgtatttaacagaaattgtatattgtaatttaaaataattatataactgtatttgaaataagaattcagacatctgaggttttatttcatttttcaatagcacatatggaattttgcaaagatttaatctgccaagggccgactaagagaagttgtaaagtatgtattatttacatttaatagacttacagggataaggcctgtggggggtaatccctgctttttgtgtttttttgtttgtttgtttgtttgtttttggggggttttcttgccttggttgtctggcaaggactttgtacatttgggagtttttatgagaaacttaaatgttattatctgggcttatatctggcctctgctttctcctttaattgtaaagtaaaagctataaagcagtatttttcttgacaaatggcatatgttttccacttctttgcatgcgtttaagtcagtttatacacaaaatggattttattttttagtttaactgtgtttctccgacagctcacctctctctgaccacccagccatttccttcctgtgctccacgttcttctgtgtgattaaaataagaatattatttttggaaatatgcaactccttttcagagatcaggagggatttatgtagcagctatttttactgcaaaagtaattcactggaaaaaaaatgtaatttgtaagaaagctttatttttatctcagctctatgtaaagttaaagttactgtacagagctgaaggacggggggcggtaggggtcttgatgaaacctcttgaacgaagcacagtttgtcccatctttgttcactcgtgtgtctcaaccatcttaatagcatgctgctcctttttgctcagtgtccacagcaagatgacgtgattcttattttcttggacacagactattctgaggcacagagcggggacttaagatgggaaagagaaagcatcggagccattcattcggagaaaacgttttgatcaaaatggagacttttgtagtcgtttcaaaagagcacctgagtcatgtgtattcccggcctttataaatgacccggtcaagttggtttcaaagtccgacaggcttgtctgtttactagctgcgtggccttggacgggtggctgacatctgtaaagaatcctcctgtgatgaaactgaggaatcgggtggccgggcaagctgggaagagcaaagccagagctgcgctgcctcaatacccacaaaagaccattcccagtatacataagcacaggatgtttttctcaagagggatgtatttatcacttggacatctgtttataatataaacagacatgtgactgggaacatcttgctgccaaaagaatcctaggcagtggctcattgtatgtgaggttgaaccacgtgaaattgccaatattaggctggcttttatctacaaagaaggagtttcatggggttcagcctaacagttatggaaactacagtccttataaaccattggcatggtaataaacagatcttaagtataaaaattttgtaattgggcctttactctctcaataataaagtattttgtttatataaa

SEQ ID NO: 4447 - DNA, 1033 bp, Homo sapiens
  source 1..1033: mol_type = genomic DNA
cgagtgcggtgtcgctccagctcagagctcccggagccgcccggccagcgtccggcctccctgatcgtctctggccggcgccctcgccctcgcccggcgcgcaccgagcagccgcgggcgccgagcagccaccgtcccgaccaagcgccggccctgcccgcagcggcagggaaacgcaggcctggtagggggtcctgcccagtggatgtcccggcgaacatgatttcgcgaacgggagtgggggcacaggagagcgtgtccgaggtggcctggcgccccggctttgagggtgacttcctggagcggcgccgggcccggaggatctggggcgcccaagacacctgaaggctgcggcaccgcgggaacctgcggggcgcggggtgccatggtcacctgctcgccgcgtccagggcccgggctggggacccctcggtcgtgcgaggagagcgtggggaacctgtcggaaatgagatctggttgcgctgggctgcctttattttctcgttcctacagcatttgaatgaagagatgaatgatttcggaatcaagaatatggaccaggtagcccctgtggctaacagttacagagggacactcaagcgccagccagcctttgacacctttgatgggtccctgtttgctgtttttccttctctaaatgaagagcaaacactgcaagaagtgccaacaggcttggattccatttctcatgactccgccaactgtgaattgcctttgttaaccccgtgcagcaaggctgtgatgagtcaagccttaaaagctaccttcagtggcttcaaaaaggaacagcggcgcctgggcattccaaagaacccctggctgtggagtgagcaacaggtatgccagtggcttctctgggccaccaatgagttcagtctggtgaacgtgaatctgcagaggttcggcatgaatggccagatgctgtgtaaccttggcaaggaacgctttctggagctggcacctgactttgtgggtgacattctctgggaacatctggagcaaatgatcaaag

SEQ ID NO: 4448 - DNA, 972 bp, Homo sapiens
  source 1..972: mol_type = genomic DNA
gcccactgccccactgtacccacccaagcactcacctaagctggccatggaaatgtgaatgaaaagcctgacccaggccctcttgccctgctaacccagcaaggaggctctgaccagccagccagcaagtgactttttctgtgacatctaagtggaattcaatgaatgatttcggaatcaagaatatggaccaggtagcccctgtggctaacagttacagagggacactcaagcgccagccagcctttgacacctttgatgggtccctgtttgctgtttttccttctctaaatgaagagcaaacactgcaagaagtgccaacaggcttggattccatttctcatgactccgccaactgtgaattgcctttgttaaccccgtgcagcaaggctgtgatgagtcaagccttaaaagctaccttcagtggcttcaaaaaggaacagcggcgcctgggcattccaaagaacccctggctgtggagtgagcaacaggtatgccagtggcttctctgggccaccaatgagttcagtctggtgaacgtgaatctgcagaggttcggcatgaatggccagatgctgtgtaaccttggcaaggaacgctttctggagctggcacctgactttgtgggtgacattctctgggaacatctggagcaaatgatcaaagaaaaccaagaaaagacagaagatcaatatgaagaaaattcacacctcacctccgttcctcattggattaacagcaatacattaggttttggcacagagcaggcgccctatggaatgcagacacagaattaccccaaaggcggcctcctggacagcatgtgtccggcctccacacccagcgtactcagctctgagcaggagtttcagatgttccccaagtctcggctcagctccgtcagcgtcacctactgctctgtcagtcaggacttcccaggcagcaacttgaatttgctcaccaacaattctg

SEQ ID NO: 4449 - DNA, 894 bp, Homo sapiens
  source 1..894: mol_type = genomic DNA
cccgagccgcacccgccgcggacggagcccatgcgcggggcgaaccgcgcgcccccgcccccgccccgccccggcctcggccccggccctggccccgggggcagtcgcgcctgtgaacggtggggcaggagaccctgtaggaggaccccgggccgcaggcccctgaggagcgatgacggaatataagctggtggtggtgggcgccggcggtgtgggcaagagtgcgctgaccatccagctgatccagaaccattttgtggacgaatacgaccccactatagaggattcctaccggaagcaggtggtcattgatggggagacgtgcctgttggacatcctggataccgccggccaggaggagtacagcgccatgcgggaccagtacatgcgcaccggggagggcttcctgtgtgtgtttgccatcaacaacaccaagtcttttgaggacatccaccagtacagggagcagatcaaacgggtgaaggactcggatgacgtgcccatggtgctggtggggaacaagtgtgacctggctgcacgcactgtggaatctcggcaggctcaggacctcgcccgaagctacggcatcccctacatcgagacctcggccaagacccggcagggagtggaggatgccttctacacgttggtgcgtgagatccggcagcacaagctgcggaagctgaaccctcctgatgagagtggccccggctgcatgagctgcaagtgtgtgctctcctgacgcagcacaagctcaggacatggaggtgccggatgcaggaaggaggtgcagacggaaggaggaggaaggaaggacggaagcaaggaaggaaggaagggctgctggagcccagtcaccccgggaccgtgggccgaggtgactgcagaccctcc

SEQ ID NO: 4450 - DNA, 1099 bp, Homo sapiens
  source 1..1099: mol_type = genomic DNA
gtggggcaggagaccctgtaggaggaccccgggccgcaggcccctgaggagcgatgacggaatataagctggtggtggtgggcgccggcggtgtgggcaagagtgcgctgaccatccagctgatccagaaccattttgtggacgaatacgaccccactatagaggattcctaccggaagcaggtggtcattgatggggagacgtgcctgttggacatcctggataccgccggccaggaggagtacagcgccatgcgggaccagtacatgcgcaccggggagggcttcctgtgtgtgtttgccatcaacaacaccaagtcttttgaggacatccaccagtacagggagcagatcaaacgggtgaaggactcggatgacgtgcccatggtgctggtggggaacaagtgtgacctggctgcacgcactgtggaatctcggcaggctcaggacctcgcccgaagctacggcatcccctacatcgagacctcggccaagacccggcagggcagccgctctggctctagctccagctccgggaccctctgggaccccccgggacccatgtgacccagcggcccctcgcgctggagtggaggatgccttctacacgttggtgcgtgagatccggcagcacaagctgcggaagctgaaccctcctgatgagagtggccccggctgcatgagctgcaagtgtgtgctctcctgacgcaggtgagggggactcccagggcggccgccacgcccaccggatgaccccggctccccgcccctgccggtctcctggcctgcggtcagcagcctcccttgtgccccgcccagcacaagctcaggacatggaggtgccggatgcaggaaggaggtgcagacggaaggaggaggaaggaaggacggaagcaaggaaggaaggaagggctgctggagcccagtcaccccgggaccgtgggccgaggtgactgcagaccctcccagggaggctgtgcacagactgtcttgaacatcccaaatgccaccggaaccccagcccttagctcccctcccaggcctctgtgggcccttgtcgggcacagatgggatcacagtaaattattggatggtcttga

SEQ ID NO: 4451 - DNA, 1100 bp, Homo sapiens
  source 1..1100: mol_type = genomic DNA
gggggcgcggggccggcgggcgtaagcggcggcggcggcggcggcggcgggtgggtggggccgggcggggcccgcgggcacaggtggggcaggagaccctgtaggaggaccccgggccgcaggcccctgaggagcgatgacggaatataagctggtggtggtgggcgccggcggtgtgggcaagagtgcgctgaccatccagctgatccagaaccattttgtggacgaatacgaccccactatagaggattcctaccggaagcaggtggtcattgatggggagacgtgcctgttggacatcctggataccgccggccaggaggagtacagcgccatgcgggaccagtacatgcgcaccggggagggcttcctgtgtgtgtttgccatcaacaacaccaagtcttttgaggacatccaccagtacagggagcagatcaaacgggtgaaggactcggatgacgtgcccatggtgctggtggggaacaagtgtgacctggctgcacgcactgtggaatctcggcaggctcaggacctcgcccgaagctacggcatcccctacatcgagacctcggccaagacccggcagggagtggaggatgccttctacacgttggtgcgtgagatccggcagcacaagctgcggaagctgaaccctcctgatgagagtggccccggctgcatgagctgcaagtgtgtgctctcctgacgcaggtgagggggactcccagggcggccgccacgcccaccggatgaccccggctccccgcccctgccggtctcctggcctgcggtcagcagcctcccttgtgccccgcccagcacaagctcaggacatggaggtgccggatgcaggaaggaggtgcagacggaaggaggaggaaggaaggacggaagcaaggaaggaaggaagggctgctggagcccagtcaccccgggaccgtgggccgaggtgactgcagaccctcccagggaggctgtgcacagactgtcttgaacatcccaaatgccaccggaaccccagcccttagctcccctcccaggcctctgtgggcccttgtcgggcacagatgggatcacagtaaattattggatggtcttga

SEQ ID NO: 4452 - DNA, 1233 bp, Homo sapiens
  source 1..1233: mol_type = genomic DNA
tgccctgcgcccgcaacccgagccgcacccgccgcggacggagcccatgcgcggggcgaaccgcgcgcccccgcccccgccccgccccggcctcggccccggccctggccccgggggcagtcgcgcctgtgaacggtggggcaggagaccctgtaggaggaccccgggccgcaggcccctgaggagcgatgacggaatataagctggtggtggtgggcgccggcggtgtgggcaagagtgcgctgaccatccagctgatccagaaccattttgtggacgaatacgaccccactatagaggattcctaccggaagcaggtggtcattgatggggagacgtgcctgttggacatcctggataccgccggccaggaggagtacagcgccatgcgggaccagtacatgcgcaccggggagggcttcctgtgtgtgtttgccatcaacaacaccaagtcttttgaggacatccaccagtacagggagcagatcaaacgggtgaaggactcggatgacgtgcccatggtgctggtggggaacaagtgtgacctggctgcacgcactgtggaatctcggcaggctcaggacctcgcccgaagctacggcatcccctacatcgagacctcggccaagacccggcagggcagccgctctggctctagctccagctccgggaccctctgggaccccccgggacccatgtgacccagcggcccctcgcgctggagtggaggatgccttctacacgttggtgcgtgagatccggcagcacaagctgcggaagctgaaccctcctgatgagagtggccccggctgcatgagctgcaagtgtgtgctctcctgacgcaggtgagggggactcccagggcggccgccacgcccaccggatgaccccggctccccgcccctgccggtctcctggcctgcggtcagcagcctcccttgtgccccgcccagcacaagctcaggacatggaggtgccggatgcaggaaggaggtgcagacggaaggaggaggaaggaaggacggaagcaaggaaggaaggaagggctgctggagcccagtcaccccgggaccgtgggccgaggtgactgcagaccctcccagggaggctgtgcacagactgtcttgaacatcccaaatgccaccggaaccccagcccttagctcccctcccaggcctctgtgggcccttgtcgggcacagatgggatcacagtaaattattggatggtcttg

SEQ ID NO: 4453 - DNA, 1151 bp, Homo sapiens
  source 1..1151: mol_type = genomic DNA
tgccctgcgcccgcaacccgagccgcacccgccgcggacggagcccatgcgcggggcgaaccgcgcgcccccgcccccgccccgccccggcctcggccccggccctggccccgggggcagtcgcgcctgtgaacggtggggcaggagaccctgtaggaggaccccgggccgcaggcccctgaggagcgatgacggaatataagctggtggtggtgggcgccggcggtgtgggcaagagtgcgctgaccatccagctgatccagaaccattttgtggacgaatacgaccccactatagaggattcctaccggaagcaggtggtcattgatggggagacgtgcctgttggacatcctggataccgccggccaggaggagtacagcgccatgcgggaccagtacatgcgcaccggggagggcttcctgtgtgtgtttgccatcaacaacaccaagtcttttgaggacatccaccagtacagggagcagatcaaacgggtgaaggactcggatgacgtgcccatggtgctggtggggaacaagtgtgacctggctgcacgcactgtggaatctcggcaggctcaggacctcgcccgaagctacggcatcccctacatcgagacctcggccaagacccggcagggagtggaggatgccttctacacgttggtgcgtgagatccggcagcacaagctgcggaagctgaaccctcctgatgagagtggccccggctgcatgagctgcaagtgtgtgctctcctgacgcaggtgagggggactcccagggcggccgccacgcccaccggatgaccccggctccccgcccctgccggtctcctggcctgcggtcagcagcctcccttgtgccccgcccagcacaagctcaggacatggaggtgccggatgcaggaaggaggtgcagacggaaggaggaggaaggaaggacggaagcaaggaaggaaggaagggctgctggagcccagtcaccccgggaccgtgggccgaggtgactgcagaccctcccagggaggctgtgcacagactgtcttgaacatcccaaatgccaccggaaccccagcccttagctcccctcccaggcctctgtgggcccttgtcgggcacagatgggatcacagtaaattattggatggtcttg

SEQ ID NO: 4454 - DNA, 1114 bp, Homo sapiens
  source 1..1114: mol_type = genomic DNA
gcaacccgagccgcacccgccgcggacggagcccatgcgcggggcgaaccgcgcgcccccgcccccgccccgccccggcctcggccccggccctggccccgggggcagtcgcgcctgtgaacggtggggcaggagaccctgtaggaggaccccgggccgcaggcccctgaggagcgatgacggaatataagctggtggtggtgggcgccggcggtgtgggcaagagtgcgctgaccatccagctgatccagaaccattttgtggacgaatacgaccccactatagaggattcctaccggaagcaggtggtcattgatggggagacgtgcctgttggacatcctggataccgccggccaggaggagtacagcgccatgcgggaccagtacatgcgcaccggggagggcttcctgtgtgtgtttgccatcaacaacaccaagtcttttgaggacatccaccagtacagggagcagatcaaacgggtgaaggactcggatgacgtgcccatggtgctggtggggaacaagtgtgacctggctgcacgcactgtggaatctcggcaggctcaggacctcgcccgaagctacggcatcccctacatcgagacctcggccaagacccggcagggcagccgctctggctctagctccagctccgggaccctctgggaccccccgggacccatgtgacccagcggcccctcgcgctggagtggaggatgccttctacacgttggtgcgtgagatccggcagcacaagctgcggaagctgaaccctcctgatgagagtggccccggctgcatgagctgcaagtgtgtgctctcctgacgcagcacaagctcaggacatggaggtgccggatgcaggaaggaggtgcagacggaaggaggaggaaggaaggacggaagcaaggaaggaaggaagggctgctggagcccagtcaccccgggaccgtgggccgaggtgactgcagaccctcccagggaggctgtgcacagactgtcttgaacatcccaaatgccaccggaaccccagcccttagctcccctcccaggcctctgtgggcccttgtcgggcacagatgggatcacagtaaattattggatggtcttga

SEQ ID NO: 4455 - DNA, 1868 bp, Homo sapiens
  source 1..1868: mol_type = genomic DNA
ctctgccactctcgctccgaggtccccgcgccagagacgcagccgcgctcccaccacccacacccaccgcgccctcgttcgcctcttctccgggagccagtccgcgccaccgccgccgcccaggccatcgccaccctccgcagccatgtccaccaggtccgtgtcctcgtcctcctaccgcaggatgttcggcggcccgggcaccgcgagccggccgagctccagccggagctacgtgactacgtccacccgcacctacagcctgggcagcgcgctgcgccccagcaccagccgcagcctctacgcctcgtccccgggcggcgtgtatgccacgcgctcctctgccgtgcgcctgcggagcagcgtgcccggggtgcggctcctgcaggactcggtggacttctcgctggccgacgccatcaacaccgagttcaagaacacccgcaccaacgagaaggtggagctgcaggagctgaatgaccgcttcgccaactacatcgacaaggtgcgcttcctggagcagcagaataagatcctgctggccgagctcgagcagctcaagggccaaggcaagtcgcgcctgggggacctctacgaggaggagatgcgggagctgcgccggcaggtggaccagctaaccaacgacaaagcccgcgtcgaggtggagcgcgacaacctggccgaggacatcatgcgcctccgggagaaattgcaggaggagatgcttcagagagaggaagccgaaaacaccctgcaatctttcagacaggatgttgacaatgcgtctctggcacgtcttgaccttgaacgcaaagtggaatctttgcaagaagagattgcctttttgaagaaactccacgaagaggaaatccaggagctgcaggctcagattcaggaacagcatgtccaaatcgatgtggatgtttccaagcctgacctcacggctgccctgcgtgacgtacgtcagcaatatgaaagtgtggctgccaagaacctgcaggaggcagaagaatggtacaaatccaagtttgctgacctctctgaggctgccaaccggaacaatgacgccctgcgccaggcaaagcaggagtccactgagtaccggagacaggtgcagtccctcacctgtgaagtggatgcccttaaaggaaccaatgagtccctggaacgccagatgcgtgaaatggaagagaactttgccgttgaagctgctaactaccaagacactattggccgcctgcaggatgagattcagaatatgaaggaggaaatggctcgtcaccttcgtgaataccaagacctgctcaatgttaagatggcccttgacattgagattgccacctacaggaagctgctggaaggcgaggagagcaggatttctctgcctcttccaaacttttcctccctgaacctgagggaaactaatctggattcactccctctggttgatacccactcaaaaaggacacttctgattaagacggttgaaactagagatggacaggttatcaacgaaacttctcagcatcacgatgaccttgaataaaaattgcacacactcagtgcagcaatatattaccagcaagaataaaaaagaaatccatatcttaaagaaacagctttcaagtgcctttctgcagtttttcaggagcgcaagatagatttggaataggaataagctctagttcttaacaaccgacactcctacaagatttagaaaaaagtttacaacataatctagtttacagaaaaatcttgtgctagaatactttttaaaaggtattttgaataccattaaaactgcttttttttttccagcaagtatccaaccaacttggttctgcttcaataaatctttggaaaaactc

SEQ ID NO: 4456 - DNA, 753 bp, Homo sapiens
  source 1..753: mol_type = genomic DNA
ggtttcctcgttcccctttggttaatgcgcaactgtttcagattgcaggaggagatgcttcagagagaggaagccgaaaacaccctgcaatctttcagacaggatgttgacaatgcgtctctggcacgtcttgaccttgaacgcaaagtggaatctttgcaagaagagattgcctttttgaagaaactccacgaagaggaaatccaggagctgcaggctcagattcaggaacagcatgtccaaatcgatgtggatgtttccaagcctgacctcacggctgccctgcgtgacgtacgtcagcaatatgaaagtgtggctgccaagaacctgcaggaggcagaagaatggtacaaatccaagtttgctgacctctctgaggctgccaaccggaacaatgacgccctgcgccaggcaaagcaggagtccactgagtaccggagacaggtgcagtccctcacctgtgaagtggatgcccttaaaggaaccgtgagtaccaaccctgcagtaaaagagggaaaataatgacccattctgctgactaggctcatgatgatacctgaacaaaatgttgagtgagtaaaaatgtatatcataatgcaaagaaaatgagttatcaagacagactcaaaagggacttcatggaactcttgaaggttttagcttgcctatatcattgcttctaatatgaaggacttggtactcgcattctccacctaaaattagagtggtcgccatttgccgctaatggaaatt

SEQ ID NO: 4457 - DNA, 2666 bp, Homo sapiens
  source 1..2666: mol_type = genomic DNA
aagtagctgggcctcgggagggggctggagggagaggggaacgcccccccggcccccgcgagagctgccacgcccttggggatgtggccggggggaggcctgccagggagacagcggagagcggggctgtggctgtggtggcgcagccccgcccagaacccagaccttgcagttcgcatttcctcctctgtccccacacattgcccaaggacgctccgtttcaagttacagatttcttaaaactaccactttgtgtgcagttgaaggcccttgggcacaatgagagccagtcctccaaactttcagaaagtttcctgccccttctggcaggctgccaatcaccgggcgggagaaggaaggaggggaaggcggtggagggagcgagacaaagggatggtccctcgggggcggggatggcggggctgtcctgtaggtctgtgcggccaccgtgattgcccctctgcgcggtgcccgaagtcccgctgaaacctgccgagggcagcaggtctgaaagctgcaggcgctagttgcgcggaggtggcgcagctgctctggaggcgcagagcgaatacgtggtgtttgggtgtggccgccccgcccctggcggtttcctcgttcccctttggttaatgcgcaactgtttcagattgcaggaggagatgcttcagagagaggaagccgaaaacaccctgcaatctttcagacaggatgttgacaatgcgtctctggcacgtcttgaccttgaacgcaaagtggaatctttgcaagaagagattgcctttttgaagaaactccacgaagaggaaatccaggagctgcaggctcagattcaggaacagcatgtccaaatcgatgtggatgtttccaagcctgacctcacggctgccctgcgtgacgtacgtcagcaatatgaaagtgtggctgccaagaacctgcaggaggcagaagaatggtacaaatccaagtttgctgacctctctgaggctgccaaccggaacaatgacgccctgcgccaggcaaagcaggagtccactgagtaccggagacaggtgcagtccctcacctgtgaagtggatgcccttaaaggaaccaatgagtccctggaacgccagatgcgtgaaatggaagagaactttgccgttgaagctgctaactaccaagacactattggccgcctgcaggatgagattcagaatatgaaggaggaaatggctcgtcaccttcgtgaataccaagacctgctcaatgttaagatggcccttgacattgagattgccacctacaggaagctgctggaaggcgaggagagcaggtagggaactcagacttggatgcgtgaactaatggtgaccatttgttaggccctgtgccactgggctctaagcagtgtcacatttaatctttagaaagtttctttgaggtaactgctttccactttttgtagaggaggaatttgaattgagagagagtaagtgacttgctgaaaaagggttaatcaacagcagagctgggatttgaacccataactctgtcaaagcctccactcctaactcctgttcatgctcctgtggagaaaatgcttgtagtaacatattttaaatgtactaacaagaccagtcatgggaaaatgtttctgagacaaatctctagtttatgatttaaaacagtacgttttcttacgtgacgaaaacaaaaagtgtgttaatttgttcccagtggttgaagttatttgccaacaattttactgtttctcttcatctgtttataggatttctctgcctcttccaaacttttcctccctgaacctgaggggtaagcattttatttccctttaggaaaaacgtcagctgcttgtaaccactgtgtttatgtcaaagcattcattttttttaggatatctgaaaaaatgccatataagagaaaactctataaaacatctataattttcgaacccaagtacactcttgcattctatgctttaagttaaatgcaaactcctttttccttcttcctgctgcaagtactatctcatcctgatgctcaagagtgtcagggcctgggtttccaaacagagactaccctaaaattatttggcgagtagtactttacacaattgcctctcccccacaaatcataattgtttcagtaaaatggttacttggtttttccaagaaaaaactcgtttttactcatttttggcctgtttgtttatttagaaactaatctggattcactccctctggttgatacccactcaaaaaggacacttctgattaagacggttgaaactagagatggacaggttatcaacgaaacttctcagcatcacgatgaccttgaataaaaattgcacacactcagtgcagcaatatattaccagcaagaataaaaaagaaatccatatcttaaagaaacagctttcaagtgcctttctgcagtttttcaggagcgcaagatagatttggaataggaataagctctagttcttaacaaccgacactcctacaagatttagaaaaaagtttacaacataatctagtttacagaaaaatcttgtgctagaatactttttaaaaggtattttgaataccattaaaactgcttttttttttccagcaagtatccaaccaacttggttctgcttcaataaatctttggaaaaactc

SEQ ID NO: 4458 - DNA, 2272 bp, Homo sapiens
  source 1..2272: mol_type = genomic DNA
ctctgccactctcgctccgaggtccccgcgccagagacgcagccgcgctcccaccacccacacccaccgcgccctcgttcgcctcttctccgggagccagtccgcgccaccgccgccgcccaggccatcgccaccctccgcagccatgtccaccaggtccgtgtcctcgtcctcctaccgcaggatgttcggcggcccgggcaccgcgagccggccgagctccagccggagctacgtgactacgtccacccgcacctacagcctgggcagcgcgctgcgccccagcaccagccgcagcctctacgcctcgtccccgggcggcgtgtatgccacgcgctcctctgccgtgcgcctgcggagcagcgtgcccggggtgcggctcctgcaggactcggtggacttctcgctggccgacgccatcaacaccgagttcaagaacacccgcaccaacgagaaggtggagctgcaggagctgaatgaccgcttcgccaactacatcgacaaggtgcgcttcctggagcagcagaataagatcctgctggccgagctcgagcagctcaagggccaaggcaagtcgcgcctgggggacctctacgaggaggagatgcgggagctgcgccggcaggtggaccagctaaccaacgacaaagcccgcgtcgaggtggagcgcgacaacctggccgaggacatcatgcgcctccgggagaaattgcaggaggagatgcttcagagagaggaagccgaaaacaccctgcaatctttcagacaggatgttgacaatgcgtctctggcacgtcttgaccttgaacgcaaagtggaatctttgcaagaagagattgcctttttgaagaaactccacgaagaggaaatccaggagctgcaggctcagattcaggaacagcatgtccaaatcgatgtggatgtttccaagcctgacctcacggctgccctgcgtgacgtacgtcagcaatatgaaagtgtggctgccaagaacctgcaggaggcagaagaatggtacaaatccaagtttgctgacctctctgaggctgccaaccggaacaatgacgccctgcgccaggcaaagcaggagtccactgagtaccggagacaggtgcagtccctcacctgtgaagtggatgcccttaaaggaaccaatgagtccctggaacgccagatgcgtgaaatggaagagaactttgccgttgaagctgctaactaccaagacactattggccgcctgcaggatgagattcagaatatgaaggaggaaatggctcgtcaccttcgtgaataccaagacctgctcaatgttaagatggcccttgacattgagattgccacctacaggaagctgctggaaggcgaggagagcaggatttctctgcctcttccaaacttttcctccctgaacctgaggggtaagcattttatttccctttaggaaaaacgtcagctgcttgtaaccactgtgtttatgtcaaagcattcattttttttaggatatctgaaaaaatgccatataagagaaaactctataaaacatctataattttcgaacccaagtacactcttgcattctatgctttaagttaaatgcaaactcctttttccttcttcctgctgcaagtactatctcatcctgatgctcaagagtgtcagggcctgggtttccaaacagagactaccctaaaattatttggcgagtagtactttacacaattgcctctcccccacaaatcataattgtttcagtaaaatggttacttggtttttccaagaaaaaactcgtttttactcatttttggcctgtttgtttatttagaaactaatctggattcactccctctggttgatacccactcaaaaaggacacttctgattaagacggttgaaactagagatggacaggttatcaacgaaacttctcagcatcacgatgaccttgaataaaaattgcacacactcagtgcagcaatatattaccagcaagaataaaaaagaaatccatatcttaaagaaacagctttcaagtgcctttctgcagtttttcaggagcgcaagatagatttggaataggaataagctctagttcttaacaaccgacactcctacaagatttagaaaaaagtttacaacataatctagtttacagaaaaatcttgtgctagaatactttttaaaaggtattttgaataccattaaaactgcttttttttttccagcaagtatccaaccaacttggttctgcttcaataaatctttggaaaaactc

SEQ ID NO: 4459 - DNA, 2128 bp, Homo sapiens
  source 1..2128: mol_type = genomic DNA
gcctctccaaaggctgcagaagtttcttgctaacaaaaagtccgcacattcgagcaaagacaggctttagcgagttattaaaaacttaggggcgctcttgtcccccacagggcccgaccgcacacagcaaggcgatggcccagctgtaagttggtagcactgagaactagcagcgcgcgcggagcccgctgagacttgaatcaatctggtctaacggtttcccctaaaccgctaggagccctcaatcggcgggacagcagggcgcgtcctctgccactctcgctccgaggtccccgcgccagagacgcagccgcgctcccaccacccacacccaccgcgccctcgttcgcctcttctccgggagccagtccgcgccaccgccgccgcccaggccatcgccaccctccgcagccatgtccaccaggtccgtgtcctcgtcctcctaccgcaggatgttcggcggcccgggcaccgcgagccggccgagctccagccggagctacgtgactacgtccacccgcacctacagcctgggcagcgcgctgcgccccagcaccagccgcagcctctacgcctcgtccccgggcggcgtgtatgccacgcgctcctctgccgtgcgcctgcggagcagcgtgcccggggtgcggctcctgcaggactcggtggacttctcgctggccgacgccatcaacaccgagttcaagaacacccgcaccaacgagaaggtggagctgcaggagctgaatgaccgcttcgccaactacatcgacaaggtgcgcttcctggagcagcagaataagatcctgctggccgagctcgagcagctcaagggccaaggcaagtcgcgcctgggggacctctacgaggaggagatgcgggagctgcgccggcaggtggaccagctaaccaacgacaaagcccgcgtcgaggtggagcgcgacaacctggccgaggacatcatgcgcctccgggagaaattgcaggaggagatgcttcagagagaggaagccgaaaacaccctgcaatctttcagacaggatgttgacaatgcgtctctggcacgtcttgaccttgaacgcaaagtggaatctttgcaagaagagattgcctttttgaagaaactccacgaagaggaaatccaggagctgcaggctcagattcaggaacagcatgtccaaatcgatgtggatgtttccaagcctgacctcacggctgccctgcgtgacgtacgtcagcaatatgaaagtgtggctgccaagaacctgcaggaggcagaagaatggtacaaatccaagtttgctgacctctctgaggctgccaaccggaacaatgacgccctgcgccaggcaaagcaggagtccactgagtaccggagacaggtgcagtccctcacctgtgaagtggatgcccttaaaggaaccaatgagtccctggaacgccagatgcgtgaaatggaagagaactttgccgttgaagctgctaactaccaagacactattggccgcctgcaggatgagattcagaatatgaaggaggaaatggctcgtcaccttcgtgaataccaagacctgctcaatgttaagatggcccttgacattgagattgccacctacaggaagctgctggaaggcgaggagagcaggatttctctgcctcttccaaacttttcctccctgaacctgagggaaactaatctggattcactccctctggttgatacccactcaaaaaggacacttctgattaagacggttgaaactagagatggacaggttatcaacgaaacttctcagcatcacgatgaccttgaataaaaattgcacacactcagtgcagcaatatattaccagcaagaataaaaaagaaatccatatcttaaagaaacagctttcaagtgcctttctgcagtttttcaggagcgcaagatagatttggaataggaataagctctagttcttaacaaccgacactcctacaagatttagaaaaaagtttacaacataatctagtttacagaaaaatcttgtgctagaatactttttaaaaggtattttgaataccattaaaactgcttttttttttccagcaagtatccaaccaacttggttctgcttcaataaatctttgg

SEQ ID NO: 4460 - DNA, 1819 bp, Homo sapiens
  source 1..1819: mol_type = genomic DNA
ctctgccactctcgctccgaggtccccgcgccagagacgcagccgcgctcccaccacccacacccaccgcgccctcgttcgcctcttctccgggagccagtccgcgccaccgccgccgcccaggccatcgccaccctccgcaggatgttcggcggcccgggcaccgcgagccggccgagctccagccggagctacgtgactacgtccacccgcacctacagcctgggcagcgcgctgcgccccagcaccagccgcagcctctacgcctcgtccccgggcggcgtgtatgccacgcgctcctctgccgtgcgcctgcggagcagcgtgcccggggtgcggctcctgcaggactcggtggacttctcgctggccgacgccatcaacaccgagttcaagaacacccgcaccaacgagaaggtggagctgcaggagctgaatgaccgcttcgccaactacatcgacaaggtgcgcttcctggagcagcagaataagatcctgctggccgagctcgagcagctcaagggccaaggcaagtcgcgcctgggggacctctacgaggaggagatgcgggagctgcgccggcaggtggaccagctaaccaacgacaaagcccgcgtcgaggtggagcgcgacaacctggccgaggacatcatgcgcctccgggagaaattgcaggaggagatgcttcagagagaggaagccgaaaacaccctgcaatctttcagacaggatgttgacaatgcgtctctggcacgtcttgaccttgaacgcaaagtggaatctttgcaagaagagattgcctttttgaagaaactccacgaagaggaaatccaggagctgcaggctcagattcaggaacagcatgtccaaatcgatgtggatgtttccaagcctgacctcacggctgccctgcgtgacgtacgtcagcaatatgaaagtgtggctgccaagaacctgcaggaggcagaagaatggtacaaatccaagtttgctgacctctctgaggctgccaaccggaacaatgacgccctgcgccaggcaaagcaggagtccactgagtaccggagacaggtgcagtccctcacctgtgaagtggatgcccttaaaggaaccaatgagtccctggaacgccagatgcgtgaaatggaagagaactttgccgttgaagctgctaactaccaagacactattggccgcctgcaggatgagattcagaatatgaaggaggaaatggctcgtcaccttcgtgaataccaagacctgctcaatgttaagatggcccttgacattgagattgccacctacaggaagctgctggaaggcgaggagagcaggattctctgcctcttccaaacttttcctccctgaacctgagggaaactaatctggattcactccctctggttgatacccactcaaaaaggacacttctgattaagacggttgaaactagagatggacaggttatcaacgaaacttctcagcatcacgatgaccttgaataaaaattgcacacactcagtgcagcaatatattaccagcaagaataaaaaagaaatccatatcttaaagaaacagctttcaagtgcctttctgcagtttttcaggagcgcaagatagatttggaataggaataagctctagttcttaacaaccgacactcctacaagatttagaaaaaagtttacaacataatctagtttacagaaaaatcttgtgctagaatactttttaaaaggtattttgaataccattaaaactgcttttttttttccagcaagtatccaaccaacttggttctgcttcaataaatctttgg

SEQ ID NO: 4461 - DNA, 5482 bp, Homo sapiens
  source 1..5482: mol_type = genomic DNA
gtagtcgctgcacagtctgtctcttcgccggttcccggccccgtggatcctacttctctgtcgcccgcggttcgccgccccgctcgccgccgcgatgccagtgtttcatacgcgcacgatcgagagcatcctggagccggtggcacagcagatctcccacctggtgataatgcacgaggagggcgaggtggacggcaaagccattcctgacctcaccgcgcccgtggccgccgtgcaggcggccgtcagcaacctcgtccgggttggaaaagagactgttcaaaccactgaggatcagattttgaagagagatatgccaccagcatttattaaggttgagaatgcttgcaccaagcttgtccaggcagctcagatgcttcagtcagacccttactcagtgcctgctcgagattatctaattgatgggtcaaggggcatcctctctggaacatcagacctgctccttaccttcgatgaggctgaggtccgtaaaattattagagtttgcaaaggaattttggaatatcttacagtggcagaggtggtggagactatggaagatttggtcacttacacaaagaatcttgggccaggaatgactaagatggccaagatgattgacgagagacagcaggagctcactcaccaggagcaccgagtgatgttggtgaactcgatgaacaccgtgaaagagttgctgccagttctcatttcagctatgaagatttttgtaacaactaaaaactcaaaaaaccaaggcatagaggaagctttaaaaaatcgcaattttactgtagaaaaaatgagtgctgaaattaatgagataattcgtgtgttacaactcacctcttgggatgaagatgcctgggccagcaaggacactgaagccatgaagagagcattggcctccatagactccaaactgaaccaggccaaaggttggctccgtgaccctagtgcctccccaggggatgctggtgagcaggccatcagacagatcttagatgaagctggaaaagttggtgaactctgtgcaggcaaagaacgcagggagattctgggaacttgcaaaatgctagggcagatgactgatcaagtggctgacctccgtgccagaggacaaggatcctcaccggtggccatgcagaaagctcagcaggtatctcagggtctggatgtgctcacagcaaaagtggaaaatgcagctcgcaagctggaagccatgaccaactcaaagcagagcattgcaaagaagatcgatgctgctcagaactggcttgcagatccaaatggtggaccggaaggagaagagcagattcgaggtgctttggctgaagctcggaaaatagcagaattatgtgatgatcctaaagaaagagatgacattctacgttcccttggggaaatatctgctctgacttctaaattagcagatctacgaagacaggggaaaggagattctccagaggctcgagccttggccaaacaggtggccacggccctgcagaacctgcagaccaaaaccaaccgggctgtggccaacagcagaccggccaaagcagctgtacaccttgagggcaagattgagcaagcacagcggtggattgataatcccacagtggatgaccgtggagtcggtcaggctgccatccgggggcttgtggccgaagggcatcgtctggctaatgttatgatggggccttatcggcaagatcttctcgccaagtgtgaccgagtggaccagctgacagcccagctggctgacctggctgccagaggggaaggggagagtcctcaggcacgagcacttgcatctcagctccaagactccttaaaggatctaaaagctcggatgcaggaggccatgactcaggaagtgtcagatgttttcagcgataccacaactcccatcaagctgttggcagtggcagccacggcgcctcctgatgcgcctaacagggaagaggtatttgatgagagggcagctaactttgaaaaccattcaggaaagcttggtgctacggccgagaaggcggctgcggttggtactgctaataaatcaacagtggaaggcattcaggcctcagtgaagacggcccgagaactcacaccccaggtggtctcggctgctcgtatcttacttaggaaccctggaaatcaagctgcttatgaacattttgagaccatgaagaaccagtggatcgataatgttgaaaaaatgacagggctggtggacgaagccattgataccaaatctctgttggatgcttcagaagaagcaattaaaaaagacctggacaagtgcaaggtagctatggccaacattcagcctcagatgctggttgctggggcaaccagtattgctcgtcgggccaaccggatcctgctggtggctaagagggaggtggagaattccgaggatcccaagttccgtgaggctgtgaaagctgcctctgatgaattgagcaaaaccatctccccgatggtgatggatgcaaaagctgtggctggaaacatttccgaccctggactgcaaaagagcttcctggactcaggatatcggatcctgggagctgtggccaaggtcagagaagccttccaacctcaggagcctgacttcccgccgcctccaccagaccttgaacaactccgactaacagatgagcttgctcctcccaaaccacctctgcctgaaggtgaggtccctccacctaggcctccaccaccagaggaaaaggatgaagagttccctgagcagaaggccggggaggtgattaaccagccaatgatgatggctgccagacagctccatgatgaagctcgcaaatggtccagcaagccgggcatcccagccgctgaggtgggtataggtgttgtagctgaggcagatgcggccgatgctgctggcttccctgtcccccctgacatggaagacgattacgaacctgagctgctgttaatgccatccaatcagccggtcaaccagcccattctggccgcggctcagtccttgcatcgggaagctaccaagtggtctagtaagggcaatgacatcattgcagcagccaagcgcatggctctgctgatggctgagatgtctcggctggtaagagggggcagtggtaccaagcgggcactcattcagtgtgccaaggacatcgccaaggcctcagatgaggtgactcggttggccaaggaggttgccaagcagtgcacagataaacggattagaaccaacctcttacaggtatgtgagcgaatcccaaccataagcacccagctcaaaatcctgtccacagtgaaggccaccatgctgggccggaccaacatcagtgatgaggagtctgagcaggccacagagatgctggttcacaatgcccagaacctcatgcagtctgtgaaggagactgtgcgggaagctgaagctgcttcaatcaaaattcgaacagatgctggatttacactgcgctgggttagaaagactccctggtaccagtaggcacctggctgagcctggctggcacagaaacctctactaaaaagaaggaaaatgatctgagtcccaggagctgcccagagttgctgggagctgaaaaatcacatcctggcctggcacatcagaaaggaatgggggcctcttcaaattagaagacatttatactcttttttcatggacactttgaaatgtgtttctgtataaagcctgtattctcaaacacagttacacttgtgcaccctctatcccaataggcagactgggtttctagcccatggacttcacataagctcagaatccaagtgaacactagccagacactctgctctgcccttgttccctaggggacacttccctctgtttctctttccttggctcccattcactcttccagaatcccaagacccagggcccaggcaaatcagttactaagaagaaaattgctgtgcctcccaaaattgttttgagctttccatgttgctgccaaccataccttccttccctgggctgtgctacctgggtccttttcagaagtgagctttgctgctacaggggaaggtggcctctgtggagccccagcatatgggggcctggattcatttcctgcccttcctcagtttaatccttctagtttcccacaatataaaactgtacttcactgtcaggaagaaatcacagaatcatatgattctgcttttaccatgcccctgagcaatgtctgtgctagggaaacttcccgtcccatatcctgcctcagcccgccaaggtagccatcccatgaacacactgtgtcctggtgctctctgccactggaagggcagagtagccagggtgtggccctgccatcttcccagcagggccactcccggcactccatgcttagtcactgcctgcagaggtctgtgctgaggccttatcattcattcttagctcttaattgttcattttgagctgaaatgctgcattttaattttaaccaaaacatgtctcctatcctggtttttgtagccttcctccacatcctttctaaacaagattttaaagacatgtaggtgtttgttcatctgtaactctaaaagatcctttttaaattcagtcctaagaaagaggagtgcttgtcccctaagagtgtttaatggcaaggcagccctgtctgaaggacacttcctgcctaagggagagtggtatttgcagactagaattctagtgctgctgaagatgaatcaatgggaaatactactcctgtaattcctacctccctgcaaccaactacaaccaagctctctgcatctactcccaagtatggggttcaagagagtaatgggtttcatatttcttatcaccacagtaagttcctactaggcaaaatgagagggcagtgtttcctttttggtacttattactgctaagtatttcccagcacatgaaaccttattttttcccaaagccagaaccagatgagtaaaggagtaagaaccttgcctgaacatccttccttcccacccatcgctgtgtgttagttcccaacatcgaatgtgtacaacttaagttggtcctttacactcaggctttcactatttcctttataatgaggatgattattttcaaggccctcagcatatttgtatagttgcttgcctgatataaatgcaatattaatgcctttaaagtatgaatctatgccaaagatcacttgttgttttactaaagaaagattacttagaggaaataagaaaaatcatgtttgctctcccggttcttccagtggtttgagacactggtttacactttatgccggatgtgcttttctccaatatcagtgctcgagacacagtgaagcaaattaaaaaaaaaaaaaaaaaaaatccctgaatgatgattagagacatcaccgctaaaaaactacatttataagctaggatttgttatatgcaaatattttctgcctcttcttttgttctgtttaaaacaataaaatgcatttgt

SEQ ID NO: 4462 - DNA, 5286 bp, Homo sapiens
  source 1..5286: mol_type = genomic DNA
gtagtcgctgcacagtctgtctcttcgccggttcccggccccgtggatcctacttctctgtcgcccgcggttcgccgccccgctcgccgccgcgatgccagtgtttcatacgcgcacgatcgagagcatcctggagccggtggcacagcagatctcccacctggtgataatgcacgaggagggcgaggtggacggcaaagccattcctgacctcaccgcgcccgtggccgccgtgcaggcggccgtcagcaacctcgtccgggttggaaaagagactgttcaaaccactgaggatcagattttgaagagagatatgccaccagcatttattaaggttgagaatgcttgcaccaagcttgtccaggcagctcagatgcttcagtcagacccttactcagtgcctgctcgagattatctaattgatgggtcaaggggcatcctctctggaacatcagacctgctccttaccttcgatgaggctgaggtccgtaaaattattagagtttgcaaaggaattttggaatatcttacagtggcagaggtggtggagactatggaagatttggtcacttacacaaagaatcttgggccaggaatgactaagatggccaagatgattgacgagagacagcaggagctcactcaccaggagcaccgagtgatgttggtgaactcgatgaacaccgtgaaagagttgctgccagttctcatttcagctatgaagatttttgtaacaactaaaaactcaaaaaaccaaggcatagaggaagctttaaaaaatcgcaattttactgtagaaaaaatgagtgctgaaattaatgagataattcgtgtgttacaactcacctcttgggatgaagatgcctgggccagcaaggacactgaagccatgaagagagcattggcctccatagactccaaactgaaccaggccaaaggttggctccgtgaccctagtgcctccccaggggatgctggtgagcaggccatcagacagatcttagatgaagctggaaaagttggtgaactctgtgcaggcaaagaacgcagggagattctgggaacttgcaaaatgctagggcagatgactgatcaagtggctgacctccgtgccagaggacaaggatcctcaccggtggccatgcagaaagctcagcaggtatctcagggtctggatgtgctcacagcaaaagtggaaaatgcagctcgcaagctggaagccatgaccaactcaaagcagagcattgcaaagaagatcgatgctgctcagaactggcttgcagatccaaatggtggaccggaaggagaagagcagattcgaggtgctttggctgaagctcggaaaatagcagaattatgtgatgatcctaaagaaagagatgacattctacgttcccttggggaaatatctgctctgacttctaaattagcagatctacgaagacaggggaaaggagattctccagaggctcgagccttggccaaacaggtggccacggccctgcagaacctgcagaccaaaaccaaccgggctgtggccaacagcagaccggccaaagcagctgtacaccttgagggcaagattgagcaagcacagcggtggattgataatcccacagtggatgaccgtggagtcggtcaggctgccatccgggggcttgtggccgaagggcatcgtctggctaatgttatgatggggccttatcggcaagatcttctcgccaagtgtgaccgagtggaccagctgacagcccagctggctgacctggctgccagaggggaaggggagagtcctcaggcacgagcacttgcatctcagctccaagactccttaaaggatctaaaagctcggatgcaggaggccatgactcaggaagtgtcagatgttttcagcgataccacaactcccatcaagctgttggcagtggcagccacggcgcctcctgatgcgcctaacagggaagaggtatttgatgagagggcagctaactttgaaaaccattcaggaaagcttggtgctacggccgagaaggcggctgcggttggtactgctaataaatcaacagtggaaggcattcaggcctcagtgaagacggcccgagaactcacaccccaggtggtctcggctgctcgtatcttacttaggaaccctggaaatcaagctgcttatgaacattttgagaccatgaagaaccagtggatcgataatgttgaaaaaatgacagggctggtggacgaagccattgataccaaatctctgttggatgcttcagaagaagcaattaaaaaagacctggacaagtgcaaggtagctatggccaacattcagcctcagatgctggttgctggggcaaccagtattgctcgtcgggccaaccggatcctgctggtggctaagagggaggtggagaattccgaggatcccaagttccgtgaggctgtgaaagctgcctctgatgaattgagcaaaaccatctccccgatggtgatggatgcaaaagctgtggctggaaacatttccgaccctggactgcaaaagagcttcctggactcaggatatcggatcctgggagctgtggccaaggtcagagaagccttccaacctcaggagcctgacttcccgccgcctccaccagaccttgaacaactccgactaacagatgagcttgctcctcccaaaccacctctgcctgaaggtgaggtccctccacctaggcctccaccaccagaggaaaaggatgaagagttccctgagcagaaggccggggaggtgattaaccagccaatgatgatggctgccagacagctccatgatgaagctcgcaaatggtccagcaagggcaatgacatcattgcagcagccaagcgcatggctctgctgatggctgagatgtctcggctggtaagagggggcagtggtaccaagcgggcactcattcagtgtgccaaggacatcgccaaggcctcagatgaggtgactcggttggccaaggaggttgccaagcagtgcacagataaacggattagaaccaacctcttacaggtatgtgagcgaatcccaaccataagcacccagctcaaaatcctgtccacagtgaaggccaccatgctgggccggaccaacatcagtgatgaggagtctgagcaggccacagagatgctggttcacaatgcccagaacctcatgcagtctgtgaaggagactgtgcgggaagctgaagctgcttcaatcaaaattcgaacagatgctggatttacactgcgctgggttagaaagactccctggtaccagtaggcacctggctgagcctggctggcacagaaacctctactaaaaagaaggaaaatgatctgagtcccaggagctgcccagagttgctgggagctgaaaaatcacatcctggcctggcacatcagaaaggaatgggggcctcttcaaattagaagacatttatactcttttttcatggacactttgaaatgtgtttctgtataaagcctgtattctcaaacacagttacacttgtgcaccctctatcccaataggcagactgggtttctagcccatggacttcacataagctcagaatccaagtgaacactagccagacactctgctctgcccttgttccctaggggacacttccctctgtttctctttccttggctcccattcactcttccagaatcccaagacccagggcccaggcaaatcagttactaagaagaaaattgctgtgcctcccaaaattgttttgagctttccatgttgctgccaaccataccttccttccctgggctgtgctacctgggtccttttcagaagtgagctttgctgctacaggggaaggtggcctctgtggagccccagcatatgggggcctggattcatttcctgcccttcctcagtttaatccttctagtttcccacaatataaaactgtacttcactgtcaggaagaaatcacagaatcatatgattctgcttttaccatgcccctgagcaatgtctgtgctagggaaacttcccgtcccatatcctgcctcagcccgccaaggtagccatcccatgaacacactgtgtcctggtgctctctgccactggaagggcagagtagccagggtgtggccctgccatcttcccagcagggccactcccggcactccatgcttagtcactgcctgcagaggtctgtgctgaggccttatcattcattcttagctcttaattgttcattttgagctgaaatgctgcattttaattttaaccaaaacatgtctcctatcctggtttttgtagccttcctccacatcctttctaaacaagattttaaagacatgtaggtgtttgttcatctgtaactctaaaagatcctttttaaattcagtcctaagaaagaggagtgcttgtcccctaagagtgtttaatggcaaggcagccctgtctgaaggacacttcctgcctaagggagagtggtatttgcagactagaattctagtgctgctgaagatgaatcaatgggaaatactactcctgtaattcctacctccctgcaaccaactacaaccaagctctctgcatctactcccaagtatggggttcaagagagtaatgggtttcatatttcttatcaccacagtaagttcctactaggcaaaatgagagggcagtgtttcctttttggtacttattactgctaagtatttcccagcacatgaaaccttattttttcccaaagccagaaccagatgagtaaaggagtaagaaccttgcctgaacatccttccttcccacccatcgctgtgtgttagttcccaacatcgaatgtgtacaacttaagttggtcctttacactcaggctttcactatttcctttataatgaggatgattattttcaaggccctcagcatatttgtatagttgcttgcctgatataaatgcaatattaatgcctttaaagtatgaatctatgccaaagatcacttgttgttttactaaagaaagattacttagaggaaataagaaaaatcatgtttgctctcccggttcttccagtggtttgagacactggtttacactttatgccggatgtgcttttctccaatatcagtgctcgagacacagtgaagcaaattaaaaaaaaaaaaaaaaaaaatccctgaatgatgattagagacatcaccgctaaaaaactacatttataagctaggatttgttatatgcaaatattttctgcctcttcttttgttctgtttaaaacaataaaatgcatttgtataaaaaa

SEQ ID NO: 4463 - DNA, 3144 bp, Homo sapiens
  source 1..3144: mol_type = genomic DNA
agtctgtctcttcgccggttcccggccccgtggatcctacttctctgtcgcccgcggttcgccgccccgctcgccgccgcgatgccagtgtttcatacgcgcacgatcgagagcatcctggagccggtggcacagcagatctcccacctggtgataatgcacgaggagggcgaggtggacggcaaagccattcctgacctcaccgcgcccgtggccgccgtgcaggcggccgtcagcaacctcgtccgggttggaaaagagactgttcaaaccactgaggatcagattttgaagagagatatgccaccagcatttattaaggttgagaatgcttgcaccaagcttgtccaggcagctcagatgcttcagtcagacccttactcagtgcctgctcgagattatctaattgatgggtcaaggggcatcctctctggaacatcagacctgctccttaccttcgatgaggctgaggtccgtaaaattattagagtttgcaaaggaattttggaatatcttacagtggcagaggtggtggagactatggaagatttggtcacttacacaaagaatcttgggccaggaatgactaagatggccaagatgattgacgagagacagcaggagctcactcaccaggagcaccgagtgatgttggtgaactcgatgaacaccgtgaaagagttgctgccagttctcatttcagctatgaagatttttgtaacaactaaaaactcaaaaaaccaaggcatagaggaagctttaaaaaatcgcaattttactgtagaaaaaatgagtgctgaaattaatgagataattcgtgtgttacaactcacctcttgggatgaagatgcctgggccagcaaggacactgaagccatgaagagagcattggcctccatagactccaaactgaaccaggccaaaggttggctccgtgaccctagtgcctccccaggggatgctggtgagcaggccatcagacagatcttagatgaagctggaaaagttggtgaactctgtgcaggcaaagaacgcagggagattctgggaacttgcaaaatgctagggcagatgactgatcaagtggctgacctccgtgccagaggacaaggatcctcaccggtggccatgcagaaagctcagcaggtatctcagggtctggatgtgctcacagcaaaagtggaaaatgcagctcgcaagctggaagccatgaccaactcaaagcagagcattgcaaagaagatcgatgctgctcagaactggcttgcagatccaaatggtggaccggaaggagaagagcagattcgaggtgctttggctgaagctcggaaaatagcagaattatgtgatgatcctaaagaaagagatgacattctacgttcccttggggaaatatctgctctgacttctaaattagcagatctacgaagacaggggaaaggagattctccagaggctcgagccttggccaaacaggtggccacggccctgcagaacctgcagaccaaaaccaaccgggctgtggccaacagcagaccggccaaagcagctgtacaccttgagggcaagattgagcaagcacagcggtggattgataatcccacagtggatgaccgtggagtcggtcaggctgccatccgggggcttgtggccgaagggcatcgtctggctaatgttatgatggggccttatcggcaagatcttctcgccaagtgtgaccgagtggaccagctgacagcccagctggctgacctggctgccagaggggaaggggagagtcctcaggcacgagcacttgcatctcagctccaagactccttaaaggatctaaaagctcggatgcaggaggccatgactcaggaagtgtcagatgttttcagcgataccacaactcccatcaagctgttggcagtggcagccacggcgcctcctgatgcgcctaacagggaagaggtatttgatgagagggcagctaactttgaaaaccattcaggaaagcttggtgctacggccgagaaggcggctgcggttggtactgctaataaatcaacagtggaaggcattcaggcctcagtgaagacggcccgagaactcacaccccaggtggtctcggctgctcgtatcttacttaggaaccctggaaatcaagctgcttatgaacattttgagaccatgaagaaccagtggatcgataatgttgaaaaaatgacagggctggtggacgaagccattgataccaaatctctgttggatgcttcagaagaagcaattaaaaaagacctggacaagtgcaaggtagctatggccaacattcagcctcagatgctggttgctggggcaaccagtattgctcgtcgggccaaccggatcctgctggtggctaagagggaggtggagaattccgaggatcccaagttccgtgaggctgtgaaagctgcctctgatgaattgagcaaaaccatctccccgatggtgatggatgcaaaagctgtggctggaaacatttccgaccctggactgcaaaagagcttcctggactcaggatatcggatcctgggagctgtggccaaggtcagagaagccttccaacctcaggagcctgacttcccgccgcctccaccagaccttgaacaactccgactaacagatgagcttgctcctcccaaaccacctctgcctgaaggtgaggtccctccacctaggcctccaccaccagaggaaaaggatgaagagttccctgagcagaaggccggggaggtgattaaccagccaatgatgatggctgccagacagctccatgatgaagctcgcaaatggtccagcaagccgggcatcccagccgctgaggtgggtataggtgttgtagctgaggcagatgcggccgatgctgctggcttccctgtcccccctgacatggaagacgattacgaacctgagctgctgttaatgccatccaatcagccggtcaaccagcccattctggccgcggctcagtccttgcatcgggaagctaccaagtggtctagtaagggcaatgacatcattgcagcagccaagcgcatggctctgctgatggctgagatgtctcggctggtaagagggggcagtgtgccaaggacatcgccaaggcctcagatgaggtga

SEQ ID NO: 4464 - DNA, 1386 bp, Homo sapiens
  source 1..1386: mol_type = genomic DNA
agtcgctgcacagtctgtctcttcgccggttcccggccccgtggatcctacttctctgtcgcccgcggttcgccgccccgctcgccgccgcgatgccagtgtttcatacgcgcacgatcgagagcatcctggagccggtggcacagcagatctcccacctggtgataatgcacgaggagggcgaggtggacggcaaagccattcctgacctcaccgcgcccgtggccgccgtgcaggcggccgtcagcaacctcgtccgggttggaaaagagactgttcaaaccactgaggatcagattttgaagagagatatgccaccagcatttattaaggttgagaatgcttgcaccaagcttgtccaggcagctcagatgcttcagtcagacccttactcagtgcctgctcgagattatctaattgatgggtcaaggggcatcctctctggaacatcagacctgctccttaccttcgatgaggctgaggtccctccacctaggcctccaccaccagaggaaaaggatgaagagttccctgagcagaaggccggggaggtgattaaccagccaatgatgatggctgccagacagctccatgatgaagctcgcaaatggtccagcaagggcaatgacatcattgcagcagccaagcgcatggctctgctgatggctgagatgtctcggctggtaagagggggcagtggtaccaagcgggcactcattcagtgtgccaaggacatcgccaaggcctcagatgaggtgactcggttggccaaggaggttgccaagcagtgcacagataaacggattagaaccaacctcttacaggtatgtgagcgaatcccaaccataagcacccagctcaaaatcctgtccacagtgaaggccaccatgctgggccggaccaacatcagtgatgaggagtctgagcaggccacagagatgctggttcacaatgcccagaacctcatgcagtctgtgaaggagactgtgcgggaagctgaagctgcttcaatcaaaattcgaacagatgctggatttacactgcgctgggttagaaagactccctggtaccagtaggcacctggctgagcctggctggcacagaaacctctactaaaaagaaggaaaatgatctgagtcccaggagctgcccagagttgctgggagctgaaaaatcacatcctggcctggcacatcagaaaggaatgggggcctcttcaaattagaagacatttatactcttttttcatggacactttgaaatgtgtttctgtataaagcctgtattctcaaacacagttacacttgtgcaccctctatcccaataggcagactgggtttctagcccatggacttcacataagctcagaatccaagtgaacactag

SEQ ID NO: 4465 - DNA, 4412 bp, Homo sapiens
  source 1..4412: mol_type = genomic DNA
gggcagatgactgatcaagtggctgacctccgtgccagaggacaaggatcctcaccggtggccatgcagaaagctcagcaggtatctcagggtctggatgtgctcacagcaaaagtggaaaatgcagctcgcaagctggaagccatgaccaactcaaagcagagcattgcaaagaagatcgatgctgctcagaactggcttgcagatccaaatggtggaccggaaggagaagagcagattcgaggtgctttggctgaagctcggaaaatagcagaattatgtgatgatcctaaagaaagagatgacattctacgttcccttggggaaatatctgctctgacttctaaattagcagatctacgaagacaggggaaaggagattctccagaggctcgagccttggccaaacaggtggccacggccctgcagaacctgcagaccaaaaccaaccgggctgtggccaacagcagaccggccaaagcagctgtacaccttgagggcaagattgagcaagcacagcggtggattgataatcccacagtggatgaccgtggagtcggtcaggctgccatccgggggcttgtggccgaagggcatcgtctggctaatgttatgatggggccttatcggcaagatcttctcgccaagtgtgaccgagtggaccagctgacagcccagctggctgacctggctgccagaggggaaggggagagtcctcaggcacgagcacttgcatctcagctccaagactccttaaaggatctaaaagctcggatgcaggaggccatgactcaggaagtgtcagatgttttcagcgataccacaactcccatcaagctgttggcagtggcagccacggcgcctcctgatgcgcctaacagggaagaggtatttgatgagagggcagctaactttgaaaaccattcaggaaagcttggtgctacggccgagaaggcggctgcggttggtactgctaataaatcaacagtggaaggcattcaggcctcagtgaagacggcccgagaactcacaccccaggtggtctcggctgctcgtatcttacttaggaaccctggaaatcaagctgcttatgaacattttgagaccatgaagaaccagtggatcgataatgttgaaaaaatgacagggctggtggacgaagccattgataccaaatctctgttggatgcttcagaagaagcaattaaaaaagacctggacaagtgcaaggtagctatggccaacattcagcctcagatgctggttgctggggcaaccagtattgctcgtcgggccaaccggatcctgctggtggctaagagggaggtggagaattccgaggatcccaagttccgtgaggctgtgaaagctgcctctgatgaattgagcaaaaccatctccccgatggtgatggatgcaaaagctgtggctggaaacatttccgaccctggactgcaaaagagcttcctggactcaggatatcggatcctgggagctgtggccaaggtcagagaagccttccaacctcaggagcctgacttcccgccgcctccaccagaccttgaacaactccgactaacagatgagcttgctcctcccaaaccacctctgcctgaaggtgaggtccctccacctaggcctccaccaccagaggaaaaggatgaagagttccctgagcagaaggccggggaggtgattaaccagccaatgatgatggctgccagacagctccatgatgaagctcgcaaatggtccagcaagccgggcatcccagccgctgaggtgggtataggtgttgtagctgaggcagatgcggccgatgctgctggcttccctgtcccccctgacatggaagacgattacgaacctgagctgctgttaatgccatccaatcagccggtcaaccagcccattctggccgcggctcagtccttgcatcgggaagctaccaagtggtctagtaagggcaatgacatcattgcagcagccaagcgcatggctctgctgatggctgagatgtctcggctggtaagagggggcagtggtaccaagcgggcactcattcagtgtgccaaggacatcgccaaggcctcagatgaggtgactcggttggccaaggaggttgccaagcagtgcacagataaacggattagaaccaacctcttacaggtatgtgagcgaatcccaaccataagcacccagctcaaaatcctgtccacagtgaaggccaccatgctgggccggaccaacatcagtgatgaggagtctgagcaggccacagagatgctggttcacaatgcccagaacctcatgcagtctgtgaaggagactgtgcgggaagctgaagctgcttcaatcaaaattcgaacagatgctggatttacactgcgctgggttagaaagactccctggtaccagtaggcacctggctgagcctggctggcacagaaacctctactaaaaagaaggaaaatgatctgagtcccaggagctgcccagagttgctgggagctgaaaaatcacatcctggcctggcacatcagaaaggaatgggggcctcttcaaattagaagacatttatactcttttttcatggacactttgaaatgtgtttctgtataaagcctgtattctcaaacacagttacacttgtgcaccctctatcccaataggcagactgggtttctagcccatggacttcacataagctcagaatccaagtgaacactagccagacactctgctctgcccttgttccctaggggacacttccctctgtttctctttccttggctcccattcactcttccagaatcccaagacccagggcccaggcaaatcagttactaagaagaaaattgctgtgcctcccaaaattgttttgagctttccatgttgctgccaaccataccttccttccctgggctgtgctacctgggtccttttcagaagtgagctttgctgctacaggggaaggtggcctctgtggagccccagcatatgggggcctggattcatttcctgcccttcctcagtttaatccttctagtttcccacaatataaaactgtacttcactgtcaggaagaaatcacagaatcatatgattctgcttttaccatgcccctgagcaatgtctgtgctagggaaacttcccgtcccatatcctgcctcagcccgccaaggtagccatcccatgaacacactgtgtcctggtgctctctgccactggaagggcagagtagccagggtgtggccctgccatcttcccagcagggccactcccggcactccatgcttagtcactgcctgcagaggtctgtgctgaggccttatcattcattcttagctcttaattgttcattttgagctgaaatgctgcattttaattttaaccaaaacatgtctcctatcctggtttttgtagccttcctccacatcctttctaaacaagattttaaagacatgtaggtgtttgttcatctgtaactctaaaagatcctttttaaattcagtcctaagaaagaggagtgcttgtcccctaagagtgtttaatggcaaggcagccctgtctgaaggacacttcctgcctaagggagagtggtatttgcagactagaattctagtgctgctgaagatgaatcaatgggaaatactactcctgtaattcctacctccctgcaaccaactacaaccaagctctctgcatctactcccaagtatggggttcaagagagtaatgggtttcatatttcttatcaccacagtaagttcctactaggcaaaatgagagggcagtgtttcctttttggtacttattactgctaagtatttcccagcacatgaaaccttattttttcccaaagccagaaccagatgagtaaaggagtaagaaccttgcctgaacatccttccttcccacccatcgctgtgtgttagttcccaacatcgaatgtgtacaacttaagttggtcctttacactcaggctttcactatttcctttataatgaggatgattattttcaaggccctcagcatatttgtatagttgcttgcctgatataaatgcaatattaatgcctttaaagtatgaatctatgccaaagatcacttgttgttttactaaagaaagattacttagaggaaataagaaaaatcatgtttgctctcccggttcttccagtggtttgagacactggtttacactttatgccggatgtgcttttctccaatatcagtgctcgagacacagtgaagcaaattaaaaaaaaaaaaaaaaaaaatccctgaatgatgattagagacatcaccgctaaaaaactacatttataagctaggatttgttatatgcaaatattttctgcctcttcttttgttctgtttaaaacaataaaatgcatttgtataaaaaa

SEQ ID NO: 4466 - DNA, 5534 bp, Homo sapiens
  source 1..5534: mol_type = genomic DNA
tagggatccttatttgagccacgttgtcctcctttctaatacttctgcccctcaccctgagacccgcctcgcccacccccgctccccagagctccctgtattccgcccttttattcacttgcctcactctctgtcgcctcctcctccctcctgggcattttacttatgctcactcctctggcactctcacacctttatgcagtcattcgtgaccacaagcccggtttttccttccgctcagccctgctgcccttcctttcattccctcctgtggacattttcacctggcgttacctgctgtcaaacggcctcctcccactggggcctttctagactcgggggccctccttggcccctcctcctggcaggaagcaagatggagctgttgggagaggcctgtggaatctgggatctgccgcccctgccggagagaaggctggggcatccgctccccatccacaactttcctggtggctctgcagacccctgtaacccacagctgtgactcataaccgaggttggaaaagagactgttcaaaccactgaggatcagattttgaagagagatatgccaccagcatttattaaggttgagaatgcttgcaccaagcttgtccaggcagctcagatgcttcagtcagacccttactcagtgcctgctcgagattatctaattgatgggtcaaggggcatcctctctggaacatcagacctgctccttaccttcgatgaggctgaggtccgtaaaattattagagtttgcaaaggaattttggaatatcttacagtggcagaggtggtggagactatggaagatttggtcacttacacaaagaatcttgggccaggaatgactaagatggccaagatgattgacgagagacagcaggagctcactcaccaggagcaccgagtgatgttggtgaactcgatgaacaccgtgaaagagttgctgccagttctcatttcagctatgaagatttttgtaacaactaaaaactcaaaaaaccaaggcatagaggaagctttaaaaaatcgcaattttactgtagaaaaaatgagtgctgaaattaatgagataattcgtgtgttacaactcacctcttgggatgaagatgcctgggccagcaaggacactgaagccatgaagagagcattggcctccatagactccaaactgaaccaggccaaaggttggctccgtgaccctagtgcctccccaggggatgctggtgagcaggccatcagacagatcttagatgaagctggaaaagttggtgaactctgtgcaggcaaagaacgcagggagattctgggaacttgcaaaatgctagggcagatgactgatcaagtggctgacctccgtgccagaggacaaggatcctcaccggtggccatgcagaaagctcagcaggtatctcagggtctggatgtgctcacagcaaaagtggaaaatgcagctcgcaagctggaagccatgaccaactcaaagcagagcattgcaaagaagatcgatgctgctcagaactggcttgcagatccaaatggtggaccggaaggagaagagcagattcgaggtgctttggctgaagctcggaaaatagcagaattatgtgatgatcctaaagaaagagatgacattctacgttcccttggggaaatatctgctctgacttctaaattagcagatctacgaagacaggggaaaggagattctccagaggctcgagccttggccaaacaggtggccacggccctgcagaacctgcagaccaaaaccaaccgggctgtggccaacagcagaccggccaaagcagctgtacaccttgagggcaagattgagcaagcacagcggtggattgataatcccacagtggatgaccgtggagtcggtcaggctgccatccgggggcttgtggccgaagggcatcgtctggctaatgttatgatggggccttatcggcaagatcttctcgccaagtgtgaccgagtggaccagctgacagcccagctggctgacctggctgccagaggggaaggggagagtcctcaggcacgagcacttgcatctcagctccaagactccttaaaggatctaaaagctcggatgcaggaggccatgactcaggaagtgtcagatgttttcagcgataccacaactcccatcaagctgttggcagtggcagccacggcgcctcctgatgcgcctaacagggaagaggtatttgatgagagggcagctaactttgaaaaccattcaggaaagcttggtgctacggccgagaaggcggctgcggttggtactgctaataaatcaacagtggaaggcattcaggcctcagtgaagacggcccgagaactcacaccccaggtggtctcggctgctcgtatcttacttaggaaccctggaaatcaagctgcttatgaacattttgagaccatgaagaaccagtggatcgataatgttgaaaaaatgacagggctggtggacgaagccattgataccaaatctctgttggatgcttcagaagaagcaattaaaaaagacctggacaagtgcaaggtagctatggccaacattcagcctcagatgctggttgctggggcaaccagtattgctcgtcgggccaaccggatcctgctggtggctaagagggaggtggagaattccgaggatcccaagttccgtgaggctgtgaaagctgcctctgatgaattgagcaaaaccatctccccgatggtgatggatgcaaaagctgtggctggaaacatttccgaccctggactgcaaaagagcttcctggactcaggatatcggatcctgggagctgtggccaaggtcagagaagccttccaacctcaggagcctgacttcccgccgcctccaccagaccttgaacaactccgactaacagatgagcttgctcctcccaaaccacctctgcctgaaggtgaggtccctccacctaggcctccaccaccagaggaaaaggatgaagagttccctgagcagaaggccggggaggtgattaaccagccaatgatgatggctgccagacagctccatgatgaagctcgcaaatggtccagcaagggcaatgacatcattgcagcagccaagcgcatggctctgctgatggctgagatgtctcggctggtaagagggggcagtggtaccaagcgggcactcattcagtgtgccaaggacatcgccaaggcctcagatgaggtgactcggttggccaaggaggttgccaagcagtgcacagataaacggattagaaccaacctcttacaggtatgtgagcgaatcccaaccataagcacccagctcaaaatcctgtccacagtgaaggccaccatgctgggccggaccaacatcagtgatgaggagtctgagcaggccacagagatgctggttcacaatgcccagaacctcatgcagtctgtgaaggagactgtgcgggaactgaagctgcttcaatcaaaattcgaacagatgctggatttacactgcgctgggttagaaagactccctggtaccagtaggcacctggctgagcctggctggcacagaaacctctactaaaaagaaggaaaatgatctgagtcccaggagctgcccagagttgctgggagctgaaaaatcacatcctggcctggcacatcagaaaggaatgggggcctcttcaaattagaagacatttatactcttttttcatggacactttgaaatgtgtttctgtataaagcctgtattctcaaacacagttacacttgtgcaccctctatcccaataggcagactgggtttctagcccatggacttcacataagctcagaatccaagtgaacactagccagacactctgctctgcccttgttccctaggggacacttccctctgtttctctttccttggctcccattcactcttccagaatcccaagacccagggcccaggcaaatcagttactaagaagaaaattgctgtgcctcccaaaattgttttgagctttccatgttgctgccaaccataccttccttccctgggctgtgctacctgggtccttttcagaagtgagctttgctgctacaggggaaggtggcctctgtggagccccagcatatgggggcctggattcatttcctgcccttcctcagtttaatccttctagtttcccacaatataaaactgtacttcactgtcaggaagaaatcacagaatcatatgattctgcttttaccatgcccctgagcaatgtctgtgctagggaaacttcccgtcccatatcctgcctcagcccgccaaggtagccatcccatgaacacactgtgtcctggtgctctctgccactggaagggcagagtagccagggtgtggccctgccatcttcccagcagggccactcccggcactccatgcttagtcactgcctgcagaggtctgtgctgaggccttatcattcattcttagctcttaattgttcattttgagctgaaatgctgcattttaattttaaccaaaacatgtctcctatcctggtttttgtagccttcctccacatcctttctaaacaagattttaaagacatgtaggtgtttgttcatctgtaactctaaaagatcctttttaaattcagtcctaagaaagaggagtgcttgtcccctaagagtgtttaatggcaaggcagccctgtctgaaggacacttcctgcctaagggagagtggtatttgcagactagaattctagtgctgctgaagatgaatcaatgggaaatactactcctgtaattcctacctccctgcaaccaactacaaccaagctctctgcatctactcccaagtatggggttcaagagagtaatgggtttcatatttcttatcaccacagtaagttcctactaggcaaaatgagagggcagtgtttcctttttggtacttattactgctaagtatttcccagcacatgaaaccttattttttcccaaagccagaaccagatgagtaaaggagtaagaaccttgcctgaacatccttccttcccacccatcgctgtgtgttagttcccaacatcgaatgtgtacaacttaagttggtcctttacactcaggctttcactatttcctttataatgaggatgattattttcaaggccctcagcatatttgtatagttgcttgcctgatataaatgcaatattaatgcctttaaagtatgaatctatgccaaagatcacttgttgttttactaaagaaagattacttagaggaaataagaaaaatcatgtttgctctcccggttcttccagtggtttgagacactggtttacactttatgccggatgtgcttttctccaatatcagtgctcgagacacagtgaagcaaattaaaaaaaaaaaaaaaaaaaatccctgaatgatgattagagacatcaccgctaaaaaactacatttataagctaggatttgttatatgcaaatattttctgcctcttcttttgttctgtttaaaacaataaaatgcatttgtat

SEQ ID NO: 4467 - DNA, 1119 bp, Homo sapiens
  source 1..1119: mol_type = genomic DNA
ctgaaggcggcggcggggccagaggctcagcggctcccaggtgcgggagagaggcctgctgaaaatgactgaatataaacttgtggtagttggagctggtggcgtaggcaagagtgccttgacgatacagctaattcagaatcattttgtggacgaatatgatccaacaatagaggattcctacaggaagcaagtagtaattgatggagaaacctgtctcttggatattctcgacacagcaggtcaagaggagtacagtgcaatgagggaccagtacatgaggactggggagggctttctttgtgtatttgccataaataatactaaatcatttgaagatattcaccattatagagaacaaattaaaagagttaaggactctgaagatgtacctatggtcctagtaggaaataaatgtgatttgccttctagaacagtagacacaaaacaggctcaggacttagcaagaagttatggaattccttttattgaaacatcagcaaagacaagacagagagtggaggatgctttttatacattggtgagggagatccgacaatacagattgaaaaaaatcagcaaagaagaaaagactcctggctgtgtgaaaattaaaaaatgcattataatgtaatctgggtgttgatgatgccttctatacattagttcgagaaattcgaaaacataaagaaaagatgagcaaagatggtaaaaagaagaaaaagaagtcaaagacaaagtgtgtaattatgtaaatacaatttgtacttttttcttaaggcatactagtacaagtggtaatttttgtacattacactaaattattagcatttgttttagcattacctaatttttttcctgctccatgcagactgttagcttttaccttaaatgcttattttaaaatgacagtggaagtttttttttcctctaagtgccagtattcccagagttttggtttttgaactagcaatgcctgtgaaaaagaaactgaatacctaagatttctgtcttggggcttttggtgcatgcagttgattacttcttatttttcttaccaattgtgaatgttggtgtgaaacaaattaatgaagcttttgaatcatccctattctgtgt

SEQ ID NO: 4468 - DNA, 5765 bp, Homo sapiens
  source 1..5765: mol_type = genomic DNA
tcctaggcggcggccgcggcggcggaggcagcagcggcggcggcagtggcggcggcgaaggtggcggcggctcggccagtactcccggcccccgccatttcggactgggagcgagcgcggcgcaggcactgaaggcggcggcggggccagaggctcagcggctcccaggtgcgggagagaggcctgctgaaaatgactgaatataaacttgtggtagttggagctggtggcgtaggcaagagtgccttgacgatacagctaattcagaatcattttgtggacgaatatgatccaacaatagaggattcctacaggaagcaagtagtaattgatggagaaacctgtctcttggatattctcgacacagcaggtcaagaggagtacagtgcaatgagggaccagtacatgaggactggggagggctttctttgtgtatttgccataaataatactaaatcatttgaagatattcaccattatagagaacaaattaaaagagttaaggactctgaagatgtacctatggtcctagtaggaaataaatgtgatttgccttctagaacagtagacacaaaacaggctcaggacttagcaagaagttatggaattccttttattgaaacatcagcaaagacaagacagggtgttgatgatgccttctatacattagttcgagaaattcgaaaacataaagaaaagatgagcaaagatggtaaaaagaagaaaaagaagtcaaagacaaagtgtgtaattatgtaaatacaatttgtacttttttcttaaggcatactagtacaagtggtaatttttgtacattacactaaattattagcatttgttttagcattacctaatttttttcctgctccatgcagactgttagcttttaccttaaatgcttattttaaaatgacagtggaagtttttttttcctctaagtgccagtattcccagagttttggtttttgaactagcaatgcctgtgaaaaagaaactgaatacctaagatttctgtcttggggcttttggtgcatgcagttgattacttcttatttttcttaccaattgtgaatgttggtgtgaaacaaattaatgaagcttttgaatcatccctattctgtgttttatctagtcacataaatggattaattactaatttcagttgagaccttctaattggtttttactgaaacattgagggaacacaaatttatgggcttcctgatgatgattcttctaggcatcatgtcctatagtttgtcatccctgatgaatgtaaagttacactgttcacaaaggttttgtctcctttccactgctattagtcatggtcactctccccaaaatattatattttttctataaaaagaaaaaaatggaaaaaaattacaaggcaatggaaactattataaggccatttccttttcacattagataaattactataaagactcctaatagcttttcctgttaaggcagacccagtatgaaatggggattattatagcaaccattttggggctatatttacatgctactaaatttttataataattgaaaagattttaacaagtataaaaaattctcataggaattaaatgtagtctccctgtgtcagactgctctttcatagtataactttaaatcttttcttcaacttgagtctttgaagatagttttaattctgcttgtgacattaaaagattatttgggccagttatagcttattaggtgttgaagagaccaaggttgcaaggccaggccctgtgtgaacctttgagctttcatagagagtttcacagcatggactgtgtccccacggtcatccagtgttgtcatgcattggttagtcaaaatggggagggactagggcagtttggatagctcaacaagatacaatctcactctgtggtggtcctgctgacaaatcaagagcattgcttttgtttcttaagaaaacaaactcttttttaaaaattacttttaaatattaactcaaaagttgagattttggggtggtggtgtgccaagacattaattttttttttaaacaatgaagtgaaaaagttttacaatctctaggtttggctagttctcttaacactggttaaattaacattgcataaacacttttcaagtctgatccatatttaataatgctttaaaataaaaataaaaacaatccttttgataaatttaaaatgttacttattttaaaataaatgaagtgagatggcatggtgaggtgaaagtatcactggactaggaagaaggtgacttaggttctagataggtgtcttttaggactctgattttgaggacatcacttactatccatttcttcatgttaaaagaagtcatctcaaactcttagttttttttttttacaactatgtaatttatattccatttacataaggatacacttatttgtcaagctcagcacaatctgtaaatttttaacctatgttacaccatcttcagtgccagtcttgggcaaaattgtgcaagaggtgaagtttatatttgaatatccattctcgttttaggactcttcttccatattagtgtcatcttgcctccctaccttccacatgccccatgacttgatgcagttttaatacttgtaattcccctaaccataagatttactgctgctgtggatatctccatgaagttttcccactgagtcacatcagaaatgccctacatcttatttcctcagggctcaagagaatctgacagataccataaagggatttgacctaatcactaattttcaggtggtggctgatgctttgaacatctctttgctgcccaatccattagcgacagtaggatttttcaaacctggtatgaatagacagaaccctatccagtggaaggagaatttaataaagatagtgctgaaagaattccttaggtaatctataactaggactactcctggtaacagtaatacattccattgttttagtaaccagaaatcttcatgcaatgaaaaatactttaattcatgaagcttactttttttttttggtgtcagagtctcgctcttgtcacccaggctggaatgcagtggcgccatctcagctcactgcaacctccatctcccaggttcaagcgattctcgtgcctcggcctcctgagtagctgggattacaggcgtgtgccactacactcaactaatttttgtatttttaggagagacggggtttcaccctgttggccaggctggtctcgaactcctgacctcaagtgattcacccaccttggcctcataaacctgttttgcagaactcatttattcagcaaatatttattgagtgcctaccagatgccagtcaccacacaaggcactgggtatatggtatccccaaacaagagacataatcccggtccttaggtagtgctagtgtggtctgtaatatcttactaaggcctttggtatacgacccagagataacacgatgcgtattttagttttgcaaagaaggggtttggtctctgtgccagctctataattgttttgctacgattccactgaaactcttcgatcaagctactttatgtaaatcacttcattgttttaaaggaataaacttgattatattgtttttttatttggcataactgtgattcttttaggacaattactgtacacattaaggtgtatgtcagatattcatattgacccaaatgtgtaatattccagttttctctgcataagtaattaaaatatacttaaaaattaatagttttatctgggtacaaataaacaggtgcctgaactagttcacagacaaggaaacttctatgtaaaaatcactatgatttctgaattgctatgtgaaactacagatctttggaacactgtttaggtagggtgttaagacttacacagtacctcgtttctacacagagaaagaaatggccatacttcaggaactgcagtgcttatgaggggatatttaggcctcttgaatttttgatgtagatgggcatttttttaaggtagtggttaattacctttatgtgaactttgaatggtttaacaaaagatttgtttttgtagagattttaaagggggagaattctagaaataaatgttacctaattattacagccttaaagacaaaaatccttgttgaagtttttttaaaaaaagctaaattacatagacttaggcattaacatgtttgtggaagaatatagcagacgtatattgtatcatttgagtgaatgttcccaagtaggcattctaggctctatttaactgagtcacactgcataggaatttagaacctaacttttataggttatcaaaactgttgtcaccattgcacaattttgtcctaatatatacatagaaactttgtggggcatgttaagttacagtttgcacaagttcatctcatttgtattccattgattttttttttcttctaaacattttttcttcaaacagtatataactttttttaggggatttttttttagacagcaaaaactatctgaagatttccatttgtcaaaaagtaatgatttcttgataattgtgtagtaatgttttttagaacccagcagttaccttaaagctgaatttatatttagtaacttctgtgttaatactggatagcatgaattctgcattgagaaactgaatagctgtcataaaatgaaactttctttctaaagaaagatactcacatgagttcttgaagaatagtcataactagattaagatctgtgttttagtttaatagtttgaagtgcctgtttgggataatgataggtaatttagatgaatttaggggaaaaaaaagttatctgcagatatgttgagggcccatctctccccccacacccccacagagctaactgggttacagtgttttatccgaaagtttccaattccactgtcttgtgttttcatgttgaaaatacttttgcatttttcctttgagtgccaatttcttactagtactatttcttaatgtaacatgtttacctggaatgtattttaactatttttgtatagtgtaaactgaaacatgcacattttgtacattgtgctttcttttgtgggacatatgcagtgtgatccagttgttttccatcatttggttgcgctgacctaggaatgttggtcatatcaaacattaaaaatgaccactcttttaattgaaattaacttttaaatgtttataggagtatgtgctgtgaagtgatctaaaatttgtaatatttttgtcatgaactgtactactcctaattattgtaatgtaataaaaatagttacagtgactatgagtgtgtatttattcatgaaatttgaactgtttgccccgaaatggatatggaatactttataagccatagacactatagtataccagtgaatcttttatgcagcttgttagaagtatcctttatttctaaaaggtgctgtggatattatgtaaaggcgtgtttgcttaaacttaaaaccatatttagaagtagatgcaaaacaaatctgcctttatgacaaaaaaataggataacattatttatttatttccttttatcaaagaaggtaattgatacacaacaggtgacttggttttaggcccaaaggtagcagcagcaacattaataatggaaataattgaatagttagttatgtatgttaatgccagtcaccagcaggctatttcaaggtcagaagtaatgactccatacatattatttatttctataactacatttaaatcattaccagg

SEQ ID NO: 4469 - DNA, 1052 bp, Homo sapiens
  source 1..1052: mol_type = genomic DNA
gattttcctaggcggcggccgcggcggcggaggcagcagcggcggcggcagtggcggcggcgaaggtggcggcggctcggccagtactcccggcccccgccatttcggactgggagcgagcgcggcgcaggcactgaaggcggcggcggggccagaggctcagcggctcccaggtgcgggagagaggcctgctgaaaatgactgaatataaacttgtggtagttggagctggtggcgtaggcaagagtgccttgacgatacagctaattcagaatcattttgtggacgaatatgatccaacaatagagggtgttgatgatgccttctatacattagttcgagaaattcgaaaacataaagaaaagatgagcaaagatggtaaaaagaagaaaaagaagtcaaagacaaagtgtgtaattatgtaaatacaatttgtacttttttcttaaggcatactagtacaagtggtaatttttgtacattacactaaattattagcatttgttttagcattacctaatttttttcctgctccatgcagactgttagcttttaccttaaatgcttattttaaaatgacagtggaagtttttttttcctctaagtgccagtattcccagagttttggtttttgaactagcaatgcctgtgaaaaagaaactgaatacctaagatttctgtcttggggcttttggtgcatgcagttgattacttcttatttttcttaccaattgtgaatgttggtgtgaaacaaattaatgaagcttttgaatcatccctattctgtgttttatctagtcacataaatggattaattactaatttcagttgagaccttctaattggtttttactgaaacattgagggaacacaaatttatgggcttcctgatgatgattcttctaggcatcatgtcctatagtttgtcatccctgatgaatgtaaagttacactgttcacaaaggttttgtctcctttccactgctattagtcatggtcactctccccaaaatattatattttttctataaaaagaaaaaaatggaaaaaaa

SEQ ID NO: 4470 - DNA, 5186 bp, Homo sapiens
  source 1..5186: mol_type = genomic DNA
cgctcgcggctctgggggctcggctttgccgcgctcgctgcacttgggcgagagctggaacgtggaccagagctcggatcccatcgcagctaccgcgatgagaggcgctcgcggcgcctgggattttctctgcgttctgctcctactgcttcgcgtccagacaggctcttctcaaccatctgtgagtccaggggaaccgtctccaccatccatccatccaggaaaatcagacttaatagtccgcgtgggcgacgagattaggctgttatgcactgatccgggctttgtcaaatggacttttgagatcctggatgaaacgaatgagaataagcagaatgaatggatcacggaaaaggcagaagccaccaacaccggcaaatacacgtgcaccaacaaacacggcttaagcaattccatttatgtgtttgttagagatcctgccaagcttttccttgttgaccgctccttgtatgggaaagaagacaacgacacgctggtccgctgtcctctcacagacccagaagtgaccaattattccctcaaggggtgccaggggaagcctcttcccaaggacttgaggtttattcctgaccccaaggcgggcatcatgatcaaaagtgtgaaacgcgcctaccatcggctctgtctgcattgttctgtggaccaggagggcaagtcagtgctgtcggaaaaattcatcctgaaagtgaggccagccttcaaagctgtgcctgttgtgtctgtgtccaaagcaagctatcttcttagggaaggggaagaattcacagtgacgtgcacaataaaagatgtgtctagttctgtgtactcaacgtggaaaagagaaaacagtcagactaaactacaggagaaatataatagctggcatcacggtgacttcaattatgaacgtcaggcaacgttgactatcagttcagcgagagttaatgattctggagtgttcatgtgttatgccaataatacttttggatcagcaaatgtcacaacaaccttggaagtagtagataaaggattcattaatatcttccccatgataaacactacagtatttgtaaacgatggagaaaatgtagatttgattgttgaatatgaagcattccccaaacctgaacaccagcagtggatctatatgaacagaaccttcactgataaatgggaagattatcccaagtctgagaatgaaagtaatatcagatacgtaagtgaacttcatctaacgagattaaaaggcaccgaaggaggcacttacacattcctagtgtccaattctgacgtcaatgctgccatagcatttaatgtttatgtgaatacaaaaccagaaatcctgacttacgacaggctcgtgaatggcatgctccaatgtgtggcagcaggattcccagagcccacaatagattggtatttttgtccaggaactgagcagagatgctctgcttctgtactgccagtggatgtgcagacactaaactcatctgggccaccgtttggaaagctagtggttcagagttctatagattctagtgcattcaagcacaatggcacggttgaatgtaaggcttacaacgatgtgggcaagacttctgcctattttaactttgcatttaaaggtaacaacaaagagcaaatccatccccacaccctgttcactcctttgctgattggtttcgtaatcgtagctggcatgatgtgcattattgtgatgattctgacctacaaatatttacagaaacccatgtatgaagtacagtggaaggttgttgaggagataaatggaaacaattatgtttacatagacccaacacaacttccttatgatcacaaatgggagtttcccagaaacaggctgagttttgggaaaaccctgggtgctggagctttcgggaaggttgttgaggcaactgcttatggcttaattaagtcagatgcggccatgactgtcgctgtaaagatgctcaagccgagtgcccatttgacagaacgggaagccctcatgtctgaactcaaagtcctgagttaccttggtaatcacatgaatattgtgaatctacttggagcctgcaccattggagggcccaccctggtcattacagaatattgttgctatggtgatcttttgaattttttgagaagaaaacgtgattcatttatttgttcaaagcaggaagatcatgcagaagctgcactttataagaatcttctgcattcaaaggagtcttcctgcagcgatagtactaatgagtacatggacatgaaacctggagtttcttatgttgtcccaaccaaggccgacaaaaggagatctgtgagaataggctcatacatagaaagagatgtgactcccgccatcatggaggatgacgagttggccctagacttagaagacttgctgagcttttcttaccaggtggcaaagggcatggctttcctcgcctccaagaattgtattcacagagacttggcagccagaaatatcctccttactcatggtcggatcacaaagatttgtgattttggtctagccagagacatcaagaatgattctaattatgtggttaaaggaaacgctcgactacctgtgaagtggatggcacctgaaagcattttcaactgtgtatacacgtttgaaagtgacgtctggtcctatgggatttttctttgggagctgttctctttaggaagcagcccctatcctggaatgccggtcgattctaagttctacaagatgatcaaggaaggcttccggatgctcagccctgaacacgcacctgctgaaatgtatgacataatgaagacttgctgggatgcagatcccctaaaaagaccaacattcaagcaaattgttcagctaattgagaagcagatttcagagagcaccaatcatatttactccaacttagcaaactgcagccccaaccgacagaagcccgtggtagaccattctgtgcggatcaattctgtcggcagcaccgcttcctcctcccagcctctgcttgtgcacgacgatgtctgagcagaatcagtgtttgggtcacccctccaggaatgatctcttcttttggcttccatgatggttattttcttttctttcaacttgcatccaactccaggatagtgggcaccccactgcaatcctgtctttctgagcacactttagtggccgatgatttttgtcatcagccaccatcctattgcaaaggttccaactgtatatattcccaatagcaacgtagcttctaccatgaacagaaaacattctgatttggaaaaagagagggaggtatggactgggggccagagtcctttccaaggcttctccaattctgcccaaaaatatggttgatagtttacctgaataaatggtagtaatcacagttggccttcagaaccatccatagtagtatgatgatacaagattagaagctgaaaacctaagtcctttatgtggaaaacagaacatcattagaacaaaggacagagtatgaacacctgggcttaagaaatctagtatttcatgctgggaatgagacataggccatgaaaaaaatgatccccaagtgtgaacaaaagatgctcttctgtggaccactgcatgagcttttatactaccgacctggtttttaaatagagtttgctattagagcattgaattggagagaaggcctccctagccagcacttgtatatacgcatctataaattgtccgtgttcatacatttgaggggaaaacaccataaggtttcgtttctgtatacaaccctggcattatgtccactgtgtatagaagtagattaagagccatataagtttgaaggaaacagttaataccattttttaaggaaacaatataaccacaaagcacagtttgaacaaaatctcctcttttagctgatgaacttattctgtagattctgtggaacaagcctatcagcttcagaatggcattgtactcaatggatttgatgctgtttgacaaagttactgattcactgcatggctcccacaggagtgggaaaacactgccatcttagtttggattcttatgtagcaggaaataaagtataggtttagcctccttcgcaggcatgtcctggacaccgggccagtatctatatatgtgtatgtacgtttgtatgtgtgtagacaaatatttggaggggtatttttgccctgagtccaagagggtcctttagtacctgaaaagtaacttggctttcattattagtactgctcttgtttcttttcacatagctgtctagagtagcttaccagaagcttccatagtggtgcagaggaagtggaaggcatcagtccctatgtatttgcagttcacctgcacttaaggcactctgttatttagactcatcttactgtacctgttccttagaccttccataatgctactgtctcactgaaacatttaaattttaccctttagactgtagcctggatattattcttgtagtttacctctttaaaaacaaaacaaaacaaaacaaaaaactccccttcctcactgcccaatataaaaggcaaatgtgtacatggcagagtttgtgtgttgtcttgaaagattcaggtatgttgcctttatggtttcccccttctacatttcttagactacatttagagaactgtggccgttatctggaagtaaccatttgcactggagttctatgctctcgcacctttccaaagttaacagattttggggttgtgttgtcacccaagagattgttgtttgccatactttgtctgaaaaattcctttgtgtttctattgacttcaatgatagtaagaaaagtggttgttagttatagatgtctaggtacttcaggggcacttcattgagagttttgtcttggatattcttgaaagtttatatttttataattttttcttacatcagatgtttctttgcagtggcttaatgtttgaaattattttgtggctttttttgtaaatattgaaatgtagcaataatgtcttttgaatattcccaagcccatgagtccttgaaaatattttttatatatacagtaactttatgtgtaaatacataagcggcgtaagtttaaaggatgttggtgttccacgtgttttattcctgtatgttgtccaattgttgacagttctgaagaattctaataaaatgtacatatataaatcaa

SEQ ID NO: 4471 - DNA, 3470 bp, Homo sapiens
  source 1..3470: mol_type = genomic DNA
cgctcgcggctctgggggctcggctttgccgcgctcgctgcacttgggcgagagctggaacgtggaccagagctcggatcccatcgcagctaccgcgatgagaggcgctcgcggcgcctgggattttctctgcgttctgctcctactgcttcgcgtccagacaggctcttctcaaccatctgtgagtccaggggaaccgtctccaccatccatccatccaggaaaatcagacttaatagtccgcgtgggcgacgagattaggctgttatgcactgatccgggctttgtcaaatggacttttgagatcctggatgaaacgaatgagaataagcagaatgaatggatcacggaaaaggcagaagccaccaacaccggcaaatacacgtgcaccaacaaacacggcttaagcaattccatttatgtgtttgttagagatcctgccaagcttttccttgttgaccgctccttgtatgggaaagaagacaacgacacgctggtccgctgtcctctcacagacccagaagtgaccaattattccctcaaggggtgccaggggaagcctcttcccaaggacttgaggtttattcctgaccccaaggcgggcatcatgatcaaaagtgtgaaacgcgcctaccatcggctctgtctgcattgttctgtggaccaggagggcaagtcagtgctgtcggaaaaattcatcctgaaagtgaggccagccttcaaagctgtgcctgttgtgtctgtgtccaaagcaagctatcttcttagggaaggggaagaattcacagtgacgtgcacaataaaagatgtgtctagttctgtgtactcaacgtggaaaagagaaaacagtcagactaaactacaggagaaatataatagctggcatcacggtgacttcaattatgaacgtcaggcaacgttgactatcagttcagcgagagttaatgattctggagtgttcatgtgttatgccaataatacttttggatcagcaaatgtcacaacaaccttggaagtagtagataaaggattcattaatatcttccccatgataaacactacagtatttgtaaacgatggagaaaatgtagatttgattgttgaatatgaagcattccccaaacctgaacaccagcagtggatctatatgaacagaaccttcactgataaatgggaagattatcccaagtctgagaatgaaagtaatatcagatacgtaagtgaacttcatctaacgagattaaaaggcaccgaaggaggcacttacacattcctagtgtccaattctgacgtcaatgctgccatagcatttaatgtttatgtgaatacaaaaccagaaatcctgacttacgacaggctcgtgaatggcatgctccaatgtgtggcagcaggattcccagagcccacaatagattggtatttttgtccaggaactgagcagagatgctctgcttctgtactgccagtggatgtgcagacactaaactcatctgggccaccgtttggaaagctagtggttcagagttctatagattctagtgcattcaagcacaatggcacggttgaatgtaaggcttacaacgatgtgggcaagacttctgcctattttaactttgcatttaaagagcaaatccatccccacaccctgttcactcctttgctgattggtttcgtaatcgtagctggcatgatgtgcattattgtgatgattctgacctacaaatatttacagaaacccatgtatgaagtacagtggaaggttgttgaggagataaatggaaacaattatgtttacatagacccaacacaacttccttatgatcacaaatgggagtttcccagaaacaggctgagttttgggaaaaccctgggtgctggagctttcgggaaggttgttgaggcaactgcttatggcttaattaagtcagatgcggccatgactgtcgctgtaaagatgctcaagccgagtgcccatttgacagaacgggaagccctcatgtctgaactcaaagtcctgagttaccttggtaatcacatgaatattgtgaatctacttggagcctgcaccattggagggcccaccctggtcattacagaatattgttgctatggtgatcttttgaattttttgagaagaaaacgtgattcatttatttgttcaaagcaggaagatcatgcagaagctgcactttataagaatcttctgcattcaaaggagtcttcctgcagcgatagtactaatgagtacatggacatgaaacctggagtttcttatgttgtcccaaccaaggccgacaaaaggagatctgtgagaataggctcatacatagaaagagatgtgactcccgccatcatggaggatgacgagttggccctagacttagaagacttgctgagcttttcttaccaggtggcaaagggcatggctttcctcgcctccaagaattgtattcacagagacttggcagccagaaatatcctccttactcatggtcggatcacaaagatttgtgattttggtctagccagagacatcaagaatgattctaattatgtggttaaaggaaacgctcgactacctgtgaagtggatggcacctgaaagcattttcaactgtgtatacacgtttgaaagtgacgtctggtcctatgggatttttctttgggagctgttctctttaggaagcagcccctatcctggaatgccggtcgattctaagttctacaagatgatcaaggaaggcttccggatgctcagccctgaacacgcacctgctgaaatgtatgacataatgaagacttgctgggatgcagatcccctaaaaagaccaacattcaagcaaattgttcagctaattgagaagcagatttcagagagcaccaatcatatttactccaacttagcaaactgcagccccaaccgacagaagcccgtggtagaccattctgtgcggatcaattctgtcggcagcaccgcttcctcctcccagcctctgcttgtgcacgacgatgtctgagcagaatcagtgtttgggtcacccctccaggaatgatctcttcttttggcttccatgatggttattttcttttctttcaacttgcatccaactccaggatagtgggcaccccactgcaatcctgtctttctgagcacactttagtggccgatgatttttgtcatcagccaccatcctattgcaaaggttccaactgtatatattcccaatagcaacgtagcttctaccatgaacagaaaacattctgatttggaaaaagagagggaggtatggactgggggccagagtcctttccaaggcttctccaattctgcccaaaaatatggttgatagtttacctgaataaatggtagtaatcacagttggccttcagaaccatccatagtagtatgatgatacaagattagaagctgaaaacctaagtcctttatgtggaaaacagaacatcattaga

SEQ ID NO: 4472 - DNA, 1326 bp, Homo sapiens
  source 1..1326: mol_type = genomic DNA
tctgggggctcggctttgccgcgctcgctgcacttgggcgagagctggaacgtggaccagagctcggatcccatcgcagctaccgcgatgagaggcgctcgcggcgcctgggattttctctgcgttctgctcctactgcttcgcgtccagacaggctcttctcaaccatctgtgagtccaggggaaccgtctccaccatccatccatccaggaaaatcagacttaatagtccgcgtgggcgacgagattaggctgttatgcactgatccgggctttgtcaaatggacttttgagatcctggatgaaacgaatgagaataagcagaatgaatggatcacggaaaaggcagaagccaccaacaccggcaaatacacgtgcaccaacaaacacggcttaagcaattccatttatgtgtttgttagagatcctgccaagcttttccttgttgaccgctccttgtatgggaaagaagacaacgacacgctggtccgctgtcctctcacagacccagaagtgaccaattattccctcaaggggtgccaggggaagcctcttcccaaggacttgaggtttattcctgaccccaaggcgggcatcatgatcaaaagtgtgaaacgcgcctaccatcggctctgtctgcattgttctgtggaccaggagggcaagtcagtgctgtcggaaaaattcatcctgaaagtgaggccagccttcaaagctgtgcctgttgtgtctgtgtccaaagcaagctatcttcttagggaaggggaagaattcacagtgacgtgcacaataaaagatgtgtctagttctgtgtactcaacgtggaaaagagaaaacagtcagactaaactacaggagaaatataatagctggcatcacggtgacttcaattatgaacgtcaggcaacgttgactatcagttcagcgagagttaatgattctggagtgttcatgtgttatgccaataatacttttggatcagcaaatgtcacaacaaccttggaagtagtagataaaggattcattaatatcttccccatgataaacactacagtatttgtaaacgatggagaaaatgtagatttgattgttgaatatgaagcattccccaaacctgaacaccagcagtggatctatatgaacagaaccttcactgataaatgggaagattatcccaagtctgagaatgaaagtaatatcagatacgtaagtgaacttcatctaacgagattaaaaggcaccgaaggaggcacttacacattcctagtgtccaattctgacgtcaatgctgccatagcatttaatgtttatgtgaatagtaagttg

SEQ ID NO: 4473 - DNA, 2646 bp, Homo sapiens
  source 1..2646: mol_type = genomic DNA
atcttttttcatcttctagctgtagctcgggctgcttgtcggcttggcctccccctcccccctttgctctctgcctcgtctttccccaggacttcgctattttgcttttttaaaaaaaggcaagaaagaactaaactcccccctccctctcctccagtcgggctgcacctctgccttgcactttgcacagaggtagagagcgcgcgagggagagagaggaaagaaaaaaaataataaagagagccaagcagaagaggaggcgagaagcatgaagtgttaactcccccgtgccaaggcccgcgccgcccggacagacgcccgccgcgcctccagccccgagcggacgccgcgcgcgccctgcctgcagcccgggccggcgaggcgagcccttccttatgcaaagcgcgcagcggagcggcgagcgggggacgccgcgcaccgggccgggctcctccagcttcgccgccgcagccaccaccgccgccaccgcagctcgcggaggatcttcccgagcctgaagccgccggctcggcgcgcaaggaggcgagcgagcaaggaggggccggggcgagcgagggagcacattggcgtgagcaggggggagggagggcgggcgcggggggcgcgggcagggcgggggggtgtgtgtgtgagcgcgctcggaggtttcgggccagccaccgccgcgcaagctagaagcgccccagcccggcaagctggctcacccgctggccacccagcacagcccgctggcccctctcctgcagcccatctggcggagcggcggcggcggcggcggcggcggcaggagaatggcatcagaactggcaatgagcaactccgacctgcccaccagtcccctggccatggaatatgttaatgacttcgatctgatgaagtttgaagtgaaaaaggaaccggtggagaccgaccgcatcatcagccagtgcggccgtctcatcgccgggggctcgctgtcctccacccccatgagcacgccgtgcagctcggtgcccccttcccccagcttctcggcgcccagcccgggctcgggcagcgagcagaaggcgcacctggaagactactactggatgaccggctacccgcagcagctgaaccccgaggcgctgggcttcagccccgaggacgcggtcgaggcgctcatcagcaacagccaccagctccagggcggcttcgatggctacgcgcgcggggcgcagcagctggccgcggcggccggggccggtgccggcgcctccttgggcggcagcggcgaggagatgggccccgccgccgccgtggtgtccgccgtgatcgccgcggccgccgcgcagagcggcgcgggcccgcactaccaccaccaccaccaccacgccgccggccaccaccaccacccgacggccggcgcgcccggcgccgcgggcagcgcggccgcctcggccggtggcgctgggggcgcgggcggcggtggcccggccagcgctgggggcggcggcggcggcggcggcggcggaggcggcgggggcgcggcgggggcggggggcgccctgcacccgcaccacgccgccggcggcctgcacttcgacgaccgcttctccgacgagcagctggtgaccatgtctgtgcgcgagctgaaccggcagctgcgcggggtcagcaaggaggaggtgatccggctgaagcagaagaggcggaccctgaaaaaccgcggctatgcccagtcctgccgcttcaagagggtgcagcagagacacgtcctggagtcggagaagaaccagctgctgcagcaagtcgaccacctcaagcaggagatctccaggctggtgcgcgagagggacgcgtacaaggagaaatacgagaagttggtgagcagcggcttccgagaaaacggctcgagcagcgacaacccgtcctctcccgagtttttcataactgagcccactcgcaagttggagccatcagtgggatacgccacattttggaagccccagcatcgtgtacttaccagtgtgttcacaaaatgaaatttgtgtgagagctgtacattaaaaaaaatcatcattattattattatttgcagtcatggagaaccacctacccctgacttctgtttagtctcctttttaaataaaaattactgtgttagagaagaaggctattaaatgtagtagttaactatgcctcttgtctgggggtttcatagagaccggtaggaaagcgcactcctgcttttcgatttatggtgtgtgcaagtaaacaggtgcattgctttcaacctgccatactagttttaaaaattcactgaaattacaaagatacatatatatgcatatatataatggaaagtttcccggaatgcaacaattagcattttaaaatcatatataggcatgcacattctaaatagtactttttcatgcttcattgtttctctggcagataattttactaagaagaaaaatagatattcgactccccttccctaaacaaatccacgggcagaggctccagcggagccgagccccctggttttctcgtaggccctagacggtgttgcatttatcagtgatgtcaaacgtgctcatttgtcagacatagctgtaaatgaaaacaatgtgtggcaaaatacaaagttagttaaataca

SEQ ID NO: 4474 - DNA, 6384 bp, Homo sapiens
  source 1..6384: mol_type = genomic DNA
atcttttttcatcttctagctgtagctcgggctgcttgtcggcttggcctccccctcccccctttgctctctgcctcgtctttccccaggacttcgctattttgcttttttaaaaaaaggcaagaaagaactaaactcccccctccctctcctccagtcgggctgcacctctgccttgcactttgcacagaggtagagagcgcgcgagggagagagaggaaagaaaaaaaataataaagagagccaagcagaagaggaggcgagaagcatgaagtgttaactcccccgtgccaaggcccgcgccgcccggacagacgcccgccgcgcctccagccccgagcggacgccgcgcgcgccctgcctgcagcccgggccggcgaggcgagcccttccttatgcaaagcgcgcagcggagcggcgagcgggggacgccgcgcaccgggccgggctcctccagcttcgccgccgcagccaccaccgccgccaccgcagctcgcggaggatcttcccgagcctgaagccgccggctcggcgcgcaaggaggcgagcgagcaaggaggggccggggcgagcgagggagcacattggcgtgagcaggggggagggagggcgggcgcggggggcgcgggcagggcgggggggtgtgtgtgtgagcgcgctcggaggtttcgggccagccaccgccgcgcaagctagaagcgccccagcccggcaagctggctcacccgctggccacccagcacagcccgctggcccctctcctgcagcccatctggcggagcggcggcggcggcggcggcggcggcaggagaatggcatcagaactggcaatgagcaactccgacctgcccaccagtcccctggccatggaatatgttaatgacttcgatctgatgaagtttgaagtgaaaaaggaaccggtggagaccgaccgcatcatcagccagtgcggccgtctcatcgccgggggctcgctgtcctccacccccatgagcacgccgtgcagctcggtgcccccttcccccagcttctcggcgcccagcccgggctcgggcagcgagcagaaggcgcacctggaagactactactggatgaccggctacccgcagcagctgaaccccgaggcgctgggcttcagccccgaggacgcggtcgaggcgctcatcagcaacagccaccagctccagggcggcttcgatggctacgcgcgcggggcgcagcagctggccgcggcggccggggccggtgccggcgcctccttgggcggcagcggcgaggagatgggccccgccgccgccgtggtgtccgccgtgatcgccgcggccgccgcgcagagcggcgcgggcccgcactaccaccaccaccaccaccacgccgccggccaccaccaccacccgacggccggcgcgcccggcgccgcgggcagcgcggccgcctcggccggtggcgctgggggcgcgggcggcggtggcccggccagcgctgggggcggcggcggcggcggcggcggcggaggcggcgggggcgcggcgggggcggggggcgccctgcacccgcaccacgccgccggcggcctgcacttcgacgaccgcttctccgacgagcagctggtgaccatgtctgtgcgcgagctgaaccggcagctgcgcggggtcagcaaggaggaggtgatccggctgaagcagaagaggcggaccctgaaaaaccgcggctatgcccagtcctgccgcttcaagagggtgcagcagagacacgtcctggagtcggagaagaaccagctgctgcagcaagtcgaccacctcaagcaggagatctccaggctggtgcgcgagagggacgcgtacaaggagaaatacgagaagttggtgagcagcggcttccgagaaaacggctcgagcagcgacaacccgtcctctcccgagtttttcatgtgagtctgacacgcgattccagctagccaccctgataagtgctccgcgggggtccggctcgggtgtgggcttgctagttctagagccatgctcgccaccacctcaccacccccacccccaccgagtttggcccccttggccccctacacacacacaaacccgcacgcacacaccacacacacacacacacacacacacacaccccacaccctgctcgagtttgtggtggtggtggctgttttaaactggggagggaatgggtgtctggctcatggattgccaatctgaaattctccataacttgctagcttgttttttttttttttttacacccccccgccccacccccggacttgcacaatgttcaatgatctcagcagagttcttcatgtgaaacgttgatcacctttgaagcctgcatcattcacatattttttcttcttcttccccttcagttcatgaactggtgttcattttctgtgtgtgtgtgtgttttattttgtttggatttttttttttaattttacttttagagcttgctgtgttgcccaccttttttccaacctccaccctcactccttctcaacccatctcttccgagatgaaagaaaaaaaaaagcaaagtttttttttcttctcctgagttcttcatgtgagattgagcttgcaaaggaaaaaaaaatgtgaaatgttatagacttgcagcgtgccgagttccatcgggttttttttttagcattgttatgctaaaatagagaaaaaaatcctcatgaaccttccacaatcaagcctgcatcaaccttctgggtgtgacttgtgagttttggccttgtgatgccaaatctgagagtttagtctgccattaaaaaaactcattctcatctcatgcattattatgcttgctactttgtcttagcaacaatgaactataactgtttcaaagactttatggaaaagagacattatattaataaaaaaaaaaagcctgcatgctggacatgtatggtataattattttttcctttttttttccttttggcttggaaatggacgttcgaagacttatagcatggcattcatacttttgttttattgcctcatgacttttttgagtttagaacaaaacagtgcaaccgtagagccttcttcccatgaaattttgcatctgctccaaaactgctttgagttactcagaacttcaacctcccaatgcactgaaggcattccttgtcaaagataccagaatgggttacacatttaacctggcaaacattgaagaactcttaatgttttctttttaataagaatgacgccccactttggggactaaaattgtgctattgccgagaagcagtctaaaatttattttttaaaaagagaaactgccccattatttttggtttgttttatttttattttatattttttggcttttggtcattgtcaaatgtggaatgctctgggtttctagtatataatttaattctagtttttataatctgttagcccagttaaaatgtatgctacagataaaggaatgttatagataaatttgaaagagttaggtctgtttagctgtagattttttaaacgattgatgcactaaattgtttactattgtgatgttaaggggggtagagtttgcaaggggactgtttaaaaaaagtagcttatacagcatgtgcttgcaacttaaatataagttgggtatgtgtagtctttgctataccactgactgtattgaaaaccaaagtattaagaggggaaacgcccctgtttatatctgtaggggtattttacattcaaaaatgtatgtttttttttcttttcaaaattaaagtatttgggactgaattgcactaagatataacctgcaagcatataatacaaaaaaaaattgcaaaactgtttagaacgctaataaaatttatgcagttataaaaatggcattactgcacagttttaagatgatgcagatttttttacagttgtattgtggtgcagaactggattttctgtaacttaaaaaaaaatccacagttttaaaggcaataatcagtaaatgttattttcagggactgacatcctgtctttaaaaagaaatgaaaagtaaatcttaccacaataaatataaaaaaatcttgtcagttacttttcttttacatattttgctgtgcaaaattgttttatatcttgagttactaactaaccacgcgtgttgttcctatgtgcttttctttcattttcaattctggttatatcaagaaaagaataatctacaataataaacggcatttttttttgattctgtactcagtttcttagtgtacagtttaactgggcccaacaacctcgttaaaagtgtaaaatgcatccttttctccagtggaaggattcctggaggaatagggagacagtaattcagggtgaaattataggctgttttttgaagtgaggaggctggccccatatactgattagcaatatttaatatagatgtaaattatgacctcatttttttctccccaaagttttcagttttcaaatgagttgagccataattgcccttggtaggaaaaacaaaacaaaacagtggaactaggcttcctgagcatggccctacacttctgatcaggagcaaagccatccatagacagaggagccggacaaatatggcgcatcagaggtggcttgcgcacatatgcattgaacggtaaagagaaacagcgcttgccttttcactaaagttgactatttttccttcttctcttacacaccgagattttcttgttagcaaggcctgacaagatttaacataaacatgacaaatcatagttgtttgttttgttttgcttttctctttaacactgaagatcatttgtcttaaataggaaaaagaaaatccactccttacttccatatttccaagtacatatctggtttaaactatgttatcaaatcatatttcaccgtgaatattcagtggagaacttctctacctggatgagctagtaatgatttcagatcatgctatccccagaaataaaagcaaaaaataatacctgtgtggaatataggctgtgctttgatttactggtatttaccccaaaataggctgtgtatgggggctgacttaaagatcccttggaaagactcaaaactaccttcactagtaggactcctaagcgctgacctatttttaaatgacacaaattcatgaaactaatgttacaaattcatgcagtttgcactcttagtcatcttcccctagcacaccaatagaatgttagacaaagccagcactgttttgaaaatacagccaaacacgatgacttttgttttgttttctgccgttcttaaaagaaaaaaagataatattgcaactctgactgaaagacttatttttaagaaaacaggttgtgtttggtgctgctaagttctggccagtttatcatctggccttcctgcctattttttacaaaacacgaagacagtgtgtaacctcgacattttgaccttcctttatgtgctagtttagacaggctcctgaatccacacttaattttgcttaacaaaagtcttaatagtaaacctcccctcatgagcttgaagtcaagtgttcttgacttcagatatttctttcctttttttttttttttcctcatcacaactaagagatacacaaactctgaagaagcagaaatggagagaatgcttttaacaaaaaagcatctgatgaaagattttaggcaaacattctcaaaataagagtgatattctggatgtagttattgcagttatctcatgacaaatgaggcctggattggaaggaaaatatagttgtgtagaattaagcattttgataggaatctacaaggtagttgaatataataagcaggtttgggcccccaaactttagaaaatcaaatgcaaaggtgctggcaaaaatgaggtttgagtggctggctgtaagagaaggttaactcctagtaaaaggcatttttagaaataacaattactgaaaactttgaagtatagtgggagtagcaaacaaatacatgttttttttttcttacaaagaactcctaaatcctgagtaagtgccattcattacaataagtctctaaatttaaaaaaaaaaaaatcatatgaggaaatctagctttcccctttacgctgcgtttgatctttgtctaaatagtgttaaaattcctttcattccaattacagaactgagcccactcgcaagttggagccatcagtgggatacgccacattttggaagccccagcatcgtgtacttaccagtgtgttcacaaaatgaaatttgtgtgagagctgtacattaaaaaaaatcatcattattattattatttgcagtcatggagaaccacctacccctgacttctgtttagtctcctttttaaataaaaattactgtgttagagaagaa

SEQ ID NO: 4475 - DNA, 2347 bp, Homo sapiens
  source 1..2347: mol_type = genomic DNA
atggccgcggagctggcgatgggcgccgagctgcccagcagcccgctggccatcgagtacgtcaacgacttcgacctgatgaagttcgaggtgaagaaggagcctcccgaggccgagcgcttctgccaccgcctgccgccaggctcgctgtcctcgacgccgctcagcacgccctgctcctccgtgccctcctcgcccagcttctgcgcgcccagcccgggcaccggcggcggcggcggcgcggggggcggcggcggctcgtctcaggccgggggcgcccccgggccgccgagcgggggccccggcgccgtcgggggcacctcggggaagccggcgctggaggatctgtactggatgagcggctaccagcatcacctcaaccccgaggcgctcaacctgacgcccgaggacgcggtggaggcgctcatcggcagcggccaccacggcgcgcaccacggcgcgcaccacccggcggccgccgcagcctacgaggctttccgcggcccgggcttcgcgggcggcggcggagcggacgacatgggcgccggccaccaccacggcgcgcaccacgccgcccaccatcaccacgccgcccaccaccaccaccaccaccaccaccaccatggcggcgcgggacacggcggtggcgcgggccaccacgtgcgcctggaggagcgcttctccgacgaccagctggtgtccatgtcggtgcgcgagctgaaccggcagctccgcggcttcagcaaggaggaggtcatccggctcaagcagaagcggcgcacgctcaagaaccgcggctacgcgcagtcctgccgcttcaagcgggtgcagcagcggcacattctggagagcgagaagtgccaactccagagccaggtggagcagctgaagctggaggtggggcgcctggccaaagagcgggacctgtacaaggagaaatacgagaagctggcgggccggggcggccccgggagcgcgggcggggccggtttcccgcgggagccttcgccgccgcaggccggtcccggcggggccaagggcacggccgacttcttcctgtaggcgccggaccccgagcccgcgccgccgtcgccggggacaagttcgcgcaggcctctcggggcctcggctcggactccgcggtacaggacgtggacaccaggcccggcccggccgtgctggccccggtgccaagtctgcgggcgcggggctggaggccccttcgctcccggtccccgttcgcgcgcgtcggcccgggtcgccgtcctgaggttgagcggagaacggtgatttctaaggaaacttgagccaggtctaacttctttccaagcgtccgcttgtacatacgttgaacgtggttctccgttcccaccttcgccctgccagcctagagggaccgcgctgccgtcccttcccgggtggcccctgcctgcccccgccctccttcgttctcttctcagcctccctttccttgccttttttaacttcccctccccgttttaaaatcggtcttattttcgaagtatttataattattatgcttggtgattagaaaagaaaaccttggaggaagccccttctttccccagccggggtccgccctcagtcgcgagtcacagcatgagtcgctcgccaggaggggcccggcccctgcctgccccctccccgcttgcccccgaccctgctaccggcgttccttggaggtcgaagccagggacgtcacccgtgctgtgtccaggcctgctgtcctactatgctcaaccgggggtggggggaggggggtgagtcctgtgctcagtcgggtgggggctggcccggatcccgagctgctgtctctctatgcaccagaacatatctgtaactcctggggaaatacatcttgttttaaccttcaagagaagtgaaagaaaaaagtaatgcacagtatttctagcagaaaatttttttttttaagaggaggcttgggccagagccttctggcatggggcgggtggagaaagtgtttttattttaatttaaattgtgtttcgttttgtttgtggaatctttctttaatgcttcgtcgctctttggactagccgggagagagggcgaggaggcgggtgctccaggccctgtaggctgggccaggcgcctgggggatctgcccgttttcggaggccctcaggggccatcagtgggattccagccgctccacacccctcccctgagcactcggagtggaaggcgcgccgactcgttgaaagttttgttgtgtagttggttttcgttgagttcttttttcatttgctacgaaactgagaaaaagaaaaaaatacacaaaataaatctgttcagatccaagtca

SEQ ID NO: 4476 - DNA, 3393 bp, Homo sapiens
  source 1..3393: mol_type = genomic DNA
cagcacagctgcaccgccgagctgcgagcggctgcgagcgagagagcgtaagagcaagagagctagagagcgagcaacgggcactcgccccacgcctcccctcagccccaccgcgcgctccgcttgcctctccaccccgcccgactctacccggcccggtccctgcgcgggcacagcccagagctctggggcggtgcaggcagcctcgggactctccggcgcgccgccgcgtccccagacaaaggcttggccggcggccccggcccgctgcgccctcgctccccgcctccccagctcttctccgctcttcccccccgcgcttggctcggcgcgctccggccggccgcaaagtttcccgggcggcagcggcggctgcgcctcgcttcagcgatggccgcggagctgagcatggggccagagctgcccaccagcccgctggccatggagtatgtcaacgacttcgacctgctcaagttcgacgtgaagaaggagccactggggcgcgcggagcgtccgggcaggccctgcacacgcctgcagccagccggctcggtgtcctccacaccgctcagcactccgtgtagctccgtgccctcgtcgcccagcttcagcccgaccgaacagaagacacacctcgaggatctgtactggatggcgagcaactaccagcagatgaaccccgaggcgctcaacctgacgcccgaggacgcggtggaagcgctcatcggctcgcacccagtgccacagccgctgcaaagcttcgacagctttcgcggcgctcaccaccaccaccatcaccaccaccctcacccgcaccacgcgtacccgggcgccggcgtggcccacgacgagctgggcccgcacgctcacccgcaccatcaccatcatcaccaagcgtcgccgccgccgtccagcgccgctagcccggcgcaacagctgcccactagccaccccgggcccgggccgcacgcgacggcctcggcgacggcggcgggcggcaacggcagcgtggaggaccgcttctccgacgaccagctcgtgtccatgtccgtgcgcgagctgaaccgccacctgcggggcttcaccaaggacgaggtgatccgcctgaagcagaagcggcggaccctgaagaaccggggctacgcccagtcttgcaggtataaacgcgtccagcagaagcaccacctggagaatgagaagacgcagctcattcagcaggtggagcagcttaagcaggaggtgtcccggctggcccgcgagagagacgcctacaaggtcaagtgcgagaaactcgccaactccggcttcagggaggcgggctccaccagcgacagcccctcctctcccgagttctttctgtgagtcgtggccggtcctggcccccgcccttgccccggcccggactccctgtcccacgtccctagtcccagactaccccggaccctgtccctgccgcggccccagccttgacctgtttgacttgagcgagagggaggaagggcgcgcgggccgcgggcgacgggcgggtgcgcgggcgggcaggggaccttggctaaggcgagagtagcgcacgccagcgccgcctcctagactcgagcagagccggagagagagacgagagggtgggaggtcccggagtaacttctctccaggctgaagggcggcgaggcatagtcccgagaagtcaccaaggccatctggagactcctggctttctgaactttgcgcgttaagccgggacagctgctttgctgcccggagagtagtccgcgccaggaagagagcaacgaggaaaggagagggactctggcgtcccggcaggcgagaggcgaggctgagcgaaagaaggaaggacagacggacctgtctgtcagagttcggagaacactggctctcagccctgagacacaggcctcagttaggacgctcggcgcccaaatctcatcagttttattgcctgctcgattatatagaaaaatacaaaaaatctgcattaaaaatattaatcctgcatgctggacatgtatggtaataatttctattttgtaccattttcttgtttaactttagcatgttgttgatcatggatcatactccccttgtttctttgggtgagaagggatcgcagtttggaaactccggcggctgcgtgcggggtttcagtcccagctgtaggcttgtaaatacccgccccgccaaaccgcatagagaacgtggcagcaagctgagggtctttgtttgggtttattattacggtatttttgtttgtaagttaaaaagaaaaaaaaaaagaaaaagttccgggcattttgcatcagaaaacaactttgtcttggggcacacttggaagttgcatgttttctttccttcccttatccccattcggtcctctttttcctctctcgctttagttttcaaccttgttggtgctgagagagagaaccgagaggtcccagtacaagggcagggcagggcagggaagctgccaagctccgcaccccagaggagtgttctggactacagccttgtcttatggtcaaattgatacccttaataagaaaggaaaggaaaggaaaacagatcctcccctctgctttttattgtaaccagaatcaccctgaggtcccttctgaaccctctgggcctgcgctaattgtaggagccacagcgctcctagggtgagaggcttagccatccctgaccctggcagtgcactggtaagcagacactgcactgaaccaactgctatgctcagaatgtaccagaaacccaaacattggcaagtaattttgcaactttcaagtgcgttctttagaccaatgcattgcgtttctttccctgcttttgagatagtaggaagagttcttggtggtgtccccccccttcaattcttcagttgtatagtagttatagggaagatatgggtgtttttctttattattacttttttttttctgcaggtcagtaaaaggatttaagttgcactgacaaaaataccaaaataaaagtgtatttttaagttcccatttgaaattgctggcgctgctggccggatgcatttttgagtttgtattagttgataaattaacagtaataacaagattgtatgaaccgcatggtgcttgcagttttaaatattgtggatatttgtcctgcatcagaaacgagctttggtttttacagattcaactgtgttgaaatcaaacctgccgcaacagaaattgtttttatttcatgtaaaataagggatcaatttcaaaccctgcttatgatatgaaaatattaaaacctagtctattgtagttttattcagactggtttctgttttttggttattaaaatggtttcctattttgcttattaaaaccatggaaatggtgtttatttagagga

SEQ ID NO: 4477 - DNA, 1813 bp, Homo sapiens
  source 1..1813: mol_type = genomic DNA
cttcagcgatggccgcggagctgagcatggggccagagctgcccaccagcccgctggccatggagtatgtcaacgacttcgacctgctcaagttcgacgtgaagaaggagccactggggcgcgcggagcgtccgggcaggccctgcacacgcctgcagccagccggctcggtgtcctccacaccgctcagcactccgtgtagctccgtgccctcgtcgcccagcttcagcccgaccgaacagaagacacacctcgaggatctgtactggatggcgagcaactaccagcagatgaaccccgaggcgctcaacctgacgcccgaggacgcggtggaagcgctcatcggctcgcacccagtgccacagccgctgcaaagcttcgacagctttcgcggcgctcaccaccaccaccatcaccaccaccctcacccgcaccacgcgtacccgggcgccggcgtggcccacgacgagctgggcccgcacgctcacccgcaccatcaccatcatcaccaagcgtcgccgccgccgtccagcgccgctagcccggcgcaacagctgcccactagccaccccgggcccgggccgcacgcgacggcctcggcgacggcggcgggcggcaacggcagcgtggaggaccgcttctccgacgaccagctcgtgtccatgtccgtgcgcgagctgaaccgccacctgcggggcttcaccaaggacgaggtgatccgcctgaagcagaagcggcggaccctgaagaaccggggctacgcccagtcttgcaggtataaacgcgtccagcagaagcaccacctggagaatgagaagacgcagctcattcagcaggtggagcagcttaagcaggaggtgtcccggctggcccgcgagagagacgcctacaaggtcaagtgcgagaaactcgccaactccggcttcagggaggcgggctccaccagcgacagcccctcctctcccgagttctttctgtgagtcgtggccggtcctggccccagccttgacctgtttgacttgagcgagagggaggaagggcgcgcgggccgcgggcgacgggcgggtgcgcgggcgggcaggggaccttggctaaggcgagagtagcgcacgccagcgccgcctcctagactcgagcagagccggagagagagacgagagggtgggaggtcccggagtaacttctctccaggctgaagggcggcgaggcatagtcccgagaagtcaccaaggccatctggagactcctggctttctgaactttgcgcgttaagccgggacagctgctttgctgcccggagagtagtccgcgccaggaagagagcaacgaggaaaggagagggactctggcgtcccggcaggcgagaggcgaggctgagcgaaagaaggaaggacagacggacctgtctgtcagagttcggagaacactggctctcagccctgagacacaggcctcagttaggacgctcggcgcccaaatctcatcagttttattgcctgctcgattatatagaaaaatacaaaaaatctgcattaaaaatattaatcctgcatgctggacatgtatggtaataatttctattttgtaccattttcttgtttaactttagcatgttgttgatcatggatcatactccccttgtttctttgggtgagaagggatcgcagtttggaaactccggcggctgcgtgcggggtttcagtcccagctgtaggcttgtaaatacccgccccgccaaaccgcatagagaacgtggcagcaagctgagggtctttgtttgggtttattattacggtatttttgtttgtaagtt

SEQ ID NO: 4478 - DNA, 1714 bp, Homo sapiens
  source 1..1714: mol_type = genomic DNA
aaacggcggctcttgagggaggctgggcgcgagattcggcggtgcggacaaaaccctgcaggagactgcgagccctgcagaactgctagctgcgggggagagggcaggggtcgggcgcctgtggcggagccgggctggggccagggcagggaggctgacaagcggcgggagaagccggcggagggcgggatcgcgcctcctgacatgttgggggtatccctggccgggccgggccggggctaagagcggcgctgcgggccggggtcggggtcgggtcgcggtccgcccccgctgtccctccgtcctgccctgtcgaggacgtgcgttccgcactcggccgcctccagagggagcgagggaagcggctagaggatcggggagaaggagcattcgccggaggctggaggaggctgacccgcgtccccgcccagcctgctcctatgcggtacttgaaggatggcgaagaggtcgcgcagtgaggatgaggatgatgaccttcagtatgccgatcatgattatgaagtaccacaacaaaaaggactgaagaaactctggaacagagtaaaatggacaagggacgaggatgataaattaaagaagttggttgaacaacatggaactgatgattggactctaattgctagtcatcttcaaaatcgctctgattttcagtgccagcatcgatggcagaaagttttaaatcctgaattgataaagggtccttggactaaagaagaagatcagagggttattgaattagttcagaaatatggaaagaagagaaaaatgcgagtgggtcattccccaggcagcgaacttagggatggctcattgaacgatggtggtaatatggcgctaaaacatacaccactgaaaacactaccattttctccttcacagtttttcaacacatgtcctggtaatgaacaacttaatatagaaaatccttcatttacatcaacccctatttgtgggcagaaagctctcattacaactcctcttcataaggaaacaactcccaaagatcaaaaggaaaatgtagggtttagaacacctactattagaagatctatactgggtaccacaccaagaactcctactccttttaagaatgcgcttgctgctcaggagaaaaaatatggacctcttaaaattgtgtcccagccacttgctttcttggaagaagatattcgggaagttttaaaagaagaaactggaacagacctattcctcaaagaggaagatgaacctgcttacaaaagctgcaaacaagagaataccgcttctgggaagaaagtcagaaaatcactagtcttagataattgggaaaaagaagaatcaggcactcaactgttgactgaagacatttcagacatgcagtcagaaaatagatttactacatccttattaatgataccattattggaaatacatgacaataggtgcaacttgattcctgaaaaacaagatataaattcaaccaacaaaacatatacacttactaaaaagaaaccaaaccctaacacttccaaagttgtcaaattggaaaagaatcttcagtcaaattgtgaatgggaaacagtggtttatgggaagacagaagaccaacttattatgactgaacaagcaagaagatatctgagtacttacacagctaccagtagtacttcaagagctctcatactgtaattgttattaaaattgatgaaatgcc

SEQ ID NO: 4479 - DNA, 5188 bp, Homo sapiens
  source 1..5188: mol_type = genomic DNA
ggacaaaaccctgcaggagactgcgagccctgcagaactgctagctgcgggggagagggcaggggtcgggcgcctgtggcggagccgggctggggccagggcagggaggctgacaagcggcgggagaagccggcggagggcgggatcgcgcctcctgacatgttgggggtatccctggccgggccgggccggggctaagagcggcgctgcgggccggggtcggggtcgggtcgcggtccgcccccgctgtccctccgtcctgccctgtcgaggacgtgcgttccgcactcggccgcctccagagggagcgagggaagcggctagaggatcggggagaaggagcattcgccggaggctggaggaggctgacccgcgtccccgcccagcctgctcctatgcggtacttgaaggatggcgaagaggtcgcgcagtgaggatgaggatgatgaccttcagtatgccgatcatgattatgaagtaccacaacaaaaaggactgaagaaactctggaacagagtaaaatggacaagggacgaggatgataaattaaagaagttggttgaacaacatggaactgatgattggactctaattgctagtcatcttcaaaatcgctctgattttcagtgccagcatcgatggcagaaagttttaaatcctgaattgataaagggtccttggactaaagaagaagatcagagggttattgaattagttcagaaatatgggccaaaaagatggtctttaattgcaaaacatttaaaaggaagaataggcaagcagtgtagagaaagatggcataatcatctgaatcctgaggtaaagaaatcttcctggacagaagaggaggacaggatcatctatgaagcacataagcggttgggaaatcgttgggcagaaattgccaaactacttccaggaaggactgataattctatcaaaaatcattggaattctactatgcgaagaaaagtggaacaggagggctatttacaagatggaataaaatcagaacgatcttcatctaaacttcaacacaaaccttgtgcagctatggatcatatgcaaacccagaatcagttttacatacctgttcagatccctgggtatcagtatgtgtcacctgaaggcaattgtatagaacatgttcagcctacttctgcctttattcagcaacccttcattgatgaagatcctgataaggaaaagaaaataaaggaacttgagatgcttcttatgtcagctgagaatgaagttagaagaaagcgaattccatcacagcctggaagtttttctagctggtctggtagtttcctcatggatgataacatgtctaatactctaaatagccttgacgagcacactagtgagttttacagtatggatgaaaatcagcctgtgtctgctcagcagaattcacccacaaagttcctggccgtggaggcaaacgctgtgttatcctctttgcagaccatcccagaatttgcagagactctagaacttattgaatctgatcctgtagcatggagtgacgttaccagttttgatatttctgatgctgctgcttctcctatcaaatccaccccagttaaattaatgagaattcagcacaatgaaggagccatggaatgccaatttaacgtcagtcttgtacttgaagggaaaaaaaacacttgtaatggtggcaacagtgaagctgttcctttaacatccccaaatatagccaagtttagcactccaccagccatcctcagaaagaagagaaaaatgcgagtgggtcattccccaggcagcgaacttagggatggctcattgaacgatggtggtaatatggcgctaaaacatacaccactgaaaacactaccattttctccttcacagtttttcaacacatgtcctggtaatgaacaacttaatatagaaaatccttcatttacatcaacccctatttgtgggcagaaagctctcattacaactcctcttcataaggaaacaactcccaaagatcaaaaggaaaatgtagggtttagaacacctactattagaagatctatactgggtaccacaccaagaactcctactccttttaagaatgcgcttgctgctcaggagaaaaaatatggacctcttaaaattgtgtcccagccacttgctttcttggaagaagatattcgggaagttttaaaagaagaaactggaacagacctattcctcaaagaggaagatgaacctgcttacaaaagctgcaaacaagagaataccgcttctgggaagaaagtcagaaaatcactagtcttagataattgggaaaaagaagaatcaggcactcaactgttgactgaagacatttcagacatgcagtcagaaaatagatttactacatccttattaatgataccattattggaaatacatgacaataggtgcaacttgattcctgaaaaacaagatataaattcaaccaacaaaacatatacacttactaaaaagaaaccaaaccctaacacttccaaagttgtcaaattggaaaagaatcttcagtcaaattgtgaatgggaaacagtggtttatgggaagacagaagaccaacttattatgactgaacaagcaagaagatatctgagtacttacacagctaccagtagtacttcaagagctctcatactgtaattgttattaaaattgatgaaatgccccactcccttactgcagtctctactaaattaggttgcagtgaaatttttctcaattagttgtttttaaagttgtaagatagcccttttaatacagcatcttttttctattctatatagtaggcagaaagctagtaagtcacttaaggggtagatagtttcatagtttattttttaagagatgagatttttaaaaattgtttttaaagaacaagatgggaaaataatagaatgttcatggatttctaaaagtaaattctcatatattttcttcacaagatatatgttgctactctcttgatgctgcagttttgttatagataggtgtatgagtatatatgatttctgaaattagtctatgtatggaaagcacacatgattttatgaagtacttttgcccatgtgctgatttacttaggctaccatttacaaagaaacacattgaaaaggaatttaaaggaaggatagaaagttgcactactaattttttgttttttttttcagaagcagtaaaattaactacagtgttaaatgtatttatttgagcatagtactgaaaacaaaaagcattcaaaaaagagttttttctttattagtaaatagtattttcttaatctcagaggagctgagagttttgttgaatgtattgtacagtatgtaggagcaggagaactttgtaaattggaaagaagtctgtttttataatttatttttatttttaaagcttaaatgtagatatttatacgtatacagggtgcctagaagccaatgttgtttcctgttattacagctaacacagtaaagaataattttgactttaagtatgaaacagtagtaagttatagctgcaaagaatacaatatctatactgtatgtcacatctacctaaatgttgcactatgccctttaaatcatgctggttataaagtagttctaaaaatgtactaaataataatttaatattttctttttaaattatatcgggggtggtcatatacattaatctggtgatttgtatatgtgtttgaaatttttgcattttgtttaaaaaataatatggtaccttggtccctaaaaacagtctgcacttagaagtttatatttactcagtgtttcagaagtggagaacattatcttttatttataaaaatattttgtccttttttaaatgttttgtgtttctctacaggttacaacagttgcttcagttgcctgttttaggtgtttgcacttattttatttcttcttgaaagaatttttatttgcttttgtggtagagattatatgtaattttttttcagtcatataatggtgtgctgtcaacttaaacactgacaggtaaatagaattgtacactgtagtttgaattatttataattgacacactctctccctctccactcctgaagtatgctgctatagaaaatagcagaatcggcttgctgctacgagagaaggaaagagcgaccaccacttgcactgtgtgaaaagataaaaaacaaatgatggcaagttctcaagttaactaaatggaatcaaccattaccaggcaaattcttgcaaataccaaaatactactatgccttataaaacaaaatgaaagcaggttaagattttctgctctgtttgtatgttaatagaaatggaaatactaagtattttaatgcttagctcttgaacagtagacctaaaagggttttaagctatttaaatctacttgctagtttttgcatattttatatatatatatatttatatatatatatagtgagaagtgaagaaaatgtatggtactaagattatgccttattgataaatagataaaccaatttgaatcctcttagcatgtttaagtatgttgattgctttctaattaatgaacttctcacagaaatttcacttagtgaaaccaatgattgtagcaaactcatactggatcatttcagttaccttgaactaatagcacataatggttttttgttgttgttgtttttaatgtagcccttacctggatatacatagtctgcaatcaccaaagtataatatcttgtaaggctatattttttaaagcatattttttcttgagcattaaattatcctaaatggtaatatattgtggataagtctgggcttattggacataatacatatttgggttggtactggttgaatccttcagttaactgctttgttgctttttgcaagattttttatcttaaacatgtcaggcatcttaagtcacctttatactgttttgttcctctgagtttctttcagtatgttatacaaatgccagacataacatgtagcagccatacttgcatggaaactgactacacatacataatactgcattttattgtaaggttttcacattaatacagcaattaccctgactaaattgagttttgtgatatatggaaaacttcattgtaagagaatcttgcatacaatgttgacatattaacatccaaaataaagcatctgtgtacaag

SEQ ID NO: 4480 - DNA, 2148 bp, Homo sapiens
  source 1..2148: mol_type = genomic DNA
cattcgccggaggctggaggaggctgacccgcgtccccgcccagcctgctcctatgcggtacttgaaggatggcgaagaggtcgcgcagtgaggatgaggatgatgaccttcagtatgccgatcatgattatgaagtaccacaacaaaaaggactgaagaaactctggaacagagtaaaatggacaagggacgaggatgataaattaaagaagttggttgaacaacatggaactgatgattggactctaattgctagtcatcttcaaaatcgctctgattttcagtgccagcatcgatggcagaaagttttaaatcctgaattgataaagggtccttggactaaagaagaagatcagagggttattgaattagttcagaaatatgggccaaaaagatggtctttaattgcaaaacatttaaaaggaagaataggcaagcagtgtagagaaagatggcataatcatctgaatcctgaggtaaagaaatcttcctggacagaagaggaggacaggatcatctatgaagcacataagcggttgggaaatcgttgggcagaaattgccaaactacttccaggaaggactgataattctatcaaaaatcattggaattctactatgcgaagaaaagtggaacaggagggctatttacaagatggaataaaatcagaacgatcttcatctaaacttcaacacaaaccttgtgcagctatggatcatatgcaaacccagaatcagttttacatacctgttcagatccctgggtatcagtatgtgtcacctgaaggcaattgtatagaacatgttcagcctacttctgcctttattcagcaacccttcattgatgaagatcctgataaggaaaagaaaataaaggaacttgagatgcttcttatgtcagctgagaatgaagttagaagaaagcgaattccatcacagcctggaagtttttctagctggtctggtagtttcctcatggatgataacatgtctaatactctaaatagccttgacgagcacactagtgagttttacagtatggatgaaaatcagcctgtgtctgctcagcagaattcacccacaaagttcctggccgtggaggcaaacgctgtgttatcctctttgcagaccatcccagaatttgcagagactctagaacttattgaatctgatcctgtagcatggagtgacgttaccagttttgatatttctgatgctgctgcttctcctatcaaatccaccccagttaaattaatgagaattcagcacaatgaaggagccatggaatgccaatttaacgtcagtcttgtacttgaagggaaaaaaaacacttgtaatggtggcaacagtgaagctgttcctttaacatccccaaatatagccaagtttagcactccaccagccatcctcagaaagaagagaaaaatgcgagtgggtcattccccaggcagcgaacttagggatggctcattgaacgatggtggtaatatggcgctaaaacatacaccactgaaaacactaccattttctccttcacagtttttcaacacatgtcctggtaatgaacaacttaatatagaaaatccttcatttacatcaacccctatttgtgggcagaaagctctcattacaactcctcttcataaggaaacaactcccaaagatcaaaaggaaaatgtagggtttagaacacctactattagaagatctatactgggtaccacaccaagaactcctactccttttaagaatgcgcttgctgctcaggagaaaaaatatggacctcttaaaattgtgtcccagccacttgctttcttggaagaagatattcgggaagttttaaaagaagaaactggaacagacctattcctcaaagaggaagatgaacctgcttacaaaagctgcaaacaagagaataccgcttctgggaagaaagtcagaaaatcactagtcttagataattgggaaaaagaagaatcaggcactcaactgttgactgaagacatttcagacatgcagtcaaattgtgaatgggaaacagtggtttatgggaagacagaagaccaacttattatgactgaacaagcaagaagatatctgagtacttacacagctaccagtagtacttcaagagctctcatactgtaa

SEQ ID NO: 4481 - DNA, 1944 bp, Homo sapiens
  source 1..1944: mol_type = genomic DNA
gtgagtgcgggccgcgctctcggcggcgcgcatgtgcgtgtgtgctggctgccgggctgccccgagccggcggggagccggtccgctccaggtggcgggcggctggagcgagggagcggacatggactacgactcgtaccagcactatttctacgactatgactgcggggaggatttctaccgctccacggcgcccagcgaggacatctggaagaaattcgagctggtgccatcgccccccacgtcgccgccctggggcttgggtcccggcgcaggggacccggcccccgggattggtcccccggagccgtggcccggagggtgcaccggagacgaagcggaatcccggggccactcgaaaggctggggcaggaactacgcctccatcatacgccgtgactgcatgtggagcggcttctcggcccgggaacggctggagagagctgtgagcgaccggctcgctcctggcgcgccccgggggaacccgcccaaggcgtccgccgccccggactgcactcccagcctcgaagccggcaacccggcgcccgccgccccctgtccgctgggcgaacccaagacccaggcctgctccgggtccgagagcccaagcgactcgggtaaggacctccccgagccatccaagagggggccaccccatgggtggccaaagctctgcccctgcctgaggtcaggcattggctcttctcaagctcttgggccatctccgcctctctttggctgaagctgcccgtgtagtccccaaccgtgtctgtctggcacgtgggtgtgttggtaaacagtttggaaaagtggcgtgggagccagcctccctttgatgattattggagccccaggggacaagggatttgaggtgagggttggcgcttagagaggacaatactggggttggactgtaagggattgaagggggtaccttaagagacactccaaacctgaagtttttttgctgctgcctctttccctaggaaactcacactcccctagggggagaagaagccgagagccttttgtgcaaagccaaaaccttcgtccttttaaaaacctaggtctccagttggctttactttaaaatgccaataataaatgccctcttctcgtgcctccccaccaccacttaccactcgtgcatccctgagacagggagggaagaatgaacactccccattaacagatggaaaaactgaggcttagagatagacaatcactacaagtcagctccagctttctgccatctagccagcccctcttccccaatgctccatcccaaccaggcacctcttccttgatgtttggggtctttgtggtagcttatcttagaagcactacaccttgccttgctgtttgtcctgagatggaaaagtgtccttcttgctccccctcaatagatctccagcgtcagctgctccctggcattcaacaaatattcactggcccctactttgtggcaatctgtgggctacatgctggggtcaaggcagtagaactccaggccctcctctcccatccttgatgcaagtgcaacctcgctgagggcagactggggcatcctgtgccactaaactacattgttcttattctggcatcttagacctccacacccgtgagaaatcctggagagggtatttttgtagagtgtagactgtggctagtgacaaataaattaggaccaagaaagctcactgtagcttttaggaataacttttacacgaccatttgatagggaactggggaatggggtatggaagttttcctacacttgagagaaaaaataggataacaaaaattaaaagtcttttttttcctggtccactgtgttaaggtcatttttaaccagcttgctttctacaccaagagtttatgtttgtttaatggctggaaagagaatcttgagatcaaaaaaccaataaagatgtatctctacaa

SEQ ID NO: 4482 - DNA, 1688 bp, Homo sapiens
  source 1..1688: mol_type = genomic DNA
gtgtgtgctggctgccgggctgccccgagccggcggggagccggtccgctccaggtggcgggcggctggagcgaggtgaggctgcgggtggccagggcacgggcgcgggtcccgcggtgcgggctggctgcaggctgccttctgggcacggcgcgcccccgcccggccccgccgggccctgggagctgcgctccgggcggcgctggcaaagtttgctttgaactcgctgcccacagtcgggtccgcgcgctgcgattggcttcccctaccactctgacccggggcccggcttcccgggacgcgaggactgggcgcaggctgcaagctggtggggttggggaggaacgagagcccggcagccgactgtgccgagggacccggggacacctccttcgcccggccggcacccggtcagcacgtccccccttccctcccgcagggagcggacatggactacgactcgtaccagcactatttctacgactatgactgcggggaggatttctaccgctccacggcgcccagcgaggacatctggaagaaattcgagctggtgccatcgccccccacgtcgccgccctggggcttgggtcccggcgcaggggacccggcccccgggattggtcccccggagccgtggcccggagggtgcaccggagacgaagcggaatcccggggccactcgaaaggctggggcaggaactacgcctccatcatacgccgtgactgcatgtggagcggcttctcggcccgggaacggctggagagagctgtgagcgaccggctcgctcctggcgcgccccgggggaacccgcccaaggcgtccgccgccccggactgcactcccagcctcgaagccggcaacccggcgcccgccgccccctgtccgctgggcgaacccaagacccaggcctgctccgggtccgagagcccaagcgactcggagaatgaagaaattgatgttgtgacagtagagaagaggcagtctctgggtattcggaagccggtcaccatcacggtgcgagcagaccccctggatccctgcatgaagcatttccacatctccatccatcagcaacagcacaactatgctgcccgttttcctccagaaagctgctcccaagaagaggcttcagagaggggtccccaagaagaggttctggagagagatgctgcaggggaaaaggaagatgaggaggatgaagagattgtgagtcccccacctgtagaaagtgaggctgcccagtcctgccaccccaaacctgtcagttctgatactgaggatgtgaccaagaggaagaatcacaacttcctggagcgcaagaggcggaatgacctgcgttcgcgattcttggcgctgagggaccaggtgcccaccctggccagctgctccaaggcccccaaagtagtgatcctaagcaaggccttggaatacttgcaagccctggtgggggctgagaagaggatggctacagagaaaagacagctccgatgccggcagcagcagttgcagaaaagaattgcatacctcactggctactaactgaccaaaaagcctgacagttctgtcttacgaagacacaagtttattttttaacctccctctcccctttagtaatttgcacattttggttatggtgggacagtctggacagtagatcccagaatgcattgcagccggtgcacac

SEQ ID NO: 4483 - DNA, 3256 bp, Homo sapiens
  source 1..3256: mol_type = genomic DNA
tgcgcctgcagctcgcgctcccgcgccgatcccgagagcgtccgggccgccgtgcgcgagcgagggagggcgcgcgcgcggggggggcgcgcttgtgagtgcgggccgcgctctcggcggcgcgcatgtgcgtgtgtgctggctgccgggctgccccgagccggcggggagccggtccgctccaggtggcgggcggctggagcgagggagcggacatggactacgactcgtaccagcactatttctacgactatgactgcggggaggatttctaccgctccacggcgcccagcgaggacatctggaagaaattcgagctggtgccatcgccccccacgtcgccgccctggggcttgggtcccggcgcaggggacccggcccccgggattggtcccccggagccgtggcccggagggtgcaccggagacgaagcggaatcccggggccactcgaaaggctggggcaggaactacgcctccatcatacgccgtgactgcatgtggagcggcttctcggcccgggaacggctggagagagctgtgagcgaccggctcgctcctggcgcgccccgggggaacccgcccaaggcgtccgccgccccggactgcactcccagcctcgaagccggcaacccggcgcccgccgccccctgtccgctgggcgaacccaagacccaggcctgctccgggtccgagagcccaagcgactcggagaatgaagaaattgatgttgtgacagtagagaagaggcagtctctgggtattcggaagccggtcaccatcacggtgcgagcagaccccctggatccctgcatgaagcatttccacatctccatccatcagcaacagcacaactatgctgcccgttttcctccagaaagctgctcccaagaagaggcttcagagaggggtccccaagaagaggttctggagagagatgctgcaggggaaaaggaagatgaggaggatgaagagattgtgagtcccccacctgtagaaagtgaggctgcccagtcctgccaccccaaacctgtcagttctgatactgaggatgtgaccaagaggaagaatcacaacttcctggagcgcaagaggcggaatgacctgcgttcgcgattcttggcgctgagggaccaggtgcccaccctggccagctgctccaaggcccccaaagtagtgatcctaagcaaggccttggaatacttgcaagccctggtgggggctgagaagaggatggctacagagaaaagacagctccgatgccggcagcagcagttgcagaaaagaattgcatacctcactggctactaactgaccaaaaagcctgacagttctgtcttacgaagacacaagtttattttttaacctccctctcccctttagtaatttgcacattttggttatggtgggacagtctggacagtagatcccagaatgcattgcagccggtgcacacacaataaaggcttgcattcttggaaaccttgaaacccagctctccctcttccctgactcatgggagtgctgtatgttctctggcgcctttggcttcccagcaggcagctgactgaggagccttggggtctgcctagctcactagctctgaagaaaaggctgacagatgctatgcaacaggtggtggatgttgtcaggggctccagcctgcatgaaatctcacactctgcatgagctttaggctaggaaaggatgctcccaactggtgtctctggggtgatgcaaggacagctgggcctggatgctctccctgaggctcctttttccagaagacacacgagctgtcttgggtgaagacaagcttgcagacttgatcaacattgaccattacctcactgtcagacactttacagtagccaaggagttggaaacctttatatattatgatgttagctgacccccttcctcccactcccaatgctgcgaccctgggaacacttaaaaagcttggcctctagattctttgtctcagagccctctgggctctctcctctgagggagggacctttctttcctcacaagggacttttttgttccattatgccttgttatgcaatgggctctacagcaccctttcccacaggtcagaaatatttccccaagacacagggaaatcggtcctagcctggggcctggggatagcttggagtcctggcccatgaacttgatccctgcccaggtgttttccgaggggcacttgaggcccagtcttttctcaaggcaggtgtaagacacctcagagggagaactgtactgctgcctctttcccacctgcctcatctcaatccttgagcggcaagtttgaagttcttctggaaccatgcaaatctgtcctcctcatgcaattccaaggagcttgctggctctgcagccacccttgggccccttccagcctgccatgaatcagatatctttcccagaatctgggcgtttctgaagttttggggagagctgttgggactcatccagtgctccagaaggtggacttgcttctggtgggttttaaaggagcctccaggagatatgcttagccaaccatgatggattttaccccagctggactcggcagctccaagtggaatccacgtgcagcttctagtctgggaaagtcacccaacctagcagttgtcatgtgggtaacctcaggcacctctaagcctgtcctggaagaaggaccagcagcccctccagaactctgcccaggacagcaggtgcctgctggctctgggtttggaagttggggtgggtagggggtggtaagtactatatatggctctggaaaaccagctgctacttccaaatctattgtccataatggtttctttctgaggttgcttcttggcctcagaggaccccaggggatgtttggaaatagcctctctacccttctggagcatggtttacaaaagccagctgacttctggaattgtctatggaggacagtttgggtgtaggttactgatgtctcaactgaatagcttgtgttttataagctgctgttggctattatgctgggggagtcttttttttttatattgtatttttgtatgccttttgcaaagtggtgttaactgtttttgtacaaggaaaaaaactcttggggcaatttcctgttgcaagggtctgatttattttgaaaggcaagttcacctgaaattttgtatttagttgtgattactgattgcctgattttaaaatgttgccttctgggacatcttctaataaaagatttctcaaacatg

SEQ ID NO: 4484 - DNA, 2038 bp, Homo sapiens
  source 1..2038: mol_type = genomic DNA
aatgcgcctgcagctcgcgctcccgcgccgatcccgagagcgtccgggccgccgtgcgcgagcgagggagggcgcgcgcgcggggggggcgcgcttgtgagtgcgggccgcgctctcggcggcgcgcatgtgcgtgtgtgctggctgccgggctgccccgagccggcggggagccggtccgctccaggtggcgggcggctggagcgagggagcggacatggactacgactcgtaccagcactatttctacgactatgactgcggggaggatttctaccgctccacggcgcccagcgaggacatctggaagaaattcgagctggtgccatcgccccccacgtcgccgccctggggcttgggtcccggcgcaggggacccggcccccgggattggtcccccggagccgtggcccggagggtgcaccggagacgaagcggaatcccggggccactcgaaaggctggggcaggaactacgcctccatcatacgccgtgactgcatgtggagcggcttctcggcccgggaacggctggagagagctgtgagcgaccggctcgctcctggcgcgccccgggggaacccgcccaaggcgtccgccgccccggactgcactcccagcctcgaagccggcaacccggcgcccgccgccccctgtccgctgggcgaacccaagacccaggcctgctccgggtccgagagcccaagcgactcgggtaaggacctccccgagccatccaagagggggccaccccatgggtggccaaagctctgcccctgcctgaggtcaggcattggctcttctcaagctcttgggccatctccgcctctctttggctgaagctgcccgtgtagtccccaaccgtgtctgtctggcacgtgggtgtgttggtaaacagtttggaaaagtggcgtgggagccagcctccctttgatgattattggagccccaggggacaagggatttgaggtgagggttggcgcttagagaggacaatactggggttggactgtaagggattgaagggggtaccttaagagacactccaaacctgaagtttttttgctgctgcctctttccctaggaaactcacactcccctagggggagaagaagccgagagccttttgtgcaaagccaaaaccttcgtccttttaaaaacctaggtctccagttggctttactttaaaatgccaataataaatgccctcttctcgtgcctccccaccaccacttaccactcgtgcatccctgagacagggagggaagaatgaacactccccattaacagatggaaaaactgaggcttagagatagacaatcactacaagtcagctccagctttctgccatctagccagcccctcttccccaatgctccatcccaaccaggcacctcttccttgatgtttggggtctttgtggtagcttatcttagaagcactacaccttgccttgctgtttgtcctgagatggaaaagtgtccttcttgctccccctcaatagatctccagcgtcagctgctccctggcattcaacaaatattcactggcccctactttgtggcaatctgtgggctacatgctggggtcaaggcagtagaactccaggccctcctctcccatccttgatgcaagtgcaacctcgctgagggcagactggggcatcctgtgccactaaactacattgttcttattctggcatcttagacctccacacccgtgagaaatcctggagagggtatttttgtagagtgtagactgtggctagtgacaaataaattaggaccaagaaagctcactgtagcttttaggaataacttttacacgaccatttgatagggaactggggaatggggtatggaagttttcctacacttgagagaaaaaataggataacaaaaattaaaagtcttttttttcctggtccactgtgttaaggtcatttttaaccagcttgctttctacaccaagagtttatgtttgtttaatggctggaaagagaatcttgagatcaaaaaaccaataaagatgtatctctac

SEQ ID NO: 4485 - DNA, 426 bp, Homo sapiens
  source 1..426: mol_type = genomic DNA
gcaccgccaagcggccgccgggccgcatcagccctcctcctgtttgcgctccccagcgtgcaatttatttggggggctaccggggattgaacggagcgggcgagcgctgccaggagggagcggacatggactacgactcgtaccagcactatttctacgactatgactgcggggaggatttctaccgctccacggcgcccagcgaggacatctggaagaaattcgagctggtgccatcgccccccacgtcgccgccctggggcttgggtcccggcgcaggggacccggcccccgggattggtcccccggagccgtggcccggagggtgcaccggagacgaagcggaatcccggggccactcgaaaggctggggcaggaactacgcctccatcatacgccgtgactgcatgtggagcggcttctcgg

SEQ ID NO: 4486 - DNA, 3737 bp, Homo sapiens
  source 1..3737: mol_type = genomic DNA
tgagtgtttatgtttgtagttttaattgctctgaagtaaatatctgattttccaatttccaccagagtgctctgcacatagtaggtctaattatttttccctctttactaatcacccatgccttgtaagaattcagttagttgactttttgtactttataagcgtgatgattgggtgttcccgtgtgagatgcgccaccctcgaaccttgttacgacgtcggcacattgcgcgtctgacatgaagaaaaaaaaaattcagttagtccaccaggcacagtggctaaggcctgtaatccctgcactttgagaggccaaggcaggaggatcacttgaacccaggagttcgagaccagcctaggcaacatagcgagactccgtttcaaacaacaaataaaaataattagtcgggcatggtggtgcgcgcctacagtaccaactactcgggaggctgaggcgagacgatcgcttgagccagggaggtcaaggctgcagtgagccaagctcgcgccactgcactccagcccgggcgacagagtgagaccctgtctcaaaaaaaaaaaaaacaccaaaccttagaggggcgaaaaaaaattttatagtggaaatacagtaacgagttggcctagcctcgcctccgttacaacggcctacggtgctggaggatccttctgcgcacgcgcacagcctccggccggctatttccgcgagcgcgttccatcctctaccgagcgcgcgcgaagactacggaggtcgactcgggagcgcgcacgcagctccgccccgcgtccgacccgcggatcccgcggcgtccggcccgggtggtctggatcgcggagggaatgccccggagggcggagaactgggacgaggccgaggtaggcgcggaggaggcaggcgtcgaagagtacggccctgaagaagacggcggggaggagtcgggcgccgaggagtccggcccggaagagtccggcccggaggaactgggcgccgaggaggagatggaggccgggcggccgcggcccgtgctgcgctcggtgaactcgcgcgagccctcccaggtcatcttctgcaatcgcagtccgcgcgtcgtgctgcccgtatggctcaacttcgacggcgagccgcagccctacccaacgctgccgcctggcacgggccgccgcatccacagctaccgaggtcacctttggctcttcagagatgcagggacacacgatgggcttctggttaaccaaactgaattatttgtgccatctctcaatgttgacggacagcctatttttgccaatatcacactgccagtgtatactctgaaagagcgatgcctccaggttgtccggagcctagtcaagcctgagaattacaggagactggacatcgtcaggtcgctctacgaagatctggaagaccacccaaatgtgcagaaagacctggagcggctgacacaggagcgcattgcacatcaacggatgggagattgaagatttctgttgaaacttacactgtttcatctcagcttttgatggtactgatgagtcttgatctagatacaggactggttccttccttagtttcaaagtgtctcattctcagagtaaaataggcaccattgcttaaaagaaagttaactgacttcactaggcattgtgatgtttaggggcaaacatcacaaaatgtaatttaatgcctgcccattagagaagtatttatcaggagaaggtggtggcatttttgcttcctagtaagtcaggacagcttgtatgtaaggaggtttgtataagtaattcagtgggaattgcagcatatcgtttaattttaagaaggcattggcatctgcttttaatggatgtataatacatccattctacatccgtagcggttggtgacttgtctgcctcctgctttgggaagactgaggcatccgtgaggcagggacaagtctttctcctctttgagaccccagtgcctgcacatcatgagccttcagtcagggtttgtcagaggaacaaaccaggggacactttgttagaaagtgcttagaggttctgcctctatttttgttggggggtgggagaggggaccttaaaatgtgtacagtgaacaaatgtcttaaagggaatcatttttgtaggaagcattttttataattttctaagtcgtgcactttctcggtccactcttgttgaagtgctgttttattactgtttctaaactaggattgacattctacagttgtgataatagcatttttgtaacttgccatccgcacagaaaatacgagaaaatctgcatgtttgattatagtattaatggacaaataagtttttgctaaatgtgagtatttctgttcctttttgtaaatatgtgacattcctgattgatttgggtttttttgttgttgttgttttgttttgttttgtttttttgagatggagtctcactcttgtcacccaggctggagtgcagtggcgccatctcggctcactgcaacctctgcctcctgggttcacgtaatcctcctgagtagctgggattacaggcgcctgccaccacgctggccaatttttgtacttttagtagagacagtgtttcgtcatgttggccaggctggtttcaaactcctgacctcaggtgatccgcccacctcagcctcccaaaatggtgggattacaggtgtgtgggccaccgtgcctggctgattcagcattttttatcaggcaggaccaggtggcacttccacctccagcctctggtcctaccaatggattcatggagtagcctggactgtttcatagttttctaaatgtacaaattcttataggctagacttagattcattaactcaaattcaatgcttctatcagactcagttttttgtaactaatagatttttttttccacttttgttctactccttccctaatagctttttaaaaaaatctccccagtagagaaacatttggaaaagacagaaaactaaaaaggaagaaaaaagatccctattagatacacttcttaaatacaatcacattaacattttgagctatttccttccagcctttttagggcagattttggttggtttttacatagttgagattgtactgttcatacagttttataccctttttcatttaactttataacttaaatattgctctatgttagtataagcttttcacaaacattagtatagtctcccttttataattaatgtttgtgggtatttcttggcatgcatctttaattccttatcctagcctttgggcacaattcctgtgctcaaaaatgagagtgacggctggcatggtggctcccgcctgtaatcccagtactttggaaagccaaggtaagaggattgcttgagcccagaacttcaagatgagcctgggctcatagtgagaacccatctatacaaaaaatttttaaaaattagcatggcggcacacatctgtaatcctagctacttggcaggctgaggtgagaagatcattggagtttaggaattggaggctgcagtgagccatgagtatgccactgcactccagcctgggggacagagcaagaccctgcctcaaaaaaaaaaaaaaaaaaaaaatcaggccgggcatggtggctcacgcctgtaatcccagcactttgggaggtcgaggtgggcagatcacctgaggtcaggagttcgagaccagcctggccaacatggtaaaaccccatttctactaaaaaatacaagaat

SEQ ID NO: 4487 - DNA, 2696 bp, Homo sapiens
  source 1..2696: mol_type = genomic DNA
cccgcgtccgacccgcggatcccgcggcgtccggcccgggtggtctggatcgcggagggaatgccccggagggcggagaactgggacgaggccgaggtaggcgcggaggaggcaggcgtcgaagagtacggccctgaagaagacggcggggaggagtcgggcgccgaggagtccggcccggaagagtccggcccggaggaactgggcgccgaggaggagatggaggccgggcggccgcggcccgtgctgcgctcggtgaactcgcgcgagccctcccaggtcatcttctgcaatcgcagtccgcgcgtcgtgctgcccgtatggctcaacttcgacggcgagccgcagccctacccaacgctgccgcctggcacgggccgccgcatccacagctaccgagtgtatactctgaaagagcgatgcctccaggttgtccggagcctagtcaagcctgagaattacaggagactggacatcgtcaggtcgctctacgaagatctggaagaccacccaaatgtgcagaaagacctggagcggctgacacaggagcgcattgcacatcaacggatgggagattgaagatttctgttgaaacttacactgtttcatctcagcttttgatggtactgatgagtcttgatctagatacaggactggttccttccttagtttcaaagtgtctcattctcagagtaaaataggcaccattgcttaaaagaaagttaactgacttcactaggcattgtgatgtttaggggcaaacatcacaaaatgtaatttaatgcctgcccattagagaagtatttatcaggagaaggtggtggcatttttgcttcctagtaagtcaggacagcttgtatgtaaggaggtttgtataagtaattcagtgggaattgcagcatatcgtttaattttaagaaggcattggcatctgcttttaatggatgtataatacatccattctacatccgtagcggttggtgacttgtctgcctcctgctttgggaagactgaggcatccgtgaggcagggacaagtctttctcctctttgagaccccagtgcctgcacatcatgagccttcagtcagggtttgtcagaggaacaaaccaggggacactttgttagaaagtgcttagaggttctgcctctatttttgttggggggtgggagaggggaccttaaaatgtgtacagtgaacaaatgtcttaaagggaatcatttttgtaggaagcattttttataattttctaagtcgtgcactttctcggtccactcttgttgaagtgctgttttattactgtttctaaactaggattgacattctacagttgtgataatagcatttttgtaacttgccatccgcacagaaaatacgagaaaatctgcatgtttgattatagtattaatggacaaataagtttttgctaaatgtgagtatttctgttcctttttgtaaatatgtgacattcctgattgatttgggtttttttgttgttgttgttttgttttgttttgtttttttgagatggagtctcactcttgtcacccaggctggagtgcagtggcgccatctcggctcactgcaacctctgcctcctgggttcacgtaatcctcctgagtagctgggattacaggcgcctgccaccacgctggccaatttttgtacttttagtagagacagtgtttcgtcatgttggccaggctggtttcaaactcctgacctcaggtgatccgcccacctcagcctcccaaaatggtgggattacaggtgtgtgggccaccgtgcctggctgattcagcattttttatcaggcaggaccaggtggcacttccacctccagcctctggtcctaccaatggattcatggagtagcctggactgtttcatagttttctaaatgtacaaattcttataggctagacttagattcattaactcaaattcaatgcttctatcagactcagttttttgtaactaatagatttttttttccacttttgttctactccttccctaatagctttttaaaaaaatctccccagtagagaaacatttggaaaagacagaaaactaaaaaggaagaaaaaagatccctattagatacacttcttaaatacaatcacattaacattttgagctatttccttccagcctttttagggcagattttggttggtttttacatagttgagattgtactgttcatacagttttataccctttttcatttaactttataacttaaatattgctctatgttagtataagcttttcacaaacattagtatagtctcccttttataattaatgtttgtgggtatttcttggcatgcatctttaattccttatcctagcctttgggcacaattcctgtgctcaaaaatgagagtgacggctggcatggtggctcccgcctgtaatcccagtactttggaaagccaaggtaagaggattgcttgagcccagaacttcaagatgagcctgggctcatagtgagaacccatctatacaaaaaatttttaaaaattagcatggcggcacacatctgtaatcctagctacttggcaggctgaggtgagaagatcattggagtttaggaattggaggctgcagtgagccatgagtatgccactgcactccagcctgggggacagagcaagaccctgcctcaaaaaaaaaaaaaaaaaaaaaa

SEQ ID NO: 4488 - DNA, 1143 bp, Homo sapiens
  source 1..1143: mol_type = genomic DNA
ggatcccgcggcgtccggcccgggtggtctggatcgcggagggaatgccccggagggcggagaactgggacgaggccgaggtaggcgcggaggaggcaggcgtcgaagagtacggccctgaagaagacagctaccgaggtcacctttggctcttcagagatgcagggacacacgatgggcttctggttaaccaaactgaattatttgtgccatctctcaatgttgacggacagcctatttttgccaatatcacactgccagtgtatactctgaaagagcgatgcctccaggttgtccggagcctagtcaagcctgagaattacaggagactggacatcgtcaggtcgctctacgaagatctggaagaccacccaaatgtgcagaaagacctggagcggctgacacaggagcgcattgcacatcaacggatgggagattgaagatttctgttgaaacttacactgtttcatctcagcttttgatggtactgatgagtcttgatctagatacaggactggttccttccttagtttcaaagtgtctcattctcagagtaaaataggcaccattgcttaaaagaaagttaactgacttcactaggcattgtgatgtttaggggcaaacatcacaaaatgtaatttaatgcctgcccattagagaagtatttatcaggagaaggtggtggcatttttgcttcctagtaagtcaggacagcttgtatgtaaggaggtttgtataagtaattcagtgggaattgcagcatatcgtttaattttaagaaggcattggcatctgcttttaatggatgtataatacatccattctacatccgtagcggttggtgacttgtctgcctcctgctttgggaagactgaggcatccgtgaggcagggacaagtctttctcctctttgagaccccagtgcctgcacatcatgagccttcagtcagggtttgtcagaggaacaaaccaggggacactttgttagaaagtgcttagaggttctgcctctatttttgttggggggtgggagaggggaccttaaaatgtgtacagtgaacaaatgtcttaaagggaatcatttttgtaggaagcattttttataattttctaagtcgtgcactttctcggtccactcttgtt

SEQ ID NO: 4489 - DNA, 2819 bp, Homo sapiens
  source 1..2819: mol_type = genomic DNA
cggttctttccggaaattatgactgcagctgttttcactccgctgtgactcagagcgctccgggctgcaggagaggaagcccagcctgttctaccagagaacttgcccaggtcagaggtctgcgtagaagcccttttctgagcatcctctcctctcctcacacctgccactgtcctctgcgttgctgtcgaattaaatcttgcatcaccatggtgcacttctgtggcctactcaccctccaccgggagccagtgccgctgaagagtatctctgtgagcgtgaacatttacgagtttgtggctggtgtgtctgcaactttgaactacgagaatgaggagaaagttcctttggaggccttctttgtgttccccatggatgaagactctgctgtttacagctttgaggccttggtggatgggaagaaaattgtagcagaattacaagacaagatgaaggcccgcaccaactatgagaaagccatctcccagggccaccaggccttcttattggagggggacagcagctccagggatgtcttctcttgcaatgtgggtaacctccaacctgggtcgaaggcggcagtcaccctgaagtatgtgcaggagctgcctctggaagcagatggggctctgcgctttgtgctcccagctgtcctgaatcctagataccagttctctgggtcgtctaaggacagttgccttaatgtgaagactcctatagtccctgtggaggacctgccctacacactcagcatggtcgccaccatagattcccagcatggcattgagaaggtccaatccaactgccccttgagtcctaccgagtacctaggagaggacaagacttctgctcaggtttccctggctgctggacacaagtttgatcgggacgtggaactcctgatttactacaatgaggtgcatacccccagcgtggttttggagatggggatgcctaacatgaagccaggtcatttgatgggagatccatctgcaatggtgagtttctatccaaatatcccagaagatcaaccatcaaatacctgtggagagtttatctttctcatggaccgctcgggaagtatgcagagccccatgagtagccaggatacatctcagctgcgaatacaggcagccaaggaaacactgattttgctgctgaagagtttacctataggctgttatttcaacatctatggatttggctcttcctatgaggcatgctttccggagagtgtgaagtacactcagcaaacaatggaggaggctctggggagagtgaagcttatgcaggccgacctagggggcactgaaatcttggcaccactccagaacatttacaggggaccctccatcccaggccaccccctacaggttttcgaaaggccttacactctgaccgtcctccttctgcatctcagcccagaggggaacttatgtgttataaggccaagacattccagatggacgattacagtctctgtgggttgataagtcacaaggaccagcacagtccaggctttggagagaatcaccttgtgcagctgatttaccaccaaaatgcaaatggttcctgggatctgaatgaagatctagccaagatcctaggtatgagtttggaagaaataatggctgcacagcctgccgagcttgtggattcctcaggctgggccaccatcctggccgtgatctggctgcacagcaatggtaaggacttgaagtgtgaatgggagcttctggaaaggaaggccgtggcctggatgcgtgcccatgcaggctccaccatgccttcggttgtgaaagctgctattactttcctgaagtcatctgtggatcctgctatctttgccttttgaagataccatccagaaaaagaagtgcctttaatttgctactgtcatttcctctagtatcacttttgctgtgatgatgtgttcttgtgtattataactctttattttttgccataaaagtaaaggatgcttactccacttcgcttctctgctccaggttcactttggatatgatctttcttttcccaacatatgccctcagaaaagtgacagtggtcccagaacctattccctttcttgagggagttcaaaacattcataggcagtaatgttcctcccagggtttccagggaaacaacatgaaaaacaggtgacatgaactacagactaaagattgcagcatttatgttagagaatgcttgaattagagaattttctgcattatctttgtctgttcactttctatcttatatacttatcagggccatactggtaagcttgcgtaggaggagttagagggaagttgaaagccaacatctggatcaatgtaatgtcaagatcacaaagacagagactgcaggggtccactgtgagaggtgacactgttggggaccttcctgattcattcttcttgggctttgctagcctgtacaacctacatgtcttttcttccactgcctgaaagacttgggttgaactataactgttggagagagatgttcctctttaatcatgaaacaccttaagaagtctataatgcaatccttagtcctaccctgaacctatgtgtcctctaagtcaggccctgatctagtgcagtaaagggaagggtgggcttaatgggagctttgcctgggacctgaacctggagcacttaccgcattaggaagaaaggagctccccgtaatcgttcctgacccttgtgtctcatataccctatcctggtggaaatgaccctatttgatatgctgtcccttaaaataacttgtatcaatattaaaatgactatttctaccctttgatgagt

SEQ ID NO: 4490 - DNA, 3419 bp, Homo sapiens
  source 1..3419: mol_type = genomic DNA
cggttctttccggaaattatgactgcagctgttttcactccgctgtgactcagagcgctccgggctgcaggagaggaagaaatcttgcatcaccatggtgcacttctgtggcctactcaccctccaccgggagccagtgccgctgaagagtatctctgtgagcgtgaacatttacgagtttgtggctggtgtgtctgcaactttgaactacgagaatgaggagaaagttcctttggaggccttctttgtgttccccatggatgaagactctgctgtttacagctttgaggccttggtggatgggaagaaaattgtagcagaattacaagacaagatgaaggcccgcaccaactatgagaaagccatctcccagggccaccaggccttcttattggagggggacagcagctccagggatgtcttctcttgcaatgtgggtaacctccaacctgggtcgaaggcggcagtcaccctgaagtatgtgcaggagctgcctctggaagcagatggggctctgcgctttgtgctcccagctgtcctgaatcctagataccagttctctgggtcgtctaaggacagttgccttaatgtgaagactcctatagtccctgtggaggacctgccctacacactcagcatggtcgccaccatagattcccagcatggcattgagaaggtccaatccaactgccccttgagtcctaccgagtacctaggagaggacaagacttctgctcaggtttccctggctgctggacacaagtttgatcgggacgtggaactcctgatttactacaatgaggtgcatacccccagcgtggttttggagatggggatgcctaacatgaagccaggtcatttgatgggagatccatctgcaatggtgagtttctatccaaatatcccagaagatcaaccatcaaatacctgtggagagtttatctttctcatggaccgctcgggaagtatgcagagccccatgagtagccaggatacatctcagctgcgaatacaggcagccaaggaaacactgattttgctgctgaagagtttacctataggctgttatttcaacatctatggatttggctcttcctatgaggcatgctttccggagagtgtgaagtacactcagcaaacaatggaggaggctctggggagagtgaagcttatgcaggccgacctagggggcactgaaatcttggcaccactccagaacatttacaggggaccctccatcccaggccaccccctacagctttttgtctttacagatggagaagttacagacacgtttagtgtaattaaagaagttaggatcaacagacagaaacacaggtgtttctcatttggtattggagaaggcacctccaccagcctaataaaaggtattgcccgggcatcagggggcacctcagaatttatcacaggcaaagacaggatgcagtccaaggctctcaggactctgaaacgctctctgcagcctgtggtagaggatgtctctctgagctggcatttgcctcctggtctgtctgctaaaatgctttccccagaacagactgtcatctttaggggtcagagattaatcagctatgcccagctgaccgggaggatgccagcagcagagacaacaggagaagtatgcctcaaatatacactccagggcaagacttttgaggataaggtgacatttcctctacaacccaagcctgatgtcaacctcaccattcaccgccttgctgccaagtccttgctccagaccaaggacatgggcctcagggagactccagcaagtgataaaaaagatgcattgaaccttagccttgagtctggtgtcataagctccttcacagctttcattgctatcaataaggagctcaacaagccggttcaggggcctctggctcatagggacgtcccaaggccaattctgttgggtgcttctgccccattgaagataaaatgccaatcaggttttcgaaaggccttacactctgaccgtcctccttctgcatctcagcccagaggggaacttatgtgttataaggccaagacattccagatggacgattacagtctctgtgggttgataagtcacaaggaccagcacagtccaggctttggagagaatcaccttgtgcagctgatttaccaccaaaatgcaaatggttcctgggatctgaatgaagatctagccaagatcctaggtatgagtttggaagaaataatggctgcacagcctgccgagcttgtggattcctcaggctgggccaccatcctggccgtgatctggctgcacagcaatggtaaggacttgaagtgtgaatgggagcttctggaaaggaaggccgtggcctggatgcgtgcccatgcaggctccaccatgccttcggttgtgaaagctgctattactttcctgaagtcatctgtggatcctgctatctttgccttttgaagataccatccagaaaaagaagtgcctttaatttgctactgtcatttcctctagtatcacttttgctgtgatgatgtgttcttgtgtattataactctttattttttgccataaaagtaaaggatgcttactccacttcgcttctctgctccaggttcactttggatatgatctttcttttcccaacatatgccctcagaaaagtgacagtggtcccagaacctattccctttcttgagggagttcaaaacattcataggcagtaatgttcctcccagggtttccagggaaacaacatgaaaaacaggtgacatgaactacagactaaagattgcagcatttatgttagagaatgcttgaattagagaattttctgcattatctttgtctgttcactttctatcttatatacttatcagggccatactggtaagcttgcgtaggaggagttagagggaagttgaaagccaacatctggatcaatgtaatgtcaagatcacaaagacagagactgcaggggtccactgtgagaggtgacactgttggggaccttcctgattcattcttcttgggctttgctagcctgtacaacctacatgtcttttcttccactgcctgaaagacttgggttgaactataactgttggagagagatgttcctctttaatcatgaaacaccttaagaagtctataatgcaatccttagtcctaccctgaacctatgtgtcctctaagtcaggccctgatctagtgcagtaaagggaagggtgggcttaatgggagctttgcctgggacctgaacctggagcacttaccgcattaggaagaaaggagctccccgtaatcgttcctgacccttgtgtctcatataccctatcctggtggaaatgaccctatttgatatgctgtcccttaaaataacttgtatcaatattaaaatgactatttctaccctttgatgagt

SEQ ID NO: 4491 - DNA, 1978 bp, Homo sapiens
  source 1..1978: mol_type = genomic DNA
cggttctttccggaaattatgactgcagctgttttcactccgctgtgactcagagcgctccgggctgcaggagaggaagcccagcctgttctaccagagaacttgcccaggtcagaggtctgcgtagaagcccttttctgagcatcctctcctctcctcacacctgccactgtcctctgcgttgctgtcgaattaaatcttgcatcaccatggtgcacttctgtggcctactcaccctccaccgggagccagtgccgctgaagagtatctctgtgagcgtgaacatttacgagtttgtggctggtgtgtctgcaactttgaactacgagaatgaggagaaagttcctttggaggccttctttgtgttccccatggatgaagactctgctgtttacagctttgaggccttggtggatgggaagaaaattgtagcagaattacaagacaagatgaaggcccgcaccaactatgagaaagccatctcccagggccaccaggccttcttattggagggggacagcagctccagggatgtcttctcttgcaatgtgggtaacctccaacctgggtcgaaggcggcagtcaccctgaagtatgtgcaggagctgcctctggaagcagatggggctctgcgctttgtgctcccagctgtcctgaatcctagataccagttctctgggtcgtctaaggacagttgccttaatgtgaagactcctatagtccctgtggaggacctgccctacacactcagcatggtcgccaccatagattcccagcatggcattgagaaggtccaatccaactgccccttgagtcctaccgagtacctaggagaggacaagacttctgctcaggtttccctggctgctggacacaagtttgatcgggacgtggaactcctgatttactacaatgaggtgcatacccccagcgtggttttggagatggggatgcctaacatgaagccaggtcatttgatgggagatccatctgcaatggtgagtttctatccaaatatcccagaagatcaaccatcaaatacctgtggagagtttatctttctcatggaccgctcgggaagtatgcagagccccatgagtagccaggatacatctcagctgcgaatacaggcagccaaggaaacactgattttgctgctgaagagtttacctataggctgttatttcaacatctatggatttggctcttcctatgaggcatgctttccggagagtgtgaagtacactcagcaaacaatggaggaggctctggggagagtgaagcttatgcaggccgacctagggggcactgaaatcttggcaccactccagaacatttacaggggaccctccatcccaggccaccccctacagctttttgtctttacagatggagaagttacagacacgtttagtgtaattaaagaagttaggatcaacagacagaaacacaggtaggaagaaaatgtgatttccgggtgattggtgctgagtagtgacacacagactctagtgctacatgatgccggtgttgaccttccttcaagaggaccaaatgatttcagaatttagttttagcagctgaaaatttatttctccctgtaaacgttaaaaacagttttccaaataacatcaacaacacagcaaaaccattgtttcttattctttctaaactacaacgaacacaagaattgaatagtaagatgttaattttttttactataaacatttttagagaagtaaaacatgctgaaaactacacaaattataagcatacaactggactcattatcacagtgaatgcactgtgtgatcgccacataggtaaaaactggaatggtcgtaggcctctccatctgtacccttttccatcatgtcctattccctgtcactacacactaaaactttcctgacttacaataccatgggttatttatgcttgtttttgaatgaaaataaataagttatacagtatgctt

SEQ ID NO: 4492 - DNA, 4388 bp, Homo sapiens
  source 1..4388: mol_type = genomic DNA
agtcttgtagtcgctactttataaccggtccctagaagggggcggttctttccggaaattatgactgcagctgttttcactccgctgtgactcagagcgctccgggctgcaggagaggaagcccagcctgttctaccagagaacttgcccaggtcagaggtctgcgtagaagcccttttctgagcatcctctcctctcctcacacctgccactgtcctctgcgttgctgtcgaattaaatcttgcatcaccatggtgcacttctgtggcctactcaccctccaccgggagccagtgccgctgaagagtatctctgtgagcgtgaacatttacgagtttgtggctggtgtgtctgcaactttgaactacgagaatgaggagaaagttcctttggaggccttctttgtgttccccatggatgaagactctgctgtttacagctttgaggccttggtggatgggaagaaaattgtagcagaattacaagacaagatgaaggcccgcaccaactatgagaaagccatctcccagggccaccaggccttcttattggagggggacagcagctccagggatgtcttctcttgcaatgtgggtaacctccaacctgggtcgaaggcggcagtcaccctgaagtatgtgcaggagctgcctctggaagcagatggggctctgcgctttgtgctcccagctgtcctgaatcctagataccagttctctgggtcgtctaaggacagttgccttaatgtgaagactcctatagtccctgtggaggacctgccctacacactcagcatggtcgccaccatagattcccagcatggcattgagaaggtccaatccaactgccccttgagtcctaccgagtacctaggagaggacaagacttctgctcaggtttccctggctgctggacacaagtttgatcgggacgtggaactcctgatttactacaatgaggtgcatacccccagcgtggttttggagatggggatgcctaacatgaagccaggtcatttgatgggagatccatctgcaatggtgagtttctatccaaatatcccagaagatcaaccatcaaatacctgtggagagtttatctttctcatggaccgctcgggaagtatgcagagccccatgagtagccaggatacatctcagctgcgaatacaggcagccaaggaaacactgattttgctgctgaagagtttacctataggctgttatttcaacatctatggatttggctcttcctatgaggcatgctttccggagagtgtgaagtacactcagcaaacaatggaggaggctctggggagagtgaagcttatgcaggccgacctagggggcactgaaatcttggcaccactccagaacatttacaggggaccctccatcccaggccaccccctacagctttttgtctttacagatggagaagttacagacacgtttagtgtaattaaagaagttaggatcaacagacagaaacacaggtgtttctcatttggtattggagaaggcacctccaccagcctaataaaaggtattgcccgggcatcagggggcacctcagaatttatcacaggcaaagacaggatgcagtccaaggctctcaggactctgaaacgctctctgcagcctgtggtagaggatgtctctctgagctggcatttgcctcctggtctgtctgctaaaatgctttccccagaacagactgtcatctttaggggtcagagattaatcagctatgcccagctgaccgggaggatgccagcagcagagacaacaggagaagtatgcctcaaatatacactccagggcaagacttttgaggataaggtgacatttcctctacaacccaagcctgatgtcaacctcaccattcaccgccttgctgccaagtccttgctccagaccaaggacatgggcctcagggagactccagcaagtgataaaaaagatgcattgaaccttagccttgagtctggtgtcataagctccttcacagctttcattgctatcaataaggagctcaacaagccggttcaggggcctctggctcatagggacgtcccaaggccaattctgttgggtgcttctgccccattgaagataaaatgccaatcaggttttcgaaaggccttacactctgaccgtcctccttctgcatctcagcccagaggggaacttatgtgttataaggccaagacattccagatggacgattacagtctctgtgggttgataagtcacaaggaccagcacagtccaggctttggagagaatcaccttgtgcagctgatttaccaccaaaatgcaaatggttcctgggatctgaatgaagatctagccaagatcctaggtatgagtttggaagaaataatggctgcacagcctgccgagcttgtggattcctcaggctgggccaccatcctggccgtgatctggctgcacagcaatggtaaggacttgaagtgtgaatgggagcttctggaaaggaaggccgtggcctggatgcgtgcccatgcaggctccaccatgccttcggttgtgaaagctgctattactttcctgaagtcatctgtggatcctgctatctttgccttttgaagataccatccagaaaaagaagtgcctttaatttgctactgtcatttcctctagtatcacttttgctgtgatgatgtgttcttgtgtattataactctttattttttgccataaaagtaaaggatgcttactccacttcgcttctctgctccaggttcactttggatatgatctttcttttcccaacatatgccctcagaaaagtgacagtggtcccagaacctattccctttcttgagggagttcaaaacattcataggcagtaatgttcctcccagggtttccagggaaacaacatgaaaaacaggtgacatgaactacagactaaagattgcagcatttatgttagagaatgcttgaattagagaattttctgcattatctttgtctgttcactttctatcttatatacttatcagggccatactggtaagcttgcgtaggaggagttagagggaagttgaaagccaacatctggatcaatgtaatgtcaagatcacaaagacagagactgcaggggtccactgtgagaggtgacactgttggggaccttcctgattcattcttcttgggctttgctagcctgtacaacctacatgtcttttcttccactgcctgaaagacttgggttgaactataactgttggagagagatgttcctctttaatcatgaaacaccttaagaagtctataatgcaatccttagtcctaccctgaacctatgtgtcctctaagtcaggccctgatctagtgcagtaaagggaagggtgggcttaatgggagctttgcctgggacctgaacctggagcacttaccgcattaggaagaaaggagctccccgtaatcgttcctgacccttgtgtctcatataccctatcctggtggaaatgaccctatttgatatgctgtcccttaaaataacttgtatcaatattaaaatgactatttctaccctttgatgagtaaatgcagtggttcttaaagtggtctcgtctccctaccccacaatattttggtactgccactttgggaagccaaactaggatagtaaattgaccggaacacagttgtggaaatttgacctgaagttagtgaaataaaacttagtagggaaaaaaagcttagcaagaggtctactcctccatagattcatttattgaacttacattggttttattgtcccttgttttctgttccagcttttctgatgcctccactgttcccatggtatcctgaccctctatcttctgttgtaggctgacttcttttatatgaagcaagtaaaggatactaataagaataccactgtagaatcctgaccatacccttaaatagttatgtgatgatgggcaaatgatttcaccctcaggcacttaatatcctcatctgtaaaactaagggattaaactagaactttattaacactttcgagttccactcagaattcctagaggaacatcggtgacttttcactcagaaagtgggtggactaggcctgagtttctttaagttgttgagttacctggtattaggaagacttgtgtgacttgcatagtggactctaatctctcagtctttcttccaagtttgtttatgctgaatgtgatctgcggaacagggttgttagaaatgcagctttttagaaatgcagaattttaatcgataccaggaactactttatttaacaaggctcccaggtatcatgcatgcacattgaagtttgaaaagtaaaggcttaatattttcatgaaataggcttatatccaagcctgccat

SEQ ID NO: 4493 - DNA, 1863 bp, Homo sapiens
  source 1..1863: mol_type = genomic DNA
cggttctttccggaaattatgactgcagctgttttcactccgctgtgactcagagcgctccgggctgcaggagaggaagaaatcttgcatcaccatggtgcacttctgtggcctactcaccctccaccgggagccagtgccgctgaagagtatctctgtgagcgtgaacatttacgagtttgtggctggtgtgtctgcaactttgaactacgagaatgaggagaaagttcctttggaggccttctttgtgttccccatggatgaagactctgctgtttacagctttgaggccttggtggatgggaagaaaattgtagcagaattacaagacaagatgaaggcccgcaccaactatgagaaagccatctcccagggccaccaggccttcttattggagggggacagcagctccagggatgtcttctcttgcaatgtgggtaacctccaacctgggtcgaaggcggcagtcaccctgaagtatgtgcaggagctgcctctggaagcagatggggctctgcgctttgtgctcccagctgtcctgaatcctagataccagttctctgggtcgtctaaggacagttgccttaatgtgaagactcctatagtccctgtggaggacctgccctacacactcagcatggtcgccaccatagattcccagcatggcattgagaaggtccaatccaactgccccttgagtcctaccgagtacctaggagaggacaagacttctgctcaggtttccctggctgctggacacaagtttgatcgggacgtggaactcctgatttactacaatgaggtgcatacccccagcgtggttttggagatggggatgcctaacatgaagccaggtcatttgatgggagatccatctgcaatggtgagtttctatccaaatatcccagaagatcaaccatcaaatacctgtggagagtttatctttctcatggaccgctcgggaagtatgcagagccccatgagtagccaggatacatctcagctgcgaatacaggcagccaaggaaacactgattttgctgctgaagagtttacctataggctgttatttcaacatctatggatttggctcttcctatgaggcatgctttccggagagtgtgaagtacactcagcaaacaatggaggaggctctggggagagtgaagcttatgcaggccgacctagggggcactgaaatcttggcaccactccagaacatttacaggggaccctccatcccaggccaccccctacagctttttgtctttacagatggagaagttacagacacgtttagtgtaattaaagaagttaggatcaacagacagaaacacaggtaggaagaaaatgtgatttccgggtgattggtgctgagtagtgacacacagactctagtgctacatgatgccggtgttgaccttccttcaagaggaccaaatgatttcagaatttagttttagcagctgaaaatttatttctccctgtaaacgttaaaaacagttttccaaataacatcaacaacacagcaaaaccattgtttcttattctttctaaactacaacgaacacaagaattgaatagtaagatgttaattttttttactataaacatttttagagaagtaaaacatgctgaaaactacacaaattataagcatacaactggactcattatcacagtgaatgcactgtgtgatcgccacataggtaaaaactggaatggtcgtaggcctctccatctgtacccttttccatcatgtcctattccctgtcactacacactaaaactttcctgacttacaataccatgggttatttatgcttgtttttgaatgaaaataaataagttatacagtatgctt

SEQ ID NO: 4494 - DNA, 2480 bp, Homo sapiens
  source 1..2480: mol_type = genomic DNA
cgcctcccttccccctccccgcccgacagcggccgctcgggccccggctctcggttataagatggcggcgctgagcggtggcggtggtggcggcgcggagccgggccaggctctgttcaacggggacatggagcccgaggccggcgccggcgccggcgccgcggcctcttcggctgcggaccctgccattccggaggaggtgtggaatatcaaacaaatgattaagttgacacaggaacatatagaggccctattggacaaatttggtggggagcataatccaccatcaatatatctggaggcctatgaagaatacaccagcaagctagatgcactccaacaaagagaacaacagttattggaatctctggggaacggaactgatttttctgtttctagctctgcatcaatggataccgttacatcttcttcctcttctagcctttcagtgctaccttcatctctttcagtttttcaaaatcccacagatgtggcacggagcaaccccaagtcaccacaaaaacctatcgttagagtcttcctgcccaacaaacagaggacagtggtacctgcaaggtgtggagttacagtccgagacagtctaaagaaagcactgatgatgagaggtctaatcccagagtgctgtgctgtttacagaattcaggatggagagaagaaaccaattggttgggacactgatatttcctggcttactggagaagaattgcatgtggaagtgttggagaatgttccacttacaacacacaactttgtacgaaaaacgtttttcaccttagcattttgtgacttttgtcgaaagctgcttttccagggtttccgctgtcaaacatgtggttataaatttcaccagcgttgtagtacagaagttccactgatgtgtgttaattatgaccaacttgatttgctgtttgtctccaagttctttgaacaccacccaataccacaggaagaggcgtccttagcagagactgccctaacatctggatcatccccttccgcacccgcctcggactctattgggccccaaattctcaccagtccgtctccttcaaaatccattccaattccacagcccttccgaccagcagatgaagatcatcgaaatcaatttgggcaacgagaccgatcctcatcagctcccaatgtgcatataaacacaatagaacctgtcaatattgatgacttgattagagaccaaggatttcgtggtgatggaggatcaaccacaggtttgtctgctaccccccctgcctcattacctggctcactaactaacgtgaaagccttacagaaatctccaggacctcagcgagaaaggaagtcatcttcatcctcagaagacaggaatcgaatgaaaacacttggtagacgggactcgagtgatgattgggagattcctgatgggcagattacagtgggacaaagaattggatctggatcatttggaacagtctacaagggaaagtggcatggtgatgtggcagtgaaaatgttgaatgtgacagcacctacacctcagcagttacaagccttcaaaaatgaagtaggagtactcaggaaaacacgacatgtgaatatcctactcttcatgggctattccacaaagccacaactggctattgttacccagtggtgtgagggctccagcttgtatcaccatctccatatcattgagaccaaatttgagatgatcaaacttatagatattgcacgacagactgcacagggcatggattacttacacgccaagtcaatcatccacagagacctcaagagtaataatatatttcttcatgaagacctcacagtaaaaataggtgattttggtctagctacagtgaaatctcgatggagtgggtcccatcagtttgaacagttgtctggatccattttgtggatggcaccagaagtcatcagaatgcaagataaaaatccatacagctttcagtcagatgtatatgcatttggaattgttctgtatgaattgatgactggacagttaccttattcaaacatcaacaacagggaccagataatttttatggtgggacgaggatacctgtctccagatctcagtaaggtacggagtaactgtccaaaagccatgaagagattaatggcagagtgcctcaaaaagaaaagagatgagagaccactctttccccaaattctcgcctctattgagctgctggcccgctcattgccaaaaattcaccgcagtgcatcagaaccctccttgaatcgggctggtttccaaacagaggattttagtctatatgcttgtgcttctccaaaaacacccatccaggcagggggatatggtgcgtttcctgtccactgaaacaaatgagtgagagagttcaggagagtagcaacaaaaggaaaataaatgaacatatgtttgcttatatgttaaattgaataaaatactctctttttttttaaggtgaaccaaagaa

SEQ ID NO: 4495 - DNA, 3300 bp, Homo sapiens
  source 1..3300: mol_type = genomic DNA
agtcgactgccagtagggctcgcgcagaatcggagagccggtggcgtcgcaggtcgggaggacgagcaccgagtcgagggctcgctcgtctgggccgcccgagagtcttaatcgcgggcgcttgggccgccatcttagatggcgggagtaagaggaaaacgattgtgaggcgggaacggctttctgctgccttttttgggccccgaaaagggtcagctggccgggctttggggcgcgtgccctgaggcgcggagcgcgtttgctacgatgcgggggctgctcggggctccgtcccctgggctggggacgcgccgaatgtgaccgcctcccgctccctcacccgccgcggggaggaggagcgggcgagaagctgccgccgaacgacaggacgttggggcggcctggctccctcaggtttaagaattgtttaagctgcatcaatggagcacatacagggagcttggaagacgatcagcaatggttttggattcaaagatgccgtgtttgatggctccagctgcatctctcctacaatagttcagcagtttggctatcagcgccgggcatcagatgatggcaaactcacagatccttctaagacaagcaacactatccgtgttttcttgccgaacaagcaaagaacagtggtcaatgtgcgaaatggaatgagcttgcatgactgccttatgaaagcactcaaggtgaggggcctgcaaccagagtgctgtgcagtgttcagacttctccacgaacacaaaggtaaaaaagcacgcttagattggaatactgatgctgcgtctttgattggagaagaacttcaagtagatttcctggatcatgttcccctcacaacacacaactttgctcggaagacgttcctgaagcttgccttctgtgacatctgtcagaaattcctgctcaatggatttcgatgtcagacttgtggctacaaatttcatgagcactgtagcaccaaagtacctactatgtgtgtggactggagtaacatcagacaactcttattgtttccaaattccactattggtgatagtggagtcccagcactaccttctttgactatgcgtcgtatgcgagagtctgtttccaggatgcctgttagttctcagcacagatattctacacctcacgccttcacctttaacacctccagtccctcatctgaaggttccctctcccagaggcagaggtcgacatccacacctaatgtccacatggtcagcaccaccctgcctgtggacagcaggatgattgaggatgcaattcgaagtcacagcgaatcagcctcaccttcagccctgtccagtagccccaacaatctgagcccaacaggctggtcacagccgaaaacccccgtgccagcacaaagagagcgggcaccagtatctgggacccaggagaaaaacaaaattaggcctcgtggacagagagattcaagctattattgggaaatagaagccagtgaagtgatgctgtccactcggattgggtcaggctcttttggaactgtttataagggtaaatggcacggagatgttgcagtaaagatcctaaaggttgtcgacccaaccccagagcaattccaggccttcaggaatgaggtggctgttctgcgcaaaacacggcatgtgaacattctgcttttcatggggtacatgacaaaggacaacctggcaattgtgacccagtggtgcgagggcagcagcctctacaaacacctgcatgtccaggagaccaagtttcagatgttccagctaattgacattgcccggcagacggctcagggaatggactatttgcatgcaaagaacatcatccatagagacatgaaatccaacaatatatttctccatgaaggcttaacagtgaaaattggagattttggtttggcaacagtaaagtcacgctggagtggttctcagcaggttgaacaacctactggctctgtcctctggatggccccagaggtgatccgaatgcaggataacaacccattcagtttccagtcggatgtctactcctatggcatcgtattgtatgaactgatgacgggggagcttccttattctcacatcaacaaccgagatcagatcatcttcatggtgggccgaggatatgcctccccagatcttagtaagctatataagaactgccccaaagcaatgaagaggctggtagctgactgtgtgaagaaagtaaaggaagagaggcctctttttccccagatcctgtcttccattgagctgctccaacactctctaccgaagatcaaccggagcgcttccgagccatccttgcatcgggcagcccacactgaggatatcaatgcttgcacgctgaccacgtccccgaggctgcctgtcttctagttgactttgcacctgtcttcaggctgccaggggaggaggagaagccagcaggcaccacttttctgctccctttctccagaggcagaacacatgttttcagagaagctgctgctaaggaccttctagactgctcacagggccttaacttcatgttgccttcttttctatccctttgggccctgggagaaggaagccatttgcagtgctggtgtgtcctgctccctccccacattccccatgctcaaggcccagccttctgtagatgcgcaagtggatgttgatggtagtacaaaaagcaggggcccagccccagctgttggctacatgagtatttagaggaagtaaggtagcaggcagtccagccctgatgtggagacacatgggattttggaaatcagcttctggaggaatgcatgtcacaggcgggactttcttcagagagtggtgcagcgccagacattttgcacataaggcaccaaacagcccaggactgccgagactctggccgcccgaaggagcctgctttggtactatggaacttttcttaggggacacgtcctcctttcacagcttctaaggtgtccagtgcattgggatggttttccaggcaaggcactcggccaatccgcatctcagccctctcagggagcagtcttccatcatgctgaattttgtcttccaggagctgcccctatggggcggggccgcagggccagccttgtttctctaacaaacaaacaaacaaacagccttgtttctctagtcacatcatgtgtatacaaggaagccaggaatacaggttttcttgatgatttgggttttaattttgtttttattgcacctgacaaaatacagttatctgatggtccctcaattatgttattttaataaaataaattaaatttaggtgtaa

SEQ ID NO: 4496 - DNA, 3085 bp, Homo sapiens
  source 1..3085: mol_type = genomic DNA
ggctcgctcgtctgggccgcccgagagtcttaatcgcgggcgcttgggccgccatcttagatggcgggagtaagaggaaaacgattgtgaggcgggaacggctttctgctgccttttttgggccccgaaaagggtcagctggccgggctttggggcgcgtgccctgaggcgcggagcgcgtttgctacgatgcgggggctgctcggggctccgtcccctgggctggggacgcgccgaatgtgaccgcctcccgctccctcacccgccgcggggaggaggagcgggcgagaagctgccgccgaacgacaggacgttggggcggcctggctccctcaggtttaagaattgtttaagctgcatcaatggagcacatacagggagcttggaagacgatcagcaatggttttggattcaaagatgccgtgtttgatggctccagctgcatctctcctacaatagttcagcagtttggctatcagcgccgggcatcagatgatggcaaactcacagatccttctaagacaagcaacactatccgtgttttcttgccgaacaagcaaagaacagtggtcaatgtgcgaaatggaatgagcttgcatgactgccttatgaaagcactcaaggtgaggggcctgcaaccagagtgctgtgcagtgttcagacttctccacgaacacaaaggtaaaaaagcacgcttagattggaatactgatgctgcgtctttgattggagaagaacttcaagtagatttcctggatcatgttcccctcacaacacacaactttgctcggaagacgttcctgaagcttgccttctgtgacatctgtcagaaattcctgctcaatggatttcgatgtcagacttgtggctacaaatttcatgagcactgtagcaccaaagtacctactatgtgtgtggactggagtaacatcagacaactcttattgtttccaaattccactattggtgatagtggagtcccagcactaccttctttgactatgcgtcgtatgcgagagtctgtttccaggatgcctgttagttctcagcacagatattctacacctcacgccttcacctttaacacctccagtccctcatctgaaggttccctctcccagaggcagaggtcgacatccacacctaatgtccacatggtcagcaccaccctgcctgtggacagcaggatgattgagaataacaacctgagtgcttctcccagggcgtggtccagacgattttgtttgaggggaagagatgcaattcgaagtcacagcgaatcagcctcaccttcagccctgtccagtagccccaacaatctgagcccaacaggctggtcacagccgaaaacccccgtgccagcacaaagagagcgggcaccagtatctgggacccaggagaaaaacaaaattaggcctcgtggacagagagattcaagctattattgggaaatagaagccagtgaagtgatgctgtccactcggattgggtcaggctcttttggaactgtttataagggtaaatggcacggagatgttgcagtaaagatcctaaaggttgtcgacccaaccccagagcaattccaggccttcaggaatgaggtggctgttctgcgcaaaacacggcatgtgaacattctgcttttcatggggtacatgacaaaggacaacctggcaattgtgacccagtggtgcgagggcagcagcctctacaaacacctgcatgtccaggagaccaagtttcagatgttccagctaattgacattgcccggcagacggctcagggaatggactatttgcatgcaaagaacatcatccatagagacatgaaatccaacaatatatttctccatgaaggcttaacagtgaaaattggagattttggtttggcaacagtaaagtcacgctggagtggttctcagcaggttgaacaacctactggctctgtcctctggatggccccagaggtgatccgaatgcaggataacaacccattcagtttccagtcggatgtctactcctatggcatcgtattgtatgaactgatgacgggggagcttccttattctcacatcaacaaccgagatcagatcatcttcatggtgggccgaggatatgcctccccagatcttagtaagctatataagaactgccccaaagcaatgaagaggctggtagctgactgtgtgaagaaagtaaaggaagagaggcctctttttccccagatcctgtcttccattgagctgctccaacactctctaccgaagatcaaccggagcgcttccgagccatccttgcatcgggcagcccacactgaggatatcaatgcttgcacgctgaccacgtccccgaggctgcctgtcttctagttgactttgcacctgtcttcaggctgccaggggaggaggagaagccagcaggcaccacttttctgctccctttctccagaggcagaacacatgttttcagagaagctgctgctaaggaccttctagactgctcacagggccttaacttcatgttgccttcttttctatccctttgggccctgggagaaggaagccatttgcagtgctggtgtgtcctgctccctccccacattccccatgctcaaggcccagccttctgtagatgcgcaagtggatgttgatggtagtacaaaaagcaggggcccagccccagctgttggctacatgagtatttagaggaagtaaggtagcaggcagtccagccctgatgtggagacacatgggattttggaaatcagcttctggaggaatgcatgtcacaggcgggactttcttcagagagtggtgcagcgccagacattttgcacataaggcaccaaacagcccaggactgccgagactctggccgcccgaaggagcctgctttggtactatggaacttttcttaggggacacgtcctcctttcacagcttctaaggtgtccagtgcattgggatggttttccaggcaaggcactcggccaatccgcatctcagccctctcagggagcagtcttccatcatgctgaattttgtcttccaggagctgcccctatggggcggggccgcagggccag

SEQ ID NO: 4497 - DNA, 1686 bp, Homo sapiens
  source 1..1686: mol_type = genomic DNA
caacacacaactttgctcggaagacgttcctgaagcttgccttctgtgacatctgtcagaaattcctgctcaatggatttcgatgtcagacttgtggctacaaatttcatgagcactgtagcaccaaagtacctactatgtgtgtggactggagtaacatcagacaactcttttctcagcacagatattctacacctcacgccttcacctttaacacctccagtccctcatctgaaggttccctctcccagaggcagaggtcgacatccacacctaatgtccacatggtcagcaccaccctgcctgtggacagcaggatgattgaggatgcaattcgaagtcacagcgaatcagcctcaccttcagccctgtccagtagccccaacaatctgagcccaacaggctggtcacagccgaaaacccccgtgccagcacaaagagagcgggcaccagtatctgggacccaggagaaaaacaaaattaggcctcgtggacagagagattcaagctattattgggaaatagaagccagtgaagtgatgctgtccactcggattgggtcaggctcttttggaactgtttataagggtaaatggcacggagatgttgcagtaaagatcctaaaggttgtcgacccaaccccagagcaattccaggccttcaggaatgaggtggctgttctgcgcaaaacacggcatgtgaacattctgcttttcatggggtacatgacaaaggacaacctggcaattgtgacccagtggtgcgagggcagcagcctctacaaacacctgcatgtccaggagaccaagtttcagatgttccagctaattgacattgcccggcagacggctcagggaatggactatttgcatgcaaagaacatcatccatagagacatgaaatccaacaatatatttctccatgaaggcttaacagtgaaaattggagattttggtttggcaacagtaaagtcacgctggagtggttctcagcaggttgaacaacctactggctctgtcctctggatggccccagaggtgatccgaatgcaggataacaacccattcagtttccagtcggatgtctactcctatggcatcgtattgtatgaactgatgacgggggagcttccttattctcacatcaacaaccgagatcagatcatcttcatggtgggccgaggatatgcctccccagatcttagtaagctatataagaactgccccaaagcaatgaagaggctggtagctgactgtgtgaagaaagtaaaggaagagaggcctctttttccccagatcctgtcttccattgagctgctccaacactctctaccgaagatcaaccggagcgcttccgagccatccttgcatcgggcagcccacactgaggatatcaatgcttgcacgctgaccacgtccccgaggctgcctgtcttctagttgactttgcacctgtcttcaggctgccaggggaggaggagaagccagcaggcaccacttttctgctccctttctccagaggcagaacacatgttttcagagaagctgctgctaaggaccttctagactgctcacagggccttaacttcatgttgccttcttttctatccctttgggccctgggagaaggaagccatttgcagtgctggtgtgtcctgctccctccccacattccccatgctcaagg

SEQ ID NO: 4498 - DNA, 2346 bp, Homo sapiens
  source 1..2346: mol_type = genomic DNA
aatcgcgggcgcttgggccgccatcttagatggcgggagtaagaggaaaacgattgtgaggcgggaacggctttctgctgccttttttgggccccgaaaagggtcagctggccgggctttggggcgcgtgccctgaggcgcggagcgcgtttgctacgatgcgggggctgctcggggctccgtcccctgggctggggacgcgccgaatgtgaccgcctcccgctccctcacccgccgcggggaggaggagcgggcgagaagctgccgccgaacgacaggacgttggggcggcctggctccctcaggtttaagaattgtttaagctgcatcaatggagcacatacagggagcttggaagacgatcagcaatggttttggattcaaagatgccgtgtttgatggctccagctgcatctctcctacaatagttcagcagtttggctatcagcgccgggcatcagatgatggcaaactcacagatccttctaagacaagcaacactatccgtgttttcttgccgaacaagcaaagaacagtgtaaaaaagcacgcttagattggaatactgatgctgcgtctttgattggagaagaacttcaagtagatttcctggatcatgttcccctcacaacacacaactttgctcggaagacgttcctgaagcttgccttctgtgacatctgtcagaaattcctgctcaatggatttcgatgtcagacttgtggctacaaatttcatgagcactgtagcaccaaagtacctactatgtgtgtggactggagtaacatcagacaactcttattgtttccaaattccactattggtgatagtggagtcccagcactaccttctttgactatgcgtcgtatgcgagagtctgtttccaggatgcctgttagttctcagcacagatattctacacctcacgccttcacctttaacacctccagtccctcatctgaaggttccctctcccagaggcagaggtcgacatccacacctaatgtccacatggtcagcaccaccctgcctgtggacagcaggatgattgaggatgcaattcgaagtcacagcgaatcagcctcaccttcagccctgtccagtagccccaacaatctgagcccaacaggctggtcacagccgaaaacccccgtgccagcacaaagagagcgggcaccagtatctgggacccaggagaaaaacaaaattaggcctcgtggacagagagattcaagctattattgggaaatagaagccagtgaagtgatgctgtccactcggattgggtcaggctcttttggaactgtttataagggtaaatggcacggagatgttgcagtaaagatcctaaaggttgtcgacccaaccccagagcaattccaggccttcaggaatgaggtggctgttctgcgcaaaacacggcatgtgaacattctgcttttcatggggtacatgacaaaggacaacctggcaattgtgacccagtggtgcgagggcagcagcctctacaaacacctgcatgtccaggagaccaagtttcagatgttccagctaattgacattgcccggcagacggctcagggaatggactatttgcatgcaaagaacatcatccatagagacatgaaatccaacaatatatttctccatgaaggcttaacagtgaaaattggagattttggtttggcaacagtaaagtcacgctggagtggttctcagcaggttgaacaacctactggctctgtcctctggatggccccagaggtgatccgaatgcaggataacaacccattcagtttccagtcggatgtctactcctatggcatcgtattgtatgaactgatgacgggggagcttccttattctcacatcaacaaccgagatcagatcatcttcatggtgggccgaggatatgcctccccagatcttagtaagctatataagaactgccccaaagcaatgaagaggctggtagctgactgtgtgaagaaagtaaaggaagagaggcctctttttccccagatcctgtcttccattgagctgctccaacactctctaccgaagatcaaccggagcgcttccgagccatccttgcatcgggcagcccacactgaggatatcaatgcttgcacgctgaccacgtccccgaggctgcctgtcttctagttgactttgcacctgtcttcaggctgccaggggaggaggagaagccagcaggcaccacttttctgctccctttctccagaggcagaacacatgttttcagagaagctgctgctaaggaccttctagactgctcacagggccttaacttcatgttgccttcttttctatccctttgggccct

SEQ ID NO: 4499 - DNA, 3748 bp, Homo sapiens
  source 1..3748: mol_type = genomic DNA
ggcctctatttcgagacccctgactccacacctggtgtttgtgccaagaccccaggctgcctcccaggtcctctgggacagcccctgccttctaccaggaccatgggtagcaacaagagcaagcccaaggatgccagccagcggcgccgcagcctggagcccgccgagaacgtgcacggcgctggcgggggcgctttccccgcctcgcagacccccagcaagccagcctcggccgacggccaccgcggccccagcgcggccttcgcccccgcggccgccgagcccaagctgttcggaggcttcaactcctcggacaccgtcacctccccgcagagggcgggcccgctggccggtggagtgaccacctttgtggccctctatgactatgagtctaggacggagacagacctgtccttcaagaaaggcgagcggctccagattgtcaacaacacagagggagactggtggctggcccactcgctcagcacaggacagacaggctacatccccagcaactacgtggcgccctccgactccatccaggctgaggagtggtattttggcaagatcaccagacgggagtcagagcggttactgctcaatgcagagaacccgagagggaccttcctcgtgcgagaaagtgagaccacgaaaggtgcctactgcctctcagtgtctgacttcgacaacgccaagggcctcaacgtgaagcactacaagatccgcaagctggacagcggcggcttctacatcacctcccgcacccagttcaacagcctgcagcagctggtggcctactactccaaacacgccgatggcctgtgccaccgcctcaccaccgtgtgccccacgtccaagccgcagactcagggcctggccaaggatgcctgggagatccctcgggagtcgctgcggctggaggtcaagctgggccagggctgctttggcgaggtgtggatggggacctggaacggtaccaccagggtggccatcaaaaccctgaagcctggcacgatgtctccagaggccttcctgcaggaggcccaggtcatgaagaagctgaggcatgagaagctggtgcagttgtatgctgtggtttcagaggagcccatttacatcgtcacggagtacatgagcaaggggagtttgctggactttctcaagggggagacaggcaagtacctgcggctgcctcagctggtggacatggctgctcagatcgcctcaggcatggcgtacgtggagcggatgaactacgtccaccgggaccttcgtgcagccaacatcctggtgggagagaacctggtgtgcaaagtggcggactttgggctggctcggctcattgaagacaatgagtacacggcgcggcaaggtgccaaattccccatcaagtggacggctccagaagctgccctctatggccgcttcaccatcaagtcggacgtgtggtccttcgggatcctgctgactgagctcaccacaaagggacgggtgccctaccctgggatggtgaaccgcgaggtgctggaccaggtggagcggggctaccggatgccctgcccgccggagtgtcccgagtccctgcacgacctcatgtgccagtgctggcggaaggagcctgaggagcggcccaccttcgagtacctgcaggccttcctggaggactacttcacgtccaccgagccccagtaccagcccggggagaacctctaggcacaggcgggcccagaccggcttctcggcttggatcctgggctgggtggcccctgtctcggggcttgccccactctgcctgcctgctgttggtcctctctctgtggggctgaattgccaggggcgaggcccttcctctttggtggcatggaaggggcttctggacctagggtggcctgagagggcggtgggtatgcgagaccagcacggtgactctgtccagctcccgctgtggccgcacgcctctccctgcactccctcctggagctctgtgggtctctggaagaggaaccaggagaagggctggggccggggctgagggtgcccttttccagcctcagcctactccgctcactgaactccttccccacttctgtgccacccccggtctatgtcgagagctggccaaagagcctttccaaagaggagcgatgggcccctggccccgcctgcctgccaccctgccccttgccatccattctggaaacacctgtaggcagaggctgccgagacagaccctctgccgctgcttccaggctgggcagcacaaggccttgcctggcctgatgatggtgggtgggtgggatgagtaccccctcaaaccctgccctccttagacctgagggacccttcgagatcatcacttccttgcccccatttcacccatggggagacagttgagagcggggatgtgacatgcccaaggccacggagcagttcagagtggaggcgggcttggaacccggtgctccctctgtcatcctcaggaaccaacaattcgtcggaggcatcatggaaagactgggacagcccaggaaacaaggggtctgaggatgcattcgagatggcagattcccactgccgctgcccgctcagcccagctgttgggaacagcatggaggcagatgtggggctgagctggggaatcagggtaaaaggtgcaggtgtggagagagaggcttcaatcggcttgtgggtgatgtttgaccttcagagccagccggctatgaaagggagcgagcccctcggctctggaggcaatcaagcagacatagaagagccaagagtccaggaggccctggtcctggcctccttccccgtactttgtcccgtggcatttcaattcctggccctgttctcctccccaagtcggcaccctttaactcatgaggagggaaaagagtgcctaagcgggggtgaaagaggacgtgttacccactgccatgcaccaggactggctgtgtaaccttgggtggcccctgctgtctctctgggctgcagagtctgccccacatgtggccatggcctctgcaactgctcagctctggtccaggccctgtggcaggacacacatggtgagcctagccctgggacatcaggagactgggctctggctctgttcggcctttgggtgtgtggtggattctccctgggcctcagtgtgcccatctgtaaaggggcagctgacagtttgtggcatcttgccaagggtccctgtgtgtgtgtatgtgtgtgcatgtgtgcgtgtctccatgtgcgtccatatttaacatgtaaaaatgtcccccccgctccgtcccccaaacatgttgtacatttcaccatggccccctcatcatagcaataacattcccactgccaggggttcttgagccagccaggccctgccagtggggaaggaggccaagcagtgcctgcctatgaaatttcaacttttcctttcatacgtctttattacccaagtcttctcccgtccattccagtcaaatctgggctcactcaccccagcgagctctcaaatccctctccaactgcctaaggccctttgtgtaaggtgtcttaatactgtcctttttttttttttaacagtgttttgtagatttcagatgactatgcagaggcctgggggacccctggctctgggccgggcctggggctccgaaattccaaggcccagacttgcggggggtgggggggtatccagaattggttgtaaatactttgcatattgtctgattaaacacaaacagacctc

SEQ ID NO: 4500 - DNA, 3766 bp, Homo sapiens
  source 1..3766: mol_type = genomic DNA
ggcctctatttcgagacccctgactccacacctggtgtttgtgccaagaccccaggctgcctcccaggtcctctgggacagcccctgccttctaccaggaccatgggtagcaacaagagcaagcccaaggatgccagccagcggcgccgcagcctggagcccgccgagaacgtgcacggcgctggcgggggcgctttccccgcctcgcagacccccagcaagccagcctcggccgacggccaccgcggccccagcgcggccttcgcccccgcggccgccgagcccaagctgttcggaggcttcaactcctcggacaccgtcacctccccgcagagggcgggcccgctggccggtggagtgaccacctttgtggccctctatgactatgagtctaggacggagacagacctgtccttcaagaaaggcgagcggctccagattgtcaacaacacgaggaaggtggatgtcagagagggagactggtggctggcccactcgctcagcacaggacagacaggctacatccccagcaactacgtggcgccctccgactccatccaggctgaggagtggtattttggcaagatcaccagacgggagtcagagcggttactgctcaatgcagagaacccgagagggaccttcctcgtgcgagaaagtgagaccacgaaaggtgcctactgcctctcagtgtctgacttcgacaacgccaagggcctcaacgtgaagcactacaagatccgcaagctggacagcggcggcttctacatcacctcccgcacccagttcaacagcctgcagcagctggtggcctactactccaaacacgccgatggcctgtgccaccgcctcaccaccgtgtgccccacgtccaagccgcagactcagggcctggccaaggatgcctgggagatccctcgggagtcgctgcggctggaggtcaagctgggccagggctgctttggcgaggtgtggatggggacctggaacggtaccaccagggtggccatcaaaaccctgaagcctggcacgatgtctccagaggccttcctgcaggaggcccaggtcatgaagaagctgaggcatgagaagctggtgcagttgtatgctgtggtttcagaggagcccatttacatcgtcacggagtacatgagcaaggggagtttgctggactttctcaagggggagacaggcaagtacctgcggctgcctcagctggtggacatggctgctcagatcgcctcaggcatggcgtacgtggagcggatgaactacgtccaccgggaccttcgtgcagccaacatcctggtgggagagaacctggtgtgcaaagtggcggactttgggctggctcggctcattgaagacaatgagtacacggcgcggcaaggtgccaaattccccatcaagtggacggctccagaagctgccctctatggccgcttcaccatcaagtcggacgtgtggtccttcgggatcctgctgactgagctcaccacaaagggacgggtgccctaccctgggatggtgaaccgcgaggtgctggaccaggtggagcggggctaccggatgccctgcccgccggagtgtcccgagtccctgcacgacctcatgtgccagtgctggcggaaggagcctgaggagcggcccaccttcgagtacctgcaggccttcctggaggactacttcacgtccaccgagccccagtaccagcccggggagaacctctaggcacaggcgggcccagaccggcttctcggcttggatcctgggctgggtggcccctgtctcggggcttgccccactctgcctgcctgctgttggtcctctctctgtggggctgaattgccaggggcgaggcccttcctctttggtggcatggaaggggcttctggacctagggtggcctgagagggcggtgggtatgcgagaccagcacggtgactctgtccagctcccgctgtggccgcacgcctctccctgcactccctcctggagctctgtgggtctctggaagaggaaccaggagaagggctggggccggggctgagggtgcccttttccagcctcagcctactccgctcactgaactccttccccacttctgtgccacccccggtctatgtcgagagctggccaaagagcctttccaaagaggagcgatgggcccctggccccgcctgcctgccaccctgccccttgccatccattctggaaacacctgtaggcagaggctgccgagacagaccctctgccgctgcttccaggctgggcagcacaaggccttgcctggcctgatgatggtgggtgggtgggatgagtaccccctcaaaccctgccctccttagacctgagggacccttcgagatcatcacttccttgcccccatttcacccatggggagacagttgagagcggggatgtgacatgcccaaggccacggagcagttcagagtggaggcgggcttggaacccggtgctccctctgtcatcctcaggaaccaacaattcgtcggaggcatcatggaaagactgggacagcccaggaaacaaggggtctgaggatgcattcgagatggcagattcccactgccgctgcccgctcagcccagctgttgggaacagcatggaggcagatgtggggctgagctggggaatcagggtaaaaggtgcaggtgtggagagagaggcttcaatcggcttgtgggtgatgtttgaccttcagagccagccggctatgaaagggagcgagcccctcggctctggaggcaatcaagcagacatagaagagccaagagtccaggaggccctggtcctggcctccttccccgtactttgtcccgtggcatttcaattcctggccctgttctcctccccaagtcggcaccctttaactcatgaggagggaaaagagtgcctaagcgggggtgaaagaggacgtgttacccactgccatgcaccaggactggctgtgtaaccttgggtggcccctgctgtctctctgggctgcagagtctgccccacatgtggccatggcctctgcaactgctcagctctggtccaggccctgtggcaggacacacatggtgagcctagccctgggacatcaggagactgggctctggctctgttcggcctttgggtgtgtggtggattctccctgggcctcagtgtgcccatctgtaaaggggcagctgacagtttgtggcatcttgccaagggtccctgtgtgtgtgtatgtgtgtgcatgtgtgcgtgtctccatgtgcgtccatatttaacatgtaaaaatgtcccccccgctccgtcccccaaacatgttgtacatttcaccatggccccctcatcatagcaataacattcccactgccaggggttcttgagccagccaggccctgccagtggggaaggaggccaagcagtgcctgcctatgaaatttcaacttttcctttcatacgtctttattacccaagtcttctcccgtccattccagtcaaatctgggctcactcaccccagcgagctctcaaatccctctccaactgcctaaggccctttgtgtaaggtgtcttaatactgtcctttttttttttttaacagtgttttgtagatttcagatgactatgcagaggcctgggggacccctggctctgggccgggcctggggctccgaaattccaaggcccagacttgcggggggtgggggggtatccagaattggttgtaaatactttgcatattgtctgattaaacacaaacagacctc

SEQ ID NO: 4501 - DNA, 4321 bp, Homo sapiens
  source 1..4321: mol_type = genomic DNA
catcgaggttttgagaggctaactctcccaaaaaggaccatgggtagcaacaagagcaagcccaaggatgccagccagcggcgccgcagcctggagcccgccgagaacgtgcacggcgctggcgggggcgctttccccgcctcgcagacccccagcaagccagcctcggccgacggccaccgcggccccagcgcggccttcgcccccgcggccgccgagcccaagctgttcggaggcttcaactcctcggacaccgtcacctccccgcagagggcgggcccgctggccggtggagtgaccacctttgtggccctctatgactatgagtctaggacggagacagacctgtccttcaagaaaggcgagcggctccagattgtcaacaacacagagggagactggtggctggcccactcgctcagcacaggacagacaggctacatccccagcaactacgtggcgccctccgactccatccaggctgaggagtggtattttggcaagatcaccagacgggagtcagagcggttactgctcaatgcagagaacccgagagggaccttcctcgtgcgagaaagtgagaccacgaaaggtgcctactgcctctcagtgtctgacttcgacaacgccaagggcctcaacgtgaagcactacaagatccgcaagctggacagcggcggcttctacatcacctcccgcacccagttcaacagcctgcagcagctggtggcctactactccaaacacgccgatggcctgtgccaccgcctcaccaccgtgtgccccacgtccaagccgcagactcagggcctggccaaggatgcctgggagatccctcgggagtcgctgcggctggaggtcaagctgggccagggctgctttggcgaggtgtggatggggacctggaacggtaccaccagggtggccatcaaaaccctgaagcctggcacgatgtctccagaggccttcctgcaggaggcccaggtcatgaagaagctgaggcatgagaagctggtgcagttgtatgctgtggtttcagaggagcccatttacatcgtcacggagtacatgagcaaggggagtttgctggactttctcaagggggagacaggcaagtacctgcggctgcctcagctggtggacatggctgctcagatcgcctcaggcatggcgtacgtggagcggatgaactacgtccaccgggaccttcgtgcagccaacatcctggtgggagagaacctggtgtgcaaagtggcggactttgggctggctcggctcattgaagacaatgagtacacggcgcggcaaggtgccaaattccccatcaagtggacggctccagaagctgccctctatggccgcttcaccatcaagtcggacgtgtggtccttcgggatcctgctgactgagctcaccacaaagggacgggtgccctaccctgggatggtgaaccgcgaggtgctggaccaggtggagcggggctaccggatgccctgcccgccggagtgtcccgagtccctgcacgacctcatgtgccagtgctggcggaaggagcctgaggagcggcccaccttcgagtacctgcaggccttcctggaggactacttcacgtccaccgagccccagtaccagcccggggagaacctctaggcacaggcgggcccagaccggcttctcggcttggatcctgggctgggtggcccctgtctcggggcttgccccactctgcctgcctgctgttggtcctctctctgtggggctgaattgccaggggcgaggcccttcctctttggtggcatggaaggggcttctggacctagggtggcctgagagggcggtgggtatgcgagaccagcacggtgactctgtccagctcccgctgtggccgcacgcctctccctgcactccctcctggagctctgtgggtctctggaagaggaaccaggagaagggctggggccggggctgagggtgcccttttccagcctcagcctactccgctcactgaactccttccccacttctgtgccacccccggtctatgtcgagagctggccaaagagcctttccaaagaggagcgatgggcccctggccccgcctgcctgccaccctgccccttgccatccattctggaaacacctgtaggcagaggctgccgagacagaccctctgccgctgcttccaggctgggcagcacaaggccttgcctggcctgatgatggtgggtgggtgggatgagtaccccctcaaaccctgccctccttagacctgagggacccttcgagatcatcacttccttgcccccatttcacccatggggagacagttgagagcggggatgtgacatgcccaaggccacggagcagttcagagtggaggcgggcttggaacccggtgctccctctgtcatcctcaggaaccaacaattcgtcggaggcatcatggaaagactgggacagcccaggaaacaaggggtctgaggatgcattcgagatggcagattcccactgccgctgcccgctcagcccagctgttgggaacagcatggaggcagatgtggggctgagctggggaatcagggtaaaaggtgcaggtgtggagagagaggcttcaatcggcttgtgggtgatgtttgaccttcagagccagccggctatgaaagggagcgagcccctcggctctggaggcaatcaagcagacatagaagagccaagagtccaggaggccctggtcctggcctccttccccgtactttgtcccgtggcatttcaattcctggccctgttctcctccccaagtcggcaccctttaactcatgaggagggaaaagagtgcctaagcgggggtgaaagaggacgtgttacccactgccatgcaccaggactggctgtgtaaccttgggtggcccctgctgtctctctgggctgcagagtctgccccacatgtggccatggcctctgcaactgctcagctctggtccaggccctgtggcaggacacacatggtgagcctagccctgggacatcaggagactgggctctggctctgttcggcctttgggtgtgtggtggattctccctgggcctcagtgtgcccatctgtaaaggggcagctgacagtttgtggcatcttgccaagggtccctgtgtgtgtgtatgtgtgtgcatgtgtgcgtgtctccatgtgcgtccatatttaacatgtaaaaatgtcccccccgctccgtcccccaaacatgttgtacatttcaccatggccccctcatcatagcaataacattcccactgccaggggttcttgagccagccaggccctgccagtggggaaggaggccaagcagtgcctgcctatgaaatttcaacttttcctttcatacgtctttattacccaagtcttctcccgtccattccagtcaaatctgggctcactcaccccagcgagctctcaaatccctctccaactgcctaaggccctttgtgtaaggtgtcttaatactgtcctttttttttttttaacagtgttttgtagatttcagatgactatgcagaggcctgggggacccctggctctgggccgggcctggggctccgaaattccaaggcccagacttgcggggggtgggggggtatccagaattggttgtaaatactttgcatattgtctgattaaacacaaacagacctcagaatctgatcaacagtttattgaacatctactgtgtgctggaaagcgagatggggcggaatgcgagaacaaactaccccttgaggggtctttgggcagcactagtagctggagggcttcaggccaaggcaggggtgacatcagattggagacagctacggcagaatgtggctgtttgtgaacatctgcacctgtgttagggggtgagcacctgggagaaggacaaggcacatcacaggacttccctgagcatgacaagttcaggactcaaatgtccgtggtggatggtagcagtgacattggggagtgggtggggctgtcaagcctgcctagaggagatcacaaatacacgacgagaataccgttgtgtgtgctcttcgtgtgtttcctaggagtgcagggcaggggtgctgggtcgatccacaaaagtcctgaaaacgctgaagaaaaatccaaagacccttcccctcctccctccttccccaccaccgaagcacacagtcttgaaggttgatttgcaaccgtctatacaaacacatttattttacacaaatatacatcagatcacacacctgtgcaccggagtcaactctggccacgacattgcttaattaaaaacaaatttcaaaaactgga

SEQ ID NO: 4502 - DNA, 4631 bp, Homo sapiens
  source 1..4631: mol_type = genomic DNA
gccggagcggccaggccgccgtctgcccgtcccgctggacgtcccgcggtccgccctcccgtgcgtccgtctgccggtgagcccgcccgcccgccggcccagaacagagaacagaagctcagagaagtgaagcaacttgcccagctatgagagacagagccaggatttgaaaccagatgaggacgctgaggcccagagagggaaagccacttgcctagggacacacagcggggagaggtggagcagggcctctatttcgagacccctgactccacacctggtgtttgtgccaagaccccaggctgcctcccaggtcctctgggacagcccctgccttctaccagggaccatgggtagcaacaagagcaagcccaaggatgccagccagcggcgccgcagcctggagcccgccgagaacgtgcacggcgctggcgggggcgctttccccgcctcgcagacccccagcaagccagcctcggccgacggccaccgcggccccagcgcggccttcgcccccgcggccgccgagcccaagctgttcggaggcttcaactcctcggacaccgtcacctccccgcagagggcgggcccgctggccggtggagtgaccacctttgtggccctctatgactatgagtctaggacggagacagacctgtccttcaagaaaggcgagcggctccagattgtcaacaacacagagggagactggtggctggcccactcgctcagcacaggacagacaggctacatccccagcaactacgtggcgccctccgactccatccaggctgaggagtggtattttggcaagatcaccagacgggagtcagagcggttactgctcaatgcagagaacccgagagggaccttcctcgtgcgagaaagtgagaccacgaaaggtgcctactgcctctcagtgtctgacttcgacaacgccaagggcctcaacgtgaagcactacaagatccgcaagctggacagcggcggcttctacatcacctcccgcacccagttcaacagcctgcagcagctggtggcctactactccaaacacgccgatggcctgtgccaccgcctcaccaccgtgtgccccacgtccaagccgcagactcagggcctggccaaggatgcctgggagatccctcgggagtcgctgcggctggaggtcaagctgggccagggctgctttggcgaggtgtggatggggacctggaacggtaccaccagggtggccatcaaaaccctgaagcctggcacgatgtctccagaggccttcctgcaggaggcccaggtcatgaagaagctgaggcatgagaagctggtgcagttgtatgctgtggtttcagaggagcccatttacatcgtcacggagtacatgagcaaggggagtttgctggactttctcaagggggagacaggcaagtacctgcggctgcctcagctggtggacatggctgctcagatcgcctcaggcatggcgtacgtggagcggatgaactacgtccaccgggaccttcgtgcagccaacatcctggtgggagagaacctggtgtgcaaagtggcggactttgggctggctcggctcattgaagacaatgagtacacggcgcggcaaggtgccaaattccccatcaagtggacggctccagaagctgccctctatggccgcttcaccatcaagtcggacgtgtggtccttcgggatcctgctgactgagctcaccacaaagggacgggtgccctaccctgggatggtgaaccgcgaggtgctggaccaggtggagcggggctaccggatgccctgcccgccggagtgtcccgagtccctgcacgacctcatgtgccagtgctggcggaaggagcctgaggagcggcccaccttcgagtacctgcaggccttcctggaggactacttcacgtccaccgagccccagtaccagcccggggagaacctctaggcacaggcgggcccagaccggcttctcggcttggatcctgggctgggtggcccctgtctcggggcttgccccactctgcctgcctgctgttggtcctctctctgtggggctgaattgccaggggcgaggcccttcctctttggtggcatggaaggggcttctggacctagggtggcctgagagggcggtgggtatgcgagaccagcacggtgactctgtccagctcccgctgtggccgcacgcctctccctgcactccctcctggagctctgtgggtctctggaagaggaaccaggagaagggctggggccggggctgagggtgcccttttccagcctcagcctactccgctcactgaactccttccccacttctgtgccacccccggtctatgtcgagagctggccaaagagcctttccaaagaggagcgatgggcccctggccccgcctgcctgccaccctgccccttgccatccattctggaaacacctgtaggcagaggctgccgagacagaccctctgccgctgcttccaggctgggcagcacaaggccttgcctggcctgatgatggtgggtgggtgggatgagtaccccctcaaaccctgccctccttagacctgagggacccttcgagatcatcacttccttgcccccatttcacccatggggagacagttgagagcggggatgtgacatgcccaaggccacggagcagttcagagtggaggcgggcttggaacccggtgctccctctgtcatcctcaggaaccaacaattcgtcggaggcatcatggaaagactgggacagcccaggaaacaaggggtctgaggatgcattcgagatggcagattcccactgccgctgcccgctcagcccagctgttgggaacagcatggaggcagatgtggggctgagctggggaatcagggtaaaaggtgcaggtgtggagagagaggcttcaatcggcttgtgggtgatgtttgaccttcagagccagccggctatgaaagggagcgagcccctcggctctggaggcaatcaagcagacatagaagagccaagagtccaggaggccctggtcctggcctccttccccgtactttgtcccgtggcatttcaattcctggccctgttctcctccccaagtcggcaccctttaactcatgaggagggaaaagagtgcctaagcgggggtgaaagaggacgtgttacccactgccatgcaccaggactggctgtgtaaccttgggtggcccctgctgtctctctgggctgcagagtctgccccacatgtggccatggcctctgcaactgctcagctctggtccaggccctgtggcaggacacacatggtgagcctagccctgggacatcaggagactgggctctggctctgttcggcctttgggtgtgtggtggattctccctgggcctcagtgtgcccatctgtaaaggggcagctgacagtttgtggcatcttgccaagggtccctgtgtgtgtgtatgtgtgtgcatgtgtgcgtgtctccatgtgcgtccatatttaacatgtaaaaatgtcccccccgctccgtcccccaaacatgttgtacatttcaccatggccccctcatcatagcaataacattcccactgccaggggttcttgagccagccaggccctgccagtggggaaggaggccaagcagtgcctgcctatgaaatttcaacttttcctttcatacgtctttattacccaagtcttctcccgtccattccagtcaaatctgggctcactcaccccagcgagctctcaaatccctctccaactgcctaaggccctttgtgtaaggtgtcttaatactgtcctttttttttttttaacagtgttttgtagatttcagatgactatgcagaggcctgggggacccctggctctgggccgggcctggggctccgaaattccaaggcccagacttgcggggggtgggggggtatccagaattggttgtaaatactttgcatattgtctgattaaacacaaacagacctcagaatctgatcaacagtttattgaacatctactgtgtgctggaaagcgagatggggcggaatgcgagaacaaactaccccttgaggggtctttgggcagcactagtagctggagggcttcaggccaaggcaggggtgacatcagattggagacagctacggcagaatgtggctgtttgtgaacatctgcacctgtgttagggggtgagcacctgggagaaggacaaggcacatcacaggacttccctgagcatgacaagttcaggactcaaatgtccgtggtggatggtagcagtgacattggggagtgggtggggctgtcaagcctgcctagaggagatcacaaatacacgacgagaataccgttgtgtgtgctcttcgtgtgtttcctaggagtgcagggcaggggtgctgggtcgatccacaaaagtcctgaaaacgctgaagaaaaatccaaagacccttcccctcctccctccttccccaccaccgaagcacacagtcttgaaggttgatttgcaaccgtctatacaaacacatttattttacacaaatatacatcagatcacacacctgtgcaccggagtcaactctggccacgacattgcttaattaaaaacaaatttcaaaaactgga

SEQ ID NO: 4503 - DNA, 4099 bp, Homo sapiens
  source 1..4099: mol_type = genomic DNA
caaacaagtgcggccatttcaccagcccaggctggcttctgctgttgactggctgtggcacctcaagcagcccctttcccctctagcctcagtttatcaccgcaagagctaccattcatctagcacaacctgaccatcctcacactggtcagttccaaccttcccaggaatcttctgtggccatgttcactccggttttacaggtgagggggctgggctgggaagctgatcgacttgtccaccccacagcagaggggcagctagcctagatgcgaacctagatgaggacgctgaggcccagagagggaaagccacttgcctagggacacacagcggggagaggtggagcagggcctctatttcgagacccctgactccacacctggtgtttgtgccaagaccccaggctgcctcccaggtcctctgggacagcccctgccttctaccaggaccatgggtagcaacaagagcaagcccaaggatgccagccagcggcgccgcagcctggagcccgccgagaacgtgcacggcgctggcgggggcgctttccccgcctcgcagacccccagcaagccagcctcggccgacggccaccgcggccccagcgcggccttcgcccccgcggccgccgagcccaagctgttcggaggcttcaactcctcggacaccgtcacctccccgcagagggcgggcccgctggccggtggagtgaccacctttgtggccctctatgactatgagtctaggacggagacagacctgtccttcaagaaaggcgagcggctccagattgtcaacaacacagagggagactggtggctggcccactcgctcagcacaggacagacaggctacatccccagcaactacgtggcgccctccgactccatccaggctgaggagtggtattttggcaagatcaccagacgggagtcagagcggttactgctcaatgcagagaacccgagagggaccttcctcgtgcgagaaagtgagaccacgaaaggtgcctactgcctctcagtgtctgacttcgacaacgccaagggcctcaacgtgaagcactacaagatccgcaagctggacagcggcggcttctacatcacctcccgcacccagttcaacagcctgcagcagctggtggcctactactccaaacacgccgatggcctgtgccaccgcctcaccaccgtgtgccccacgtccaagccgcagactcagggcctggccaaggatgcctgggagatccctcgggagtcgctgcggctggaggtcaagctgggccagggctgctttggcgaggtgtggatggggacctggaacggtaccaccagggtggccatcaaaaccctgaagcctggcacgatgtctccagaggccttcctgcaggaggcccaggtcatgaagaagctgaggcatgagaagctggtgcagttgtatgctgtggtttcagaggagcccatttacatcgtcacggagtacatgagcaaggggagtttgctggactttctcaagggggagacaggcaagtacctgcggctgcctcagctggtggacatggctgctcagatcgcctcaggcatggcgtacgtggagcggatgaactacgtccaccgggaccttcgtgcagccaacatcctggtgggagagaacctggtgtgcaaagtggcggactttgggctggctcggctcattgaagacaatgagtacacggcgcggcaaggtgccaaattccccatcaagtggacggctccagaagctgccctctatggccgcttcaccatcaagtcggacgtgtggtccttcgggatcctgctgactgagctcaccacaaagggacgggtgccctaccctgggatggtgaaccgcgaggtgctggaccaggtggagcggggctaccggatgccctgcccgccggagtgtcccgagtccctgcacgacctcatgtgccagtgctggcggaaggagcctgaggagcggcccaccttcgagtacctgcaggccttcctggaggactacttcacgtccaccgagccccagtaccagcccggggagaacctctaggcacaggcgggcccagaccggcttctcggcttggatcctgggctgggtggcccctgtctcggggcttgccccactctgcctgcctgctgttggtcctctctctgtggggctgaattgccaggggcgaggcccttcctctttggtggcatggaaggggcttctggacctagggtggcctgagagggcggtgggtatgcgagaccagcacggtgactctgtccagctcccgctgtggccgcacgcctctccctgcactccctcctggagctctgtgggtctctggaagaggaaccaggagaagggctggggccggggctgagggtgcccttttccagcctcagcctactccgctcactgaactccttccccacttctgtgccacccccggtctatgtcgagagctggccaaagagcctttccaaagaggagcgatgggcccctggccccgcctgcctgccaccctgccccttgccatccattctggaaacacctgtaggcagaggctgccgagacagaccctctgccgctgcttccaggctgggcagcacaaggccttgcctggcctgatgatggtgggtgggtgggatgagtaccccctcaaaccctgccctccttagacctgagggacccttcgagatcatcacttccttgcccccatttcacccatggggagacagttgagagcggggatgtgacatgcccaaggccacggagcagttcagagtggaggcgggcttggaacccggtgctccctctgtcatcctcaggaaccaacaattcgtcggaggcatcatggaaagactgggacagcccaggaaacaaggggtctgaggatgcattcgagatggcagattcccactgccgctgcccgctcagcccagctgttgggaacagcatggaggcagatgtggggctgagctggggaatcagggtaaaaggtgcaggtgtggagagagaggcttcaatcggcttgtgggtgatgtttgaccttcagagccagccggctatgaaagggagcgagcccctcggctctggaggcaatcaagcagacatagaagagccaagagtccaggaggccctggtcctggcctccttccccgtactttgtcccgtggcatttcaattcctggccctgttctcctccccaagtcggcaccctttaactcatgaggagggaaaagagtgcctaagcgggggtgaaagaggacgtgttacccactgccatgcaccaggactggctgtgtaaccttgggtggcccctgctgtctctctgggctgcagagtctgccccacatgtggccatggcctctgcaactgctcagctctggtccaggccctgtggcaggacacacatggtgagcctagccctgggacatcaggagactgggctctggctctgttcggcctttgggtgtgtggtggattctccctgggcctcagtgtgcccatctgtaaaggggcagctgacagtttgtggcatcttgccaagggtccctgtgtgtgtgtatgtgtgtgcatgtgtgcgtgtctccatgtgcgtccatatttaacatgtaaaaatgtcccccccgctccgtcccccaaacatgttgtacatttcaccatggccccctcatcatagcaataacattcccactgccaggggttcttgagccagccaggccctgccagtggggaaggaggccaagcagtgcctgcctatgaaatttcaacttttcctttcatacgtctttattacccaagtcttctcccgtccattccagtcaaatctgggctcactcaccccagcgagctctcaaatccctctccaactgcctaaggccctttgtgtaaggtgtcttaatactgtcctttttttttttttaacagtgttttgtagatttcagatgactatgcagaggcctgggggacccctggctctgggccgggcctggggctccgaaattccaaggcccagacttgcggggggtgggggggtatccagaattggttgtaaatactttgcatattgtctgattaaacacaaacagacctc

SEQ ID NO: 4504 - DNA, 904 bp, Homo sapiens
  source 1..904: mol_type = genomic DNA
gcgcgtcgagcacacggtgggtccggcggcgggttggcgccccaggcggcgttccctgtggcctggcgcctgggccgctgccctgagcgggttccgccccagagcccgaccctcctgggggctctaggcggagtcccgcgagccgagggggaccggcgaccgctgccgaagcatgaagaaggggtaaggcgtgagcccccaagatttcacgcatgccccctagcttcggtactctgacaccttctcttgcacttgcggatgatgaactggaataacgatgaaagaaagcacatccgatctcaacattcacgtcctgccctataaccgattaattaattgatccccagctagactagtgttggagaaatcagcatgttaaaacaactgttgatgatagctgttggagtaaagttgcagtggaagctatggctgcaaaatcgttaaaatcttcaaggtgaactggcacaaaggttaatctcaagatgccgctagtgaaaagaaacatcgatcctaggcacttgtgccacacagcactgcctagaggcattaagaatgaactggaatgtgtaaccaatatttccttggcaaatataattagacaactaagtagcctaagtaaatatgctgaagatatatttggagaattattcaatgaagcacatagtttttccttcagagtcaactcattgcaagaacgtgtggaccgtttatctgttagtgttacacagcttgatccaaaggaagaagaattgtctttgcaagatataacaatgaggaaagctttccgaagttctacaattcaagaccagcagcttttcgatcgcaagactttgcctattccattacaggagacgtacgatgtttgtgaacagcctccacctctcaatatactcactccttatag

SEQ ID NO: 4505 - DNA, 3075 bp, Homo sapiens
  source 1..3075: mol_type = genomic DNA
agcagtgttctcttcgtccccctcccccaaactgaggattgggcaataccacagaacctcaggaaaggggggaagagcgagcttcggccccactaatgggggagtgggcggaggctggatttcccacctcggctgcacctgggcactggaggctgaagaggaaagtgagaatctgaagttttgagacctctgactggccaggaatagctcctggggcggggggcaaggatgggaccataggcggaaagagtctcgcggtcccccctgcttctggcgcgggtccctgcgcccggttgtggagcgtctcgcgcggggagggggcggggggaacggcagctcgcggtgttgttcactcgcgcgtcgagcacacggtgggtccggcggcgggttggcgccccaggcggcgttccctgtggcctggcgcctgggccgctgccctgagcgggttccgccccagagcccgaccctcctgggggctctaggcggagtcccgcgagccgagggggaccggcgaccgctgccgaagcatgaagaaggggtaaggcgtgagcccccaagatttcacgtgttggagaaatcagcatgttaaaacaactgttgatgatagctgttggagtaaagttgcagtggaagctatggctgcaaaatcgttaaaatcttcaaggtgaactggcacaaaggttaatctcaagatgccgctagtgaaaagaaacatcgatcctaggcacttgtgccacacagcactgcctagaggcattaagaatgaactggaatgtgtaaccaatatttccttggcaaatataattagacaactaagtagcctaagtaaatatgctgaagatatatttggagaattattcaatgaagcacatagtttttccttcagagtcaactcattgcaagaacgtgtggaccgtttatctgttagtgttacacagcttgatccaaaggaagaagaattgtctttgcaagatataacaatgaggaaagctttccgaagttctacaattcaagaccagcagcttttcgatcgcaagactttgcctattccattacaggagacgtacgatgtttgtgaacagcctccacctctcaatatactcactccttatagagatgatggtaaagaaggtctgaagttttataccaatccttcgtatttctttgatctatggaaagaaaaaatgttgcaagatacagaggataagaggaaggaaaagaggaagcagaagcagaaaaatctagatcgtcctcatgaaccagaaaaagtgccaagagcacctcatgacaggcggcgagaatggcagaagctggcccaaggtccagagctggctgaagatgatgctaatctcttacataagcatattgaagttgctaatggcccagcctctcattttgaaacaagacctcagacatacgtggatcatatggatggatcttactcactttctgccttgccatttagtcagatgagtgagcttctgactagagctgaggaaagggtattagtcagaccacatgaaccacctccacctccaccaatgcatggagcaggagatgcaaaaccgatacccacctgtatcagttctgctacaggtttgatagaaaatcgccctcagtcaccagctacaggcagaacacctgtgtttgtgagccccactcccccacctcctccaccacctcttccatctgccttgtcaacttcctcattaagagcttcaatgacttcaactcctccccctccagtacctcccccacctccacctccagccactgctttgcaagctccagcagtaccaccacctccagctcctcttcagattgcccctggagttcttcacccagctcctcctccaattgcacctcctctagtacagccctctccaccagtagctagagctgccccagtatgtgagactgtaccagttcatccactcccacaaggtgaagttcaggggctgcctccacccccaccaccgcctcctctgcctccacctggcattcgaccatcatcacctgtcacagttacagctcttgctcatcctccctctgggctacatccaactccatctactgccccaggtccccatgttccattaatgcctccatctcctccatcacaagttatacctgcttctgagccaaagcgccatccatcaaccctacctgtaatcagtgatgccaggagtgtgctactggaagcaatacgaaaaggtattcagctacgcaaagtagaagagcagcgtgaacaggaagctaagcatgaacgcattgaaaacgatgttgccaccatcctgtctcgccgtattgctgttgaatatagtgattcggaagatgattcagaatttgatgaagtagattggttggagtaagaaaaatgcattgataaatattacaaaactgaatgcaaatgtcctttgtggtgcttgttccttgaaaatgtttggtcattctagtgttttgctttcttttccttataataaatgacccttttcctccataacttttgatttctaaggaaaatattagcatacatttcaaactaaatgttttacagtggcttatcttttttttccccctgaaaagactaatttggtcaaataaaccactaagtattaagcatggacagctgttgttagagtagcagattcagttttttgatatatcttaattgtgtactttgtgaattttaatttaaagaaagcaactgaaattgaaatcttgagggcagctgtgtctactaatgagccttattccatttcctgatgttttaaaagaagaaacactgccttgattatacgaatacactcagaaagtacatttagcttgtagtgttgaattctcttaaaggaatgcttgaattttttcattattgttttattgtttttatatacttgccttatttgaatgtttagcagtatccccttcccacttatatattgtgtgatatgattttgcttgcctataggagttaaaaacttttccatgtgaaatactctgacttaaacatacatgtaacttacataactgttaagaataacagtctgatttaataaatggttcattttaaaagtt

SEQ ID NO: 4506 - DNA, 678 bp, Homo sapiens
  source 1..678: mol_type = genomic DNA
cttcggccccactaatgggggagtgggcggaggctggatttcccacctcggctgcacctgggcactggaggctgaagaggaaacatgccccctagcttcggtactctgacaccttctcttgcacttgcggatgatgaactggaataacgatgaaagaaagcacatccgatctcaacattcacgtcctgccctataaccgattaattaattgatccccagctagactaggtgaactggcacaaaggttaatctcaagatgccgctagtgaaaagaaacatcgatcctaggcacttgtgccacacagcactgcctagaggcattaagaatgaactggaatgtgtaaccaatatttccttggcaaatataattagacaactaagtagcctaagtaaatatgctgaagatatatttggagaattattcaatgaagcacatagtttttccttcagagtcaactcattgcaagaacgtgtggaccgtttatctgttagtgttacacagcttgatccaaaggaagaagaattgtctttgcaagatataacaatgaggaaagctttccgaagttctacaattcaagaccagcagcttttcgatcgcaagactttgcctattccattacaggagacgtacgatgtttgtgaacagcctccacctctcaatatactcactccttatag

SEQ ID NO: 4507 - DNA, 2815 bp, Homo sapiens
  source 1..2815: mol_type = genomic DNA
agtgttctcttcgtccccctcccccaaactgaggattgggcaataccacagaacctcaggaaaggggggaagagcgagcttcggccccactaatgggggagtgggcggaggctggatttcccacctcggctgcacctgggcactggaggctgaagaggaaacatgccccctagcttcggtactctgacaccttctcttgcacttgcggatgatgaactggaataacgatgaaagaaagcacatccgatctcaacattcacgtcctgccctataaccgattaattaattgatccccagctagactagtgttggagaaatcagcatgttaaaacaactgttgatgatagctgttggagtaaagttgcagtggaagctatggctgcaaaatcgttaaaatcttcaaggtgaactggcacaaaggttaatctcaagatgccgctagtgaaaagaaacatcgatcctaggcacttgtgccacacagcactgcctagaggcattaagaatgaactggaatgtgtaaccaatatttccttggcaaatataattagacaactaagtagcctaagtaaatatgctgaagatatatttggagaattattcaatgaagcacatagtttttccttcagagtcaactcattgcaagaacgtgtggaccgtttatctgttagtgttacacagcttgatccaaaggaagaagaattgtctttgcaagatataacaatgaggaaagctttccgaagttctacaattcaagaccagcagcttttcgatcgcaagactttgcctattccattacaggagacgtacgatgtttgtgaacagcctccacctctcaatatactcactccttatagagatgatggtaaagaaggtctgaagttttataccaatccttcgtatttctttgatctatggaaagaaaaaatgttgcaagatacagaggataagaggaaggaaaagaggaagcagaagcagaaaaatctagatcgtcctcatgaaccagaaaaagtgccaagagcacctcatgacaggcggcgagaatggcagaagctggcccaaggtccagagctggctgaagatgatgctaatctcttacataagcatattgaagttgctaatggcccagcctctcattttgaaacaagacctcagacatacgtggatcatatggatggatcttactcactttctgccttgccatttagtcagatgagtgagcttctgactagagctgaggaaagggtattagtcagaccacatgaaccacctccacctccaccaatgcatggagcaggagatgcaaaaccgatacccacctgtatcagttctgctacaggtttgatagaaaatcgccctcagtcaccagctacaggcagaacacctgtgtttgtgagccccactcccccacctcctccaccacctcttccatctgccttgtcaacttcctcattaagagcttcaatgacttcaactcctccccctccagtacctcccccacctccacctccagccactgctttgcaagctccagcagtaccaccacctccagctcctcttcagattgcccctggagttcttcacccagctcctcctccaattgcacctcctctagtacagccctctccaccagtagctagagctgccccagtatgtgagactgtaccagttcatccactcccacaaggtgaagttcaggggctgcctccacccccaccaccgcctcctctgcctccacctggcattcgaccatcatcacctgtcacagttacagctcttgctcatcctccctctgggctacatccaactccatctactgccccaggtccccatgttccattaatgcctccatctcctccatcacaagttatacctgcttctgagccaaagcgccatccatcaaccctacctgtaatcagtgatgccaggagtgtgctactggaagcaatacgaaaaggtattcagctacgcaaagtagaagagcagcgtgaacaggaagctaagcatgaacgcattgaaaacgatgttgccaccatcctgtctcgccgtattgctgttgaatatagtgattcggaagatgattcagaatttgatgaagtagattggttggagtaagaaaaatgcattgataaatattacaaaactgaatgcaaatgtcctttgtggtgcttgttccttgaaaatgtttggtcattctagtgttttgctttcttttccttataataaatgacccttttcctccataacttttgatttctaaggaaaatattagcatacatttcaaactaaatgttttacagtggcttatcttttttttccccctgaaaagactaatttggtcaaataaaccactaagtattaagcatggacagctgttgttagagtagcagattcagttttttgatatatcttaattgtgtactttgtgaattttaatttaaagaaagcaactgaaattgaaatcttgagggcagctgtgtctactaatgagccttattccatttcctgatgttttaaaagaagaaacactgccttgattatacgaatacactcagaaagtacatttagcttgtagtgttgaattctcttaaaggaatgcttgaattttttcattattgttttattgtttttatatacttgccttatttgaatgtttagcagtatccccttcccacttatatattgtgtgatatgattttgcttgcctataggagttaaaaacttttccatgtgaaatactctgacttaaacatacatgtaacttacataactgttaagaataacagtctgatttaataaatggttcattttaaaagtt

SEQ ID NO: 4508 - DNA, 2675 bp, Homo sapiens
  source 1..2675: mol_type = genomic DNA
gtctcgcgcggggagggggcggggggaacggcagctcgcggtgttgttcactcgcgcgtcgagcacacggtgggtccggcggcgggttggcgccccaggcggcgttccctgtggcctggcgcctgggccgctgccctgagcgggttccgccccagagcccgaccctcctgggggctctaggcggagtcccgcgagccgagggggaccggcgaccgctgccgaagcatgaagaaggggtaaggcgtgagcccccaagatttcacggtgaactggcacaaaggttaatctcaagatgccgctagtgaaaagaaacatcgatcctaggcacttgtgccacacagcactgcctagaggcattaagaatgaactggaatgtgtaaccaatatttccttggcaaatataattagacaactaagtagcctaagtaaatatgctgaagatatatttggagaattattcaatgaagcacatagtttttccttcagagtcaactcattgcaagaacgtgtggaccgtttatctgttagtgttacacagcttgatccaaaggaagaagaattgtctttgcaagatataacaatgaggaaagctttccgaagttctacaattcaagaccagcagcttttcgatcgcaagactttgcctattccattacaggagacgtacgatgtttgtgaacagcctccacctctcaatatactcactccttatagagatgatggtaaagaaggtctgaagttttataccaatccttcgtatttctttgatctatggaaagaaaaaatgttgcaagatacagaggataagaggaaggaaaagaggaagcagaagcagaaaaatctagatcgtcctcatgaaccagaaaaagtgccaagagcacctcatgacaggcggcgagaatggcagaagctggcccaaggtccagagctggctgaagatgatgctaatctcttacataagcatattgaagttgctaatggcccagcctctcattttgaaacaagacctcagacatacgtggatcatatggatggatcttactcactttctgccttgccatttagtcagatgagtgagcttctgactagagctgaggaaagggtattagtcagaccacatgaaccacctccacctccaccaatgcatggagcaggagatgcaaaaccgatacccacctgtatcagttctgctacaggtttgatagaaaatcgccctcagtcaccagctacaggcagaacacctgtgtttgtgagccccactcccccacctcctccaccacctcttccatctgccttgtcaacttcctcattaagagcttcaatgacttcaactcctccccctccagtacctcccccacctccacctccagccactgctttgcaagctccagcagtaccaccacctccagctcctcttcagattgcccctggagttcttcacccagctcctcctccaattgcacctcctctagtacagccctctccaccagtagctagagctgccccagtatgtgagactgtaccagttcatccactcccacaaggtgaagttcaggggctgcctccacccccaccaccgcctcctctgcctccacctggcattcgaccatcatcacctgtcacagttacagctcttgctcatcctccctctgggctacatccaactccatctactgccccaggtccccatgttccattaatgcctccatctcctccatcacaagttatacctgcttctgagccaaagcgccatccatcaaccctacctgtaatcagtgatgccaggagtgtgctactggaagcaatacgaaaaggtattcagctacgcaaagtagaagagcagcgtgaacaggaagctaagcatgaacgcattgaaaacgatgttgccaccatcctgtctcgccgtattgctgttgaatatagtgattcggaagatgattcagaatttgatgaagtagattggttggagtaagaaaaatgcattgataaatattacaaaactgaatgcaaatgtcctttgtggtgcttgttccttgaaaatgtttggtcattctagtgttttgctttcttttccttataataaatgacccttttcctccataacttttgatttctaaggaaaatattagcatacatttcaaactaaatgttttacagtggcttatcttttttttccccctgaaaagactaatttggtcaaataaaccactaagtattaagcatggacagctgttgttagagtagcagattcagttttttgatatatcttaattgtgtactttgtgaattttaatttaaagaaagcaactgaaattgaaatcttgagggcagctgtgtctactaatgagccttattccatttcctgatgttttaaaagaagaaacactgccttgattatacgaatacactcagaaagtacatttagcttgtagtgttgaattctcttaaaggaatgcttgaattttttcattattgttttattgtttttatatacttgccttatttgaatgtttagcagtatccccttcccacttatatattgtgtgatatgattttgcttgcctataggagttaaaaacttttccatgtgaaatactctgacttaaacatacatgtaacttacataactgttaagaataacagtctgatttaataaatggttcattttaaaagtt

SEQ ID NO: 4509 - DNA, 3122 bp, Homo sapiens
  source 1..3122: mol_type = genomic DNA
agcagtgttctcttcgtccccctcccccaaactgaggattgggcaataccacagaacctcaggaaaggggggaagagcgagcttcggccccactaatgggggagtgggcggaggctggatttcccacctcggctgcacctgggcactggaggctgaagaggaaagtgagaatctgaagttttgagacctctgactggccaggaatagctcctggggcggggggcaaggatgggaccataggcggaaagagtctcgcggtcccccctgcttctggcgcgggtccctgcgcccggttgtggagcgtctcgcgcggggagggggcggggggaacggcagctcgcggtgttgttcactcgcgcgtcgagcacacggtgggtccggcggcgggttggcgccccaggcggcgttccctgtggcctggcgcctgggccgctgccctgagcgggttccgccccagagcccgaccctcctgggggctctaggcggagtcccgcgagccgagggggaccggcgaccgctgccgaagcatgaagaaggggtaaggcgtgagcccccaagatttcacgcatgccccctagcttcggtactctgacaccttctcttgcacttgcggatgatgaactggaataacgatgaaagaaagcacatccgatctcaacattcacgtcctgccctataaccgattaattaattgatccccagctagactaggtgaactggcacaaaggttaatctcaagatgccgctagtgaaaagaaacatcgatcctaggcacttgtgccacacagcactgcctagaggcattaagaatgaactggaatgtgtaaccaatatttccttggcaaatataattagacaactaagtagcctaagtaaatatgctgaagatatatttggagaattattcaatgaagcacatagtttttccttcagagtcaactcattgcaagaacgtgtggaccgtttatctgttagtgttacacagcttgatccaaaggaagaagaattgtctttgcaagatataacaatgaggaaagctttccgaagttctacaattcaagaccagcagcttttcgatcgcaagactttgcctattccattacaggagacgtacgatgtttgtgaacagcctccacctctcaatatactcactccttatagagatgatggtaaagaaggtctgaagttttataccaatccttcgtatttctttgatctatggaaagaaaaaatgttgcaagatacagaggataagaggaaggaaaagaggaagcagaagcagaaaaatctagatcgtcctcatgaaccagaaaaagtgccaagagcacctcatgacaggcggcgagaatggcagaagctggcccaaggtccagagctggctgaagatgatgctaatctcttacataagcatattgaagttgctaatggcccagcctctcattttgaaacaagacctcagacatacgtggatcatatggatggatcttactcactttctgccttgccatttagtcagatgagtgagcttctgactagagctgaggaaagggtattagtcagaccacatgaaccacctccacctccaccaatgcatggagcaggagatgcaaaaccgatacccacctgtatcagttctgctacaggtttgatagaaaatcgccctcagtcaccagctacaggcagaacacctgtgtttgtgagccccactcccccacctcctccaccacctcttccatctgccttgtcaacttcctcattaagagcttcaatgacttcaactcctccccctccagtacctcccccacctccacctccagccactgctttgcaagctccagcagtaccaccacctccagctcctcttcagattgcccctggagttcttcacccagctcctcctccaattgcacctcctctagtacagccctctccaccagtagctagagctgccccagtatgtgagactgtaccagttcatccactcccacaaggtgaagttcaggggctgcctccacccccaccaccgcctcctctgcctccacctggcattcgaccatcatcacctgtcacagttacagctcttgctcatcctccctctgggctacatccaactccatctactgccccaggtccccatgttccattaatgcctccatctcctccatcacaagttatacctgcttctgagccaaagcgccatccatcaaccctacctgtaatcagtgatgccaggagtgtgctactggaagcaatacgaaaaggtattcagctacgcaaagtagaagagcagcgtgaacaggaagctaagcatgaacgcattgaaaacgatgttgccaccatcctgtctcgccgtattgctgttgaatatagtgattcggaagatgattcagaatttgatgaagtagattggttggagtaagaaaaatgcattgataaatattacaaaactgaatgcaaatgtcctttgtggtgcttgttccttgaaaatgtttggtcattctagtgttttgctttcttttccttataataaatgacccttttcctccataacttttgatttctaaggaaaatattagcatacatttcaaactaaatgttttacagtggcttatcttttttttccccctgaaaagactaatttggtcaaataaaccactaagtattaagcatggacagctgttgttagagtagcagattcagttttttgatatatcttaattgtgtactttgtgaattttaatttaaagaaagcaactgaaattgaaatcttgagggcagctgtgtctactaatgagccttattccatttcctgatgttttaaaagaagaaacactgccttgattatacgaatacactcagaaagtacatttagcttgtagtgttgaattctcttaaaggaatgcttgaattttttcattattgttttattgtttttatatacttgccttatttgaatgtttagcagtatccccttcccacttatatattgtgtgatatgattttgcttgcctataggagttaaaaacttttccatgtgaaatactctgacttaaacatacatgtaacttacataactgttaagaataacagtctgatttaataaatggttcattttaaaagtt

SEQ ID NO: 4510 - DNA, 3220 bp, Homo sapiens
  source 1..3220: mol_type = genomic DNA
agcagtgttctcttcgtccccctcccccaaactgaggattgggcaataccacagaacctcaggaaaggggggaagagcgagcttcggccccactaatgggggagtgggcggaggctggatttcccacctcggctgcacctgggcactggaggctgaagaggaaagtgagaatctgaagttttgagacctctgactggccaggaatagctcctggggcggggggcaaggatgggaccataggcggaaagagtctcgcggtcccccctgcttctggcgcgggtccctgcgcccggttgtggagcgtctcgcgcggggagggggcggggggaacggcagctcgcggtgttgttcactcgcgcgtcgagcacacggtgggtccggcggcgggttggcgccccaggcggcgttccctgtggcctggcgcctgggccgctgccctgagcgggttccgccccagagcccgaccctcctgggggctctaggcggagtcccgcgagccgagggggaccggcgaccgctgccgaagcatgaagaaggggtaaggcgtgagcccccaagatttcacgcatgccccctagcttcggtactctgacaccttctcttgcacttgcggatgatgaactggaataacgatgaaagaaagcacatccgatctcaacattcacgtcctgccctataaccgattaattaattgatccccagctagactagtgttggagaaatcagcatgttaaaacaactgttgatgatagctgttggagtaaagttgcagtggaagctatggctgcaaaatcgttaaaatcttcaaggtgaactggcacaaaggttaatctcaagatgccgctagtgaaaagaaacatcgatcctaggcacttgtgccacacagcactgcctagaggcattaagaatgaactggaatgtgtaaccaatatttccttggcaaatataattagacaactaagtagcctaagtaaatatgctgaagatatatttggagaattattcaatgaagcacatagtttttccttcagagtcaactcattgcaagaacgtgtggaccgtttatctgttagtgttacacagcttgatccaaaggaagaagaattgtctttgcaagatataacaatgaggaaagctttccgaagttctacaattcaagaccagcagcttttcgatcgcaagactttgcctattccattacaggagacgtacgatgtttgtgaacagcctccacctctcaatatactcactccttatagagatgatggtaaagaaggtctgaagttttataccaatccttcgtatttctttgatctatggaaagaaaaaatgttgcaagatacagaggataagaggaaggaaaagaggaagcagaagcagaaaaatctagatcgtcctcatgaaccagaaaaagtgccaagagcacctcatgacaggcggcgagaatggcagaagctggcccaaggtccagagctggctgaagatgatgctaatctcttacataagcatattgaagttgctaatggcccagcctctcattttgaaacaagacctcagacatacgtggatcatatggatggatcttactcactttctgccttgccatttagtcagatgagtgagcttctgactagagctgaggaaagggtattagtcagaccacatgaaccacctccacctccaccaatgcatggagcaggagatgcaaaaccgatacccacctgtatcagttctgctacaggtttgatagaaaatcgccctcagtcaccagctacaggcagaacacctgtgtttgtgagccccactcccccacctcctccaccacctcttccatctgccttgtcaacttcctcattaagagcttcaatgacttcaactcctccccctccagtacctcccccacctccacctccagccactgctttgcaagctccagcagtaccaccacctccagctcctcttcagattgcccctggagttcttcacccagctcctcctccaattgcacctcctctagtacagccctctccaccagtagctagagctgccccagtatgtgagactgtaccagttcatccactcccacaaggtgaagttcaggggctgcctccacccccaccaccgcctcctctgcctccacctggcattcgaccatcatcacctgtcacagttacagctcttgctcatcctccctctgggctacatccaactccatctactgccccaggtccccatgttccattaatgcctccatctcctccatcacaagttatacctgcttctgagccaaagcgccatccatcaaccctacctgtaatcagtgatgccaggagtgtgctactggaagcaatacgaaaaggtattcagctacgcaaagtagaagagcagcgtgaacaggaagctaagcatgaacgcattgaaaacgatgttgccaccatcctgtctcgccgtattgctgttgaatatagtgattcggaagatgattcagaatttgatgaagtagattggttggagtaagaaaaatgcattgataaatattacaaaactgaatgcaaatgtcctttgtggtgcttgttccttgaaaatgtttggtcattctagtgttttgctttcttttccttataataaatgacccttttcctccataacttttgatttctaaggaaaatattagcatacatttcaaactaaatgttttacagtggcttatcttttttttccccctgaaaagactaatttggtcaaataaaccactaagtattaagcatggacagctgttgttagagtagcagattcagttttttgatatatcttaattgtgtactttgtgaattttaatttaaagaaagcaactgaaattgaaatcttgagggcagctgtgtctactaatgagccttattccatttcctgatgttttaaaagaagaaacactgccttgattatacgaatacactcagaaagtacatttagcttgtagtgttgaattctcttaaaggaatgcttgaattttttcattattgttttattgtttttatatacttgccttatttgaatgtttagcagtatccccttcccacttatatattgtgtgatatgattttgcttgcctataggagttaaaaacttttccatgtgaaatactctgacttaaacatacatgtaacttacataactgttaagaataacagtctgatttaataaatggttcattttaaaagtt

SEQ ID NO: 4511 - DNA, 740 bp, Homo sapiens
  source 1..740: mol_type = genomic DNA
agtgttctcttcgtccccctcccccaaactgaggattgggcaataccacagaacctcaggaaaggggggaagagcgagcttcggccccactaatgggggagtgggcggaggctggatttcccacctcggctgcacctgggcactggaggctgaagaggaaacatgccccctagcttcggtactctgacaccttctcttgcacttgcggatgatgaactggaataacgatgaaagaaagcacatccgatctcaacattcacgtcctgccctataaccgattaattaattgatccccagctagactaggtgttacaatccaaaatacatagttgtgatcatttataagtgttggagaaatcagcatgttaaaacaactgttgatgatagctgttggagtaaagttgcagtggaagctatggctgcaaaatcgttaaaatcttcaaggtgaactggcacaaaggttaatctcaagatgccgctagtgaaaagaaacatcgatcctaggcacttgtgccacacagcactgcctagaggcattaagaatgaactggaatgtgtaaccaatatttccttggcaaatataattagacaactaagtagcctaagtaaatatgctgaagatatatttggagaattattcaatgaagcacatagtttttccttcagagtcaactcattgcaagaacgtgtggaccgtttatctgttagtgttacacagcttgatccaaaggaagaagaat

SEQ ID NO: 4512 - DNA, 898 bp, Homo sapiens
  source 1..898: mol_type = genomic DNA
agctcgcggtgttgttcactcgcgcgtcgagcacacggtgggtccggcggcgggttggcgccccaggcggcgttccctgtggcctggcgcctgggccgctgccctgagcgggttccgccccagagcccgaccctcctgggggctctaggcggagtcccgcgagccgagggggaccggcgaccgctgccgaagcatgaagaaggggtaaggcgtgagcccccaagatttcacgtgttggagaaatcagcatgttaaaacaactgttgatgatagctgttggagtaaagttgcagtggaagctatggctgcaaaatcgttaaaatcttcaaggtgaactggcacaaaggttaatctcaagatgccgctagtgaaaagaaacatcgatcctaggcacttgtgccacacagcactgcctagaggcattaagaatgaactggaatgtgtaaccaatatttccttggcaaatataattagacaactaagtagcctaagtaaatatgctgaagatatatttggagaattattcaatgaagcacatagtttttccttcagagtcaactcattgcaagaacgtgtggaccgtttatctgttagtgttacacagcttgatccaaaggaagaagaattgtctttgcaagatataacaatgaggaaagctttccgaagttctacaattcaagaccagcagcttttcgatcgcaagactttgcctattccattacaggagacgtacgatgtttgtgaacagcctccacctctcaatatactcactccttatagagatgatggtaaagaaggtctgaagttttataccaatccttcgtatttctttgatctatggaaagaaaaaatgttgcaagatacagaggataagaggaaggaaaagaggaagcagaag

SEQ ID NO: 4513 - DNA, 652 bp, Homo sapiens
  source 1..652: mol_type = genomic DNA
gcgcgtcgagcacacggtgggtccggcggcgggttggcgccccaggcggcgttccctgtggcctggcgcctgggccgctgccctgagcgggttccgccccagagcccgaccctcctgggggctctaggcggagtcccgcgagccgagggggaccggcgaccgctgccgaagcatgaagaaggggtaaggcgtgagcccccaagatttcacgcatgccccctagcttcggtactctgacaccttctcttgcacttgcggatgatgaactggaataacgatgaaagaaagcacatccgatctcaacattcacgtcctgccctataaccgattaattaattgatccccagctagactaggtgaactggcacaaaggttaatctcaagatgccgctagtgaaaagaaacatcgatcctaggcacttgtgccacacagcactgcctagaggcattaagaatgaactggaatgtgtaaccaatatttccttggcaaatataattagacaactaagtagcctaagtaaatatgctgaagatatatttggagaattattcaatgaagcacatagtttttccttcagagtcaactcattgcaagaacgtgtggaccgtttatctgttagtgttacacagcttgatccaaaggaagaagaat

SEQ ID NO: 4514 - DNA, 5666 bp, Homo sapiens
  source 1..5666: mol_type = genomic DNA
ggggaatcgcgtaatggcggacacaggcagggcgagcgcggctgggggcgtagcgcgctgagggggtccggccgtttggcagcccgcgaggcggtccgcgggagcacactctgtgcggagactgggcggccggccgacccttcctgtcgctgacggcgactgcgggaggccaggttgtttttcaccattcagaacattgcctgaagcaggtccaccatgccgttagtaacgaggaacatcgagccaaggcacctgtgccgtcagacgttgcctagcgttagaagcgagctggaatgcgtgaccaacatcaccctggcaaatgtcatccgacagctgggcagcctgagtaaatatgcagaggacatttttggagagctctttactcaggcaaatacctttgcctctcgggtaagctcccttgctgagagggtcgaccgactacaggttaaagtcactcagctggatcccaaggaagaagaagtgtcactgcaaggaatcaacacccgaaaagccttcagaagttccaccattcaagaccagaagctttttgacagaaactctctcccagtgcctgtcttagaaacatacaatacctgtgatactcctccccctctcaacaatcttaccccttacagggacgatggaaaagaggcactcaaattctacacagacccttcatacttctttgatctttggaaggagaagatgctgcaggacaccaaggatatcatgaaagagaagagaaagcataggaaagaaaagaaagataatccaaatcgagggaatgtaaacccacgtaaaatcaagacacgtaaggaagagtgggagaaaatgaagatggggcaagaatttgtggagtccaaagaaaagctggggacttctgggtatccacccactttggtgtaccagaatggcagcattggctgtgttgaaaacgtggatgcaagtagctatccgccaccaccacagtcagactctgcttcttcaccttctccttccttctccgaggacaacttgcctcctccaccagcagaattcagttacccagtggacaaccaaagaggatctggtttggctggacccaaaagatccagtgtggtcagcccaagccatccaccaccagctcctcctctaggctctccaccaggccctaaacccgggtttgctccaccacctgcccctccgccacctccgcctccaatgataggcatcccacctccaccaccgcctgtaggatttgggtctccagggacgcctccaccaccctcacccccatctttcccacctcaccctgattttgctgcccctccacctcctcctccaccaccagcagctgactacccaactctgccaccacctcccttgtcccagccaacaggaggagcacctcctcctccccctcctcctcctcctccggggccccctcctccccctttcactggtgcagatggccagcctgctataccaccaccgctttctgataccaccaagcccaagtcctccttgcctgccgtgagcgatgcccgtagcgacctgctttcagccatccgtcaaggttttcagctgcgcagggttgaggagcagcgggaacaagagaagcgggatgttgtgggcaatgacgtggccaccatcttgtctcgtcgcattgctgttgagtacagtgactcagaagatgactcctctgaatttgatgaggacgactggtccgattaactctttctgcctgctgcccaccttctttttctttccttcctacctgccttctttgatgccaaccccaacagacccgtagggggagaaaagggaggaaaaaagtaattttaaggggccaaagctttccctgaagcaaccaaagatatatccaagtgcttcctccaagtcaacatgtatttcctctccccattttcaggccctgtggggctcctgaggttcagtagctgggatgttccctctttccttcaagtgcctgttgcatattgaaaggaaggagaaatcccaaagcagattcctttgatcgggtttctgttggagatggggcttcccttaggagccatattcaactacagccttctaaaacctgtgccctcagccacttcgaatgccagccaccttctggttctaaaacggggagtggtctgaatgaacacagctgacccctttcccgcgcactgaaagggcagagtaggccgaagggtccaagggccagactgcctcaccctctgccctaatcagcagggtgggcctgccttttgctaagcgatctctatgcctgggatgccctttattccaggaggcatcaagcctctaaagaatgtctcacctcctctgcccaaaaatgatgcctttctgtaggctggtgttgttgcctccctcccaggatccctttggtgagtatggtgttcaggatgcaccaccaccacctctagataccttcaggcaacacagcccagttttaacctctagtatccatgaccaaactatccctgacacatgaggacaggggcctcttctggctgtcaggagcaaagcctgaagacttggagctgcaggactggaagaacagtggagccccgtgggtctcaccctttaaggatgctgaggcctagagatgggaagtgacttgctcaaggtcacacaattggatagtgacatagctagagcgcagagttcctgattccaagtcacctgtgctttctgggaccaaagaatgggcacctgctggagtccgggcagagctttctcagttgtattgctactccagacctcaccataggttggggtcccagtaggaaggctcagggtctgtgccagccctgtcggtgctgctcagaccttcatagcctctcttgtcattctttgttgccccttttctgtcaccagccaaccacatagccttgggaccagcctctctgggggaccagaagtagtgagagaaggaaggggataggcagctttgacaggtgctgctttcaattcctctgcaactcctcccccttttatttccccaatttaaacaaagattctgccaactgtggaaacttcagtccctcaggctggcagccatgccagtacctgcctgggggtggggggtgcctggcagccatgaagcaggctgaaaggcagaggggctccaggtcctgtttccagctcccctcactgcacatggtgaagctcgctccctccctccctcccttcccgcttttcccagagctaatacacaggtgctattattcagaaaaaaactggtcagctctagccaacagtgaggtttcttttcttctgccctaactattgtgtagcctcttatgctgaaatcggcttctgctggcttctccggctttcagagccctgaaacaaagagaaacaggatctgtccctacccagcacagcaaatggttgtagtaattgccaaagccctcataaagccctccggcttgaggagagagtgtatagtcatgggttctgcctctgtgcccttgctggccgcttctcctctgccttctttcctggaactcagggtgtggggactgagcctgtaggggacagcatgccgtcttgctgtggccactcccaagtgtgccctcttccctctttacacatcaggtgtctctggcacaggacttggcactaagctccatgctgagacaccaggctatgtgggcccccaccttgtttcccagcctgcaccttagaagccgaaggtgctttcatcagaaccctaaaatggtcgttgaaggcgcctgggccgcagcccagcagtagttggagaggcaggcagagggcagtggttctcccaaataggagacctggggcctggccaggccagggtttgggcctaatggctttgactaaattacccccatcctccttgcccggaaaagggagagctagagccactcactgtcattctgctctgaccttgaagggggcggtgttggcctggcttctggaatggactgagtccatcgtggaaagggctgggggcaggaggaggtggggaggggcactgcctgcggaaggtaggattagatcattagctcagtgacctcctagggtttcgatgtgctatgttctcatcctacagttggtttggtaatgatctgcaagtcccggagagcaacagcacagctctgcctgacgctctcattaaaatctatgcagccaagctcggcactttgtagcagccggccttgcgaagcctcctcagctcggggggccggggacccagtgagccgagaggccctctgggctccacttatgcatatgcaccaaaaaaaaaaaaaaaaaaaaaaggcttctttagacccagagccctttaagatgataaaggacccaatgcaggtaatcctgtttttggactcacgtaatgtagaatgcaaagtttagtgattatttaatctgggcctaagctagtgagagtatggaacaatggcccataaggactcctaagcgccgaagccaaggagcctcctcccttcctggttcaccccgcccaagggacctgcccccattcctgtggccctggggcccagcttccaatagtgtcagaagcaacttgtggctttgccttggttgtgagatgggtacattccaaaggagcagcctgggggagggggcaggctcagccagcccttggaggctcagagcagctggcccaggctccagctcgcctccagtggaagcccgagcgccctcagaaacgaccctggccaatgtcaacgcagagccgaggcggtgttgtcacggctaatgtgaaatctcttcccgtggcgcccatcctctgactctgcagtgccagcttggacagattgaggtctctgtggctttggtgaccctgcttaagcattcccaccgtgtcccagctctgctctaggactgcctcccactgcggcccctcacctgacttcagggtatggggagggagggagccagtgctccaaggccagggggctttgctcatgagagatgtcaggcttcctggaggcatcaggctttgagccctgctggggtccaactgacctgggaccaggtgtcgcgcagagatgtgcctcattctgtgcctccttctgtgcctcctaccatgttccctttaactgtgcctcagtgtgggttagggaacaattttgttattgtattaagtttattcagttaattcacttgaggaactaaccagtttttactttctgtctagaatgatgtacatgtagtagagtaagccataatgctcccaaagtgccttgttttctctgatacaaacatatttataaggacatattcctgtgggttcttgggtgtgtttgccacatcaagattttagggaaggggggtatatgtgtagtagggatgccgtttgaaaacaggcactcttcccctgaggatgggaaaggagctcttcagttggagatctaggcagtgggttaagccagacccctaaagtgaccctttcctcttctgccctattcttctcagaccctcagaaagacatccaatttttttaaatccctgtagctccaagcctggtctcatttgcttccctgccaggctcatcgtgtgtataccacatttgtgccccactgacctgaaggttccatgtaactgtatacacatgaatacttaaatgccaacatttaaaataatttgataaagtctttgtagccactcagcca

SEQ ID NO: 4515 - DNA, 1083 bp, Homo sapiens
  source 1..1083: mol_type = genomic DNA
actctgtgcggagactgggcggccggccgacccttcctgtcgctgacggcgactgcgggaggccaggttgtttttcaccattcagaacattgcctgaagcaggtccaccatgccgttagtaacgaggaacatcgagccaaggcacctgtgccgtcagacgttgcctagcgttagaagcgagctggaatgcgtgaccaacatcaccctggcaaatgtcatccgacagctgggcagcctgagtaaatatgcagaggacatttttggagagctctttactcaggcaaatacctttgcctctcgggtaagctcccttgctgagagggtcgaccgactacaggttaaagtcactcagctggatcccaaggaagaagaagtgtcactgcaaggaatcaacacccgaaaagccttcagaagttccaccattcaagaccagaagctttttgacagaaactctctcccagtgcctgtcttagaaacatacaatacctgtgatactcctccccctctcaacaatcttaccccttacagggacgatggaaaagaggcactcaaattctacacagacccttcatacttctttgatctttggaaggagaagatgctgcaggacaccaaggatatcatgaaagagaagagaaagcataggaaagaaaagaaagataatccaaatcgagggaatgtaaacccacgtaaaatcaagacacgtaaggaagagtgggagaaaatgaagatggggcaagaatttgtggagtccaaagaaaagctggggacttctgggtatccacccactttggtgtaccagaatggcagcattggctgtgttgaaaacgtggatgcaagtagctatccgccaccaccacagtcagactctgcttcttcaccttctccttccttctccgaggacaacttgcctcctccaccagcagaattcaggttttcagctgcgcagggttgaggagcagcgggaacaagagaagcgggatgttgtgggcaatgacgtggccaccatcttgtctcgtcgcattgctgttgagtacagtgactcagaagatgactcctctgaatttgatgaggacgactggt

SEQ ID NO: 4516 - DNA, 3028 bp, Homo sapiens
  source 1..3028: mol_type = genomic DNA
gcagcctcccggcgctgagcgcttttcctgcccgcccggctcagccctgcggaccccgggagaagtttcccagaaaaaatgcccagcgcggcgcggggctgcggagtcgtccggagccgctgcgcgatttatcagcaagactgttgaacgcataactgcccaagatgcctgtccctccccctccagcacccccgccgcccccgacgtttgcactggccaatacagagaagcctaccttgaataagacagagcaggctgggagaaatgctctcctttctgatatcagcaaagggaagaaactaaagaagacggtcaccaatgacagaagtgcaccaatactggacaaacctaaaggagctggtgctggaggcggtggtggtggctttggtggaggcggcggatttggcggaggaggtggtggcggaggcggtggaagttttggagggggcggacctccaggtctgggaggattgttccaggctggaatgccgaagctgagatccacggccaacagggataatgattctggaggaagccgaccaccattgttgccaccgggaggaagatccacatctgcgaaacccttttcacccccaagtggcccagggaggtttcctgtgccttctccaggccacagaagtggtcccccagagcctcagaggaaccgaatgccgcccccaaggcccgacgtgggctcaaagcctgatagcattcctcctccagtacctagtactccaagacccattcaatcaagtccgcacaaccgggggtccccaccagtgcccggaggccccaggcagcccagccccgggcccactcctccccctttccctggaaaccgcggcactgctttgggaggaggctcaatacgtcagtcccccttgagctcctcctcgcccttctccaaccggcctcccctgccgcctacccccagcagggccttggatgacaaaccccctccaccacctcctccagtgggcaacaggccctccatccacagggaagcggttccccctcctcctcctcagaacaacaagcctccagtgccttccactccgcggccttcggcctcctcacaggccccacctccgccgccacctcccagcaggcccgggccgcctcctctgcctccaagttccagcggcaatgacgaaaccccaagactcccacagcggaatctgtccctcagttcgtccacgcccccgttaccttcgccaggacgttcaggtcctcttcctcccccgcccagtgagagacccccacctccagtgagggacccgccaggccgatcaggccccctcccaccacctcctccagtaagcagaaacggcagcacatctcgggccctgcctgctacccctcagttgccatccaggagtggagtagacagtcccaggagtggacccaggcctccccttcctcctgataggcccagtgctggggcacctcccccacctccaccatcaacatctattagaaatggcttccaagactctccatgtgaagatgagtgggaaagcagattctacttccatccgatttccgatttgccacctccagagccatatgtacaaacgaccaaaagttatcccagcaaactggcaagaaacgaaagccggagtggatccaaccgaagagaaaggggtgctccaccactccctcccatcccgagaccacctaagcaagctgctgagtaagggctcactggaaacttgcagtcacaggatgtccaatctttggcagtccgagcttggctctaggacagagctgtccaatagaaatataatgtgagccccatatacaatttttacatttctaatatattttaaacaagtgaagttaatatgcatccaaaatatttcaacctgtaatcaacataaaattttaatgagatattttatattattttttggtactgaatcttcaaaatccagagtgtattttacacttaccgcacatctccattcagactagtcacatttttaagtgctcagtagccacatgtggctggtggctactggattagacagcacgagtctggaagatggaagctagtgcagaaacctcttgtttaaaaaacaaaaaaggcaagatgggcttgagcgattcaagaggcaactaaaaataaaattaggacccagcaccttgtttgacacacagtttgaccttcgattttcctcccttaacttccctcttcccttaatatctgtatacaagtgttgcttcaaagtaccaaggtcagaaattgattgagtacggtttactaaagtcatgtggaataaagccattggaaacaaatggaaagcctgtcgggacttctgggctcagaaccagctggctcacgcactccacttgtcagctggacttctgccttgtgaaatggaagcagcctttgttcctttctggctgagcaagctcctgaggctgggagagactaggaaggcttggtaggaggggaaaaaagtcaggaaaatatatcaaatcagaaacatggaagaagaagggaaccgatttgagttggtgggcaaaactctaaaaatctaaatctgatgcttatgtaagggttgagcgaattagggagattgctagtggaaattggagggaatttgttttgcatcatttgtctaggatctatgcaaatatagctccactaaaggaccatagggaagagccagccttgccttttcttatatgattttgtttacaaaattttactgggacttttaaatctagctatagagttgggaaaaaatatttccacttagatattttacatggttttgtttaaaattaccattacttgttttttaaaaacacatgaccacatatgtatatgtatatctacctaaacattgtatcatggtttcagtatgttattcatgtattactgggagatgctaccaagaaaccaacccaaagaaaattctgaaaaatacatttctatttatagaataaatgtttcatttatataaaagcaaaagaacttagagttctaataaatgggatgtctaataaattatgaagttac

SEQ ID NO: 4517 - DNA, 2003 bp, Homo sapiens
  source 1..2003: mol_type = genomic DNA
gagcgcttttcctgcccgcccggctcagccctgcggaccccgggagaagtttcccagaaaaaatgcccagcgcggcgcggggctgcggagtcgtccggagccgctgcgcgatttatcagcaagactgttgaacgcataactgcccaagatgcctgtccctccccctccagcacccccgccgcccccgacgtttgcactggccaatacagagaagcctaccttgaataagacagagcaggctgggagaaatgctctcctttctgatatcagcaaagggaagaaactaaagaagacggtcaccaatgacagaagtgcaccaatactggacaaacctaaaggagctggtgctggaggcggtggtggtggctttggtggaggcggcggatttggcggaggaggtggtggcggaggcggtggaagttttggagggggcggacctccaggtctgggaggattgttccaggctggaatgccgaagctgagatccacggccaacagggataatgattctggaggaagccgaccaccattgttgccaccgggaggaagatccacatctgcgaaacccttttcacccccaagtggcccagggaggtttcctgtgccttctccaggccacagaagtggtcccccagagcctcagaggaaccgaatgccgcccccaaggcccgacgtgggctcaaagcctgatagcattcctcctccagtacctagtactccaagacccattcaatcaagtccgcacaaccgggggtccccaccagtgcccggaggccccaggcagcccagccccgggcccactcctccccctttccctggaaaccgcggcactgctttgggaggaggctcaatacgtcagtcccccttgagctcctcctcgcccttctccaaccggcctcccctgccgcctacccccagcagggccttggatgacaaaccccctccaccacctcctccagtgggcaacaggccctccatccacagggaagcggttccccctcctcctcctcagaacaacaagcctccagtgccttccactccgcggccttcggcctcctcacaggccccacctccgccgccacctcccagcaggcccgggccgcctcctctgcctccaagttccagcggcaatgacgaaaccccaagactcccacagcggaatctgtccctcagttcgtccacgcccccgttaccttcgccaggacgttcaggtcctcttcctcccccgcccagtgagagacccccacctccagtgagggacccgccaggccgatcaggccccctcccaccacctcctccagtaagcagaaacggcagcacatctcgggccctgcctgctacccctcagttgccatccaggagtggagtagacagtcccaggagtggacccaggcctccccttcctcctgataggcccagtgctggggcacctcccccacctccaccatcaacatctattagaaatggcttccaagactctccatgtgaagatgagtgggaaagcagattctacttccatccgatttccgatttgccacctccagagccatatgtacaaacgaccaaaagttatcccagcaaactggcaagaaacgaaagccggagtggatccaaccgaagagaaaggggtgctccaccactccctcccatcccgaggtgatctttgcctgctcttctctacccaagctcaagagctgcttctgttgctatctaagaactgcataccctcctccctgcttcttcccttgtgcctcatgtatgggcaggaggaaaggtgggagggggagtgggaatatgcgtgtgtgggtgggaatcggtaagaaatgcacctagcttttcatattgtgtttattctccaggctattgcttgcttcagctgcagcctgcctgtgctggctgctggggtcgataggcttttgtcgtaataggcagagatgacttgcatcccagctttccaccaaccaaattcaaacattcactgcttatttgttacagactgtaat

SEQ ID NO: 4518 - DNA, 2180 bp, Homo sapiens
  source 1..2180: mol_type = genomic DNA
gaagaagcccttagcctaatgaagcgataaggtaagcaaaggaggaaggaacaacaaacaacaaattaatcagacaggaagcgaataaccacagaaggacgtctgcctctgactcagtatgtcacatttaacaagaggccagagcttgtccaaaatggctgtccaaaaacgaccccacacttgcgttagaagatgatacctttttcagggacagttttctctcttggctcctgtcccgctggccctctgtctgcctgtgtccctgaccatggctccctgcagtaccctttaacgatttatcagcaagactgttgaacgcataactgcccaagatgcctgtccctccccctccagcacccccgccgcccccgacgtttgcactggccaatacagagaagcctaccttgaataagacagagcaggctgggagaaatgctctcctttctgatatcagcaaagggaagaaactaaagaagacggtcaccaatgacagaagtgcaccaatactggacaaacctaaaggagctggtgctggaggcggtggtggtggctttggtggaggcggcggatttggcggaggaggtggtggcggaggcggtggaagttttggagggggcggacctccaggtctgggaggattgttccaggctggaatgccgaagctgagatccacggccaacagggataatgattctggaggaagccgaccaccattgttgccaccgggaggaagatccacatctgcgaaacccttttcacccccaagtggcccagggaggtttcctgtgccttctccaggccacagaagtggtcccccagagcctcagaggaaccgaatgccgcccccaaggcccgacgtgggctcaaagcctgatagcattcctcctccagtacctagtactccaagacccattcaatcaagtccgcacaaccgggggtccccaccagtgcccggaggccccaggcagcccagccccgggcccactcctccccctttccctggaaaccgcggcactgctttgggaggaggctcaatacgtcagtcccccttgagctcctcctcgcccttctccaaccggcctcccctgccgcctacccccagcagggccttggatgacaaaccccctccaccacctcctccagtgggcaacaggccctccatccacagggaagcggttccccctcctcctcctcagaacaacaagcctccagtgccttccactccgcggccttcggcctcctcacaggccccacctccgccgccacctcccagcaggcccgggccgcctcctctgcctccaagttccagcggcaatgacgaaaccccaagactcccacagcggaatctgtccctcagttcgtccacgcccccgttaccttcgccaggacgttcaggtcctcttcctcccccgcccagtgagagacccccacctccagtgagggacccgccaggccgatcaggccccctcccaccacctcctccagtaagcagaaacggcagcacatctcgggccctgcctgctacccctcagttgccatccaggagtggagtagacagtcccaggagtggacccaggcctccccttcctcctgataggcccagtgctggggcacctcccccacctccaccatcaacatctattagaaatggcttccaagactctccatgtgaagatgagtgggaaagcagattctacttccatccgatttccgatttgccacctccagagccatatgtacaaacgaccaaaagttatcccagcaaactggcaagaaacgaaagccggagtggatccaaccgaagagaaaggggtgctccaccactccctcccatcccgaggtgatctttgcctgctcttctctacccaagctcaagagctgcttctgttgctatctaagaactgcataccctcctccctgcttcttcccttgtgcctcatgtatgggcaggaggaaaggtgggagggggagtgggaatatgcgtgtgtgggtgggaatcggtaagaaatgcacctagcttttcatattgtgtttattctccaggctattgcttgcttcagctgcagcctgcctgtgctggctgctggggtcgataggcttttgtcgtaataggcagagatgacttgcatcccagctttccaccaaccaaattcaaacattcactgcttatttgttacaga

SEQ ID NO: 4519 - DNA, 4587 bp, Homo sapiens
  source 1..4587: mol_type = genomic DNA
ggctagaagacagcaggggaactcgagaagttggttgttttcagcagattaaaacaatacagatttatcagcaagactgttgaacgcataactgcccaagatgcctgtccctccccctccagcacccccgccgcccccgacgtttgcactggccaatacagagaagcctaccttgaataagacagagcaggctgggagaaatgctctcctttctgatatcagcaaagggaagaaactaaagaagacggtcaccaatgacagaagtgcaccaatactggacaaacctaaaggagctggtgctggaggcggtggtggtggctttggtggaggcggcggatttggcggaggaggtggtggcggaggcggtggaagttttggagggggcggacctccaggtctgggaggattgttccaggctggaatgccgaagctgagatccacggccaacagggataatgattctggaggaagccgaccaccattgttgccaccgggaggaagatccacatctgcgaaacccttttcacccccaagtggcccagggaggtttcctgtgccttctccaggccacagaagtggtcccccagagcctcagaggaaccgaatgccgcccccaaggcccgacgtgggctcaaagcctgatagcattcctcctccagtacctagtactccaagacccattcaatcaagtccgcacaaccgggggtccccaccagtgcccggaggccccaggcagcccagccccgggcccactcctccccctttccctggaaaccgcggcactgctttgggaggaggctcaatacgtcagtcccccttgagctcctcctcgcccttctccaaccggcctcccctgccgcctacccccagcagggccttggatgacaaaccccctccaccacctcctccagtgggcaacaggccctccatccacagggaagcggttccccctcctcctcctcagaacaacaagcctccagtgccttccactccgcggccttcggcctcctcacaggccccacctccgccgccacctcccagcaggcccgggccgcctcctctgcctccaagttccagcggcaatgacgaaaccccaagactcccacagcggaatctgtccctcagttcgtccacgcccccgttaccttcgccaggacgttcaggtcctcttcctcccccgcccagtgagagacccccacctccagtgagggacccgccaggccgatcaggccccctcccaccacctcctccagtaagcagaaacggcagcacatctcgggccctgcctgctacccctcagttgccatccaggagtggagtagacagtcccaggagtggacccaggcctccccttcctcctgataggcccagtgctggggcacctcccccacctccaccatcaacatctattagaaatggcttccaagactctccatgtgaagatgagtgggaaagcagattctacttccatccgatttccgatttgccacctccagagccatatgtacaaacgaccaaaagttatcccagcaaactggcaagaaacgaaagccggagtggatccaaccgaagagaaaggggtgctccaccactccctcccatcccgaggtgatctttgcctgctcttctctacccaagctcaagagctgcttctgttgctatctaagaactgcataccctcctccctgcttcttcccttgtgcctcatgtatgggcaggaggaaaggtgggagggggagtgggaatatgcgtgtgtgggtgggaatcggtaagaaatgcacctagcttttcatattgtgtttattctccaggctattgcttgcttcagctgcagcctgcctgtgctggctgctggggtcgataggcttttgtcgtaataggcagagatgacttgcatcccagctttccaccaaccaaattcaaacattcactgcttatttgttacagactgtaattattaaagtccctgagagctgttttctcccgttcctttttcgcatgcttggcctcctctctgtttctatgaaccacagaccacctaagcaagctgctgagtaagggctcactggaaacttgcagtcacaggatgtccaatctttggcagtccgagcttggctctaggacagagctgtccaatagaaatataatgtgagccccatatacaatttttacatttctaatatattttaaacaagtgaagttaatatgcatccaaaatatttcaacctgtaatcaacataaaattttaatgagatattttatattattttttggtactgaatcttcaaaatccagagtgtattttacacttaccgcacatctccattcagactagtcacatttttaagtgctcagtagccacatgtggctggtggctactggattagacagcacgagtctggaagatggaagctagtgcagaaacctcttgtttaaaaaacaaaaaaggcaagatgggcttgagcgattcaagaggcaactaaaaataaaattaggacccagcaccttgtttgacacacagtttgaccttcgattttcctcccttaacttccctcttcccttaatatctgtatacaagtgttgcttcaaagtaccaaggtcagaaattgattgagtacggtttactaaagtcatgtggaataaagccattggaaacaaatggaaagcctgtcgggacttctgggctcagaaccagctggctcacgcactccacttgtcagctggacttctgccttgtgaaatggaagcagcctttgttcctttctggctgagcaagctcctgaggctgggagagactaggaaggcttggtaggaggggaaaaaagtcaggaaaatatatcaaatcagaaacatggaagaagaagggaaccgatttgagttggtgggcaaaactctaaaaatctaaatctgatgcttatgtaagggttgagcgaattagggagattgctagtggaaattggagggaatttgttttgcatcatttgtctaggatctatgcaaatatagctccactaaaggaccatagggaagagccagccttgccttttcttatatgattttgtttacaaaattttactgggacttttaaatctagctatagagttgggaaaaaatatttccacttagatattttacatggttttgtttaaaattaccattacttgttttttaaaaacacatgaccacatatgtatatgtatatctacctaaacattgtatcatggtttcagtatgttattcatgtattactgggagatgctaccaagaaaccaacccaaagaaaattctgaaaaatacatttctatttatagaataaatgtttcatttatataaaagcaaaagaacttagagttctaataaatgggatgtctaataaattatgaagttactgatttgaatatattatatttctataacttccttgccaaagtcctgatttagtacattagagaacctgtgtttcctctctcctctaccattcatctctcttccatacagtcatttgggctttttactcaaagagaatcaagaaataataaggtataacaagcttggcaaagtgttggctttttaaaaaaaaatttttttaatctctagcagtttggtaatttagcagcatcatttatttgggattcttttatctgatttcaacagtgaaaaacatccctatgataaagcctaatgacccatttcacaaaagatggaatttgcccttcctagaaaatatgacggagaaaagtctgactcagagaaagtgggtctgaattttataaggggtagtaagaattggacaattcctttgcatatctgaacttggcaggtaccgttctaaatctgaaacagggtgatagctcaaagttgccattcatccagaatagattgttttagaatgtagtgtttaagtgactgtttcattaatacacctacaccctttctttgaaagtttgcaacctaattgcatctaaaactatgaataagttctgtggtaaaatcttaaactatggaaaattacaaaaatgaatttttcttccctgaaatcagagcttacatgtgtgtttttttataacattttcagataaatgtattcaacatgtaatacagtattttaacattcacctcttattttatattgaaatgtattacagtattaaaactcagtgttcagtatttatttcactatgcattttatttagtaaaagccaggagaaatgtttaatccaatggtgccttactttgtgatttaaaagaaatcaacttttttttatgtctaagtagtagattatttgcatatttgtaaaaactgttaggtctttatattttaaagtgtaataccagttttgttattttagtagcagaaatgggatgattgttaaagttccccaaaaatgttggcatgaaattaatttttccctccttatagtcaaggaccgtagaggaagaaaaacttttttttcataccatgcactatgtaaacagacacattttgctatctgtgtcatcaggatagtgtaagtggtagggtagagactaccctagacatctgcatctttgtaagttagccagacaataaagaaaagcagaatgata

SEQ ID NO: 4520 - DNA, 4216 bp, Homo sapiens
  source 1..4216: mol_type = genomic DNA
gcagcctcccggcgctgagcgcttttcctgcccgcccggctcagccctgcggaccccgggagaagtttcccagaaaaaatgcccagcgcggcgcggggctgcggagtcgtccggagccgctgcgcgatttatcagcaagactgttgaacgcataactgcccaagatgcctgtccctccccctccagcacccccgccgcccccgacgtttgcactggccaatacagagaagcctaccttgaataagacagagcaggctgggagaaatgctctcctttctgatatcagcaaagggaagaaactaaagaagacggtcaccaatgacagaagtgcaccaatactggacaaacctaaaggagctggtgctggaggcggtggtggtggctttggtggaggcggcggatttggcggaggaggtggtggcggaggcggtggaagttttggagggggcggacctccaggtctgggaggattgttccaggctggaatgccgaagctgagatccacggccaacagggataatgattctggaggaagccgaccaccattgttgccaccgggaggaagatccacatctgcgaaacccttttcacccccaagtggcccagggaggtttcctgtgccttctccaggccacagaagtggtcccccagagcctcagaggaaccgaatgccgcccccaaggcccgacgtgggctcaaagcctgatagcattcctcctccagtacctagtactccaagacccattcaatcaagtccgcacaaccgggggtccccaccagtgcccggaggccccaggcagcccagccccgggcccactcctccccccccacctccagtgagggacccgccaggccgatcaggccccctcccaccacctcctccagtaagcagaaacggcagcacatctcgggccctgcctgctacccctcagttgccatccaggagtggagtagacagtcccaggagtggacccaggcctccccttcctcctgataggcccagtgctggggcacctcccccacctccaccatcaacatctattagaaatggcttccaagactctccatgtgaagatgagtgggaaagcagattctacttccatccgatttccgatttgccacctccagagccatatgtacaaacgaccaaaagttatcccagcaaactggcaagaaacgaaagccggagtggatccaaccgaagagaaaggggtgctccaccactccctcccatcccgaggtgatctttgcctgctcttctctacccaagctcaagagctgcttctgttgctatctaagaactgcataccctcctccctgcttcttcccttgtgcctcatgtatgggcaggaggaaaggtgggagggggagtgggaatatgcgtgtgtgggtgggaatcggtaagaaatgcacctagcttttcatattgtgtttattctccaggctattgcttgcttcagctgcagcctgcctgtgctggctgctggggtcgataggcttttgtcgtaataggcagagatgacttgcatcccagctttccaccaaccaaattcaaacattcactgcttatttgttacagactgtaattattaaagtccctgagagctgttttctcccgttcctttttcgcatgcttggcctcctctctgtttctatgaaccacagaccacctaagcaagctgctgagtaagggctcactggaaacttgcagtcacaggatgtccaatctttggcagtccgagcttggctctaggacagagctgtccaatagaaatataatgtgagccccatatacaatttttacatttctaatatattttaaacaagtgaagttaatatgcatccaaaatatttcaacctgtaatcaacataaaattttaatgagatattttatattattttttggtactgaatcttcaaaatccagagtgtattttacacttaccgcacatctccattcagactagtcacatttttaagtgctcagtagccacatgtggctggtggctactggattagacagcacgagtctggaagatggaagctagtgcagaaacctcttgtttaaaaaacaaaaaaggcaagatgggcttgagcgattcaagaggcaactaaaaataaaattaggacccagcaccttgtttgacacacagtttgaccttcgattttcctcccttaacttccctcttcccttaatatctgtatacaagtgttgcttcaaagtaccaaggtcagaaattgattgagtacggtttactaaagtcatgtggaataaagccattggaaacaaatggaaagcctgtcgggacttctgggctcagaaccagctggctcacgcactccacttgtcagctggacttctgccttgtgaaatggaagcagcctttgttcctttctggctgagcaagctcctgaggctgggagagactaggaaggcttggtaggaggggaaaaaagtcaggaaaatatatcaaatcagaaacatggaagaagaagggaaccgatttgagttggtgggcaaaactctaaaaatctaaatctgatgcttatgtaagggttgagcgaattagggagattgctagtggaaattggagggaatttgttttgcatcatttgtctaggatctatgcaaatatagctccactaaaggaccatagggaagagccagccttgccttttcttatatgattttgtttacaaaattttactgggacttttaaatctagctatagagttgggaaaaaatatttccacttagatattttacatggttttgtttaaaattaccattacttgttttttaaaaacacatgaccacatatgtatatgtatatctacctaaacattgtatcatggtttcagtatgttattcatgtattactgggagatgctaccaagaaaccaacccaaagaaaattctgaaaaatacatttctatttatagaataaatgtttcatttatataaaagcaaaagaacttagagttctaataaatgggatgtctaataaattatgaagttactgatttgaatatattatatttctataacttccttgccaaagtcctgatttagtacattagagaacctgtgtttcctctctcctctaccattcatctctcttccatacagtcatttgggctttttactcaaagagaatcaagaaataataaggtataacaagcttggcaaagtgttggctttttaaaaaaaaatttttttaatctctagcagtttggtaatttagcagcatcatttatttgggattcttttatctgatttcaacagtgaaaaacatccctatgataaagcctaatgacccatttcacaaaagatggaatttgcccttcctagaaaatatgacggagaaaagtctgactcagagaaagtgggtctgaattttataaggggtagtaagaattggacaattcctttgcatatctgaacttggcaggtaccgttctaaatctgaaacagggtgatagctcaaagttgccattcatccagaatagattgttttagaatgtagtgtttaagtgactgtttcattaatacacctacaccctttctttgaaagtttgcaacctaattgcatctaaaactatgaataagttctgtggtaaaatcttaaactatggaaaattacaaaaatgaatttttcttccctgaaatcagagcttacatgtgtgtttttttataacattttcagataaatgtattcaacatgtaatacagtattttaacattcacctcttattttatattgaaatgtattacagtattaaaactcagtgttcagtatttatttcactatgcattttatttagtaaaagccaggagaaatgtttaatccaatggtgccttactttgtgatttaaaagaaatcaacttttttttatgtctaagtagtagattatttgcatatttgtaaaaactgttaggtctttatattttaaagtgtaataccagttttgttattttagtagcagaaatgggatgattgttaaagttccccaaaaatgttggcatgaaattaatttttccctccttatagtcaaggaccgtagaggaagaaaaacttttttttcataccatgcactatgtaaacagacacattttgctatctgtgtcatcaggatagtgtaagtggtagggtagagactaccctagacatctgcatctttgtaagttagccagacaataaagaaaagcagaatg

SEQ ID NO: 4521 - DNA, 2568 bp, Homo sapiens
  source 1..2568: mol_type = genomic DNA
aacaagaggccagagcttgtccaaaatggctgtccaaaaacgaccccacacttgcgttagaagatgatacctttttcagggacagttttctctcttggctcctgtcccgctggccctctgtctgcctgtgtccctgaccatggctccctgcagtaccctttaacgatttatcagcaagactgttgaacgcataactgcccaagatgcctgtccctccccctccagcacccccgccgcccccgacgtttgcactggccaatacagagaagcctaccttgaataagacagagcaggctgggagaaatgctctcctttctgatatcagcaaagggaagaaactaaagaagacggtcaccaatgacagaagtgcaccaatactggacaaacctaaaggagctggtgctggaggcggtggtggtggctttggtggaggcggcggatttggcggaggaggtggtggcggaggcggtggaagttttggagggggcggacctccaggtctgggaggattgttccaggctggaatgccgaagctgagatccacggccaacagggataatgattctggaggaagccgaccaccattgttgccaccgggaggaagatccacatctgcgaaacccttttcacccccaagtggcccagggaggtttcctgtgccttctccaggccacagaagtggtcccccagagcctcagaggaaccgaatgccgcccccaaggcccgacgtgggctcaaagcctgatagcattcctcctccagtacctagtactccaagacccattcaatcaagtccgcacaaccgggggtccccaccagtgcccggaggccccaggcagcccagccccgggcccactcctccccctttccctggaaaccgcggcactgctttgggaggaggctcaatacgtcagtcccccttgagctcctcctcgcccttctccaaccggcctcccctgccgcctacccccagcagggccttggatgacaaaccccctccaccacctcctccagtgggcaacaggccctccatccacagggaagcggttccccctcctcctcctcagaacaacaagcctccagtgccttccactccgcggccttcggcctcctcacaggccccacctccgccgccacctcccagcaggcccgggccgcctcctctgcctccaagttccagcggcaatgacgaaaccccaagactcccacagcggaatctgtccctcagttcgtccacgcccccgttaccttcgccaggacgttcaggtcctcttcctcccccgcccagtgagagacccccacctccagtgagggacccgccaggccgatcaggccccctcccaccacctcctccagtaagcagaaacggcagcacatctcgggccctgcctgctacccctcagttgccatccaggagtggagtagacagtcccaggagtggacccaggcctccccttcctcctgataggcccagtgctggggcacctcccccacctccaccatcaacatctattagaaatggcttccaagactctccatgtgaagatgagtgggaaagcagattctacttccatccgatttccgatttgccacctccagagccatatgtacaaacgaccaaaagttatcccagcaaactggcaagaaacgaaagccggagtgagtatttctgccaaggtttttgaagattcacgcttgagtagcctgagtgacactcgggctatatagaaagtccaggcttcttgcctggagtggggtagagaaccctttggagccatctacattctagtaaattccccttccacaggcagtgaggaaattgcagatgcccagaatgcatatgagaaacagttattttaatgtgtcattacaagctcaaaataccgtggtttgctagtattaaattttattattttacttctttggacgtcttcctctgttttcatcttcctgagacagcacaagtagagccatcttctattccttctagttttgaaattggcataatgtctgattaattataacaaaaactccctttaactgccttgatcttttaaacgtattgtaatcatagctttacagagcattacatgaaaatgtaaatatatccataatctctccacataatagatattttcattttaccagattctcatccaattttttatccatataattctgtttttttatgtagttataatgacgatgtacagttttttggcggggtttacataacattgcttagtaaatagtgcccatgttatcacatggtttttatttcagcatatagtaatttaccattaccatggacatttaaattatttctgttgttctgctaatgtaggtaatgctaccataaagaactaaattgcttttcctccattgaagaagaatgtcaacaagaaaggaaaaatagacaaactggaattttataacagtaaatgtataggaagtgttacagctctttgagaatttgtctagcaggctttccagggttttgctggaaagcctctgaaatttacttttaaaaaaacacaatagctgggcatggtggctcacgcctgtaat

SEQ ID NO: 4522 - DNA, 373 bp, Homo sapiens
  source 1..373: mol_type = genomic DNA
aatgagaagaagcccttagcctaatgaagcgataagatttatcagcaagactgttgaacgcataactgcccaagatgcctgtccctccccctccagcacccccgccgcccccgacgtttgcactggccaatacagagaagcctaccttgaataagacagagcaggctgggagaaatgctctcctttctgatatcagcaaagggaagaaactaaagaagacggtcaccaatgacagaagtgcaccaatactggacaaacctaaaggagctggtgctggaggcggtggtggtggctttggtggaggcggcggatttggcggaggaggtggtggcggaggcggtggaagttttggagggggcggacctccaggtct

SEQ ID NO: 4523 - DNA, 4011 bp, Homo sapiens
  source 1..4011: mol_type = genomic DNA
ttctttttttttttcctccgggaagatgagatatactcattcttgaaaatacctccgggcttgccttctgcacacttctttccctccctgtctcacgccatggtagcgtccgcctaggttgcaggcgacccgcggggtggggcacaccattcaaagaaggggagggattgaggtttgcatcaaaacaaatacccctgcctttgcaaaggccataactaagtaatccagaaaaagaaatgcaggcggagaatagcagcctccctctgccaagtaagaggaaccggcctaaaggacattttctctctctctcctcccctctcatcgggtgaatagtgagctgctccggcaaaaagaaaccggaaatgctgctgcaagaggcagaaatgtaaatgtggagccaaacaataacagggctgccgggcctctcagattgcgacggtcctcctcggcctggcgggcaaacccctggtttagcacttctcacttccacgactgacagccttcaattggattttctccatctagcggagccgggggctgcctggaaagatcgctccaggaaggacaaaggtccggaagttgtgggaccttagcagcttgggctccccggatcacccccaaatgatcatttcggaatggagccccagttttcactaggatgccatgggctctaaaatatacagctatgagttctcaatgtttcgagatccaaaagtctcagacctcaatgctttgtgcatcttttatttcagggattccctacgcccagcaccgggtggatgtgcaaagaagtacgctttaggccggctcaaggttccccaaagctccactcctctgcctaggcgttcaactttgagttcggatggtcctaacatccccatcatctacacccaggtctcccaacaatgcaactcctatgatgatccctctagccaagcttccatcccactcacccccaaactcgctaagtccccactgccccacccccagccccagcgattttcccgagctgaaaatacacggagccgagagcccgtgactcagagaggactcatcaagttcagtcaggagcttacccaatccagggaagcgtgtcaccgtcgtggaaagcacgctcccagcccgaacgcaaagtgtccccggagcccagcagctacctgctccctggacggtggctctagacttttgagaagctcaaaacttttagcgccagtcttgagcacatgggaggggaaaaccccaatcccatcaacccctgcgaggctcctggcacaaagctggacagtcgccatgacaagtaagggcaagtaatccgcctgccggaggaagcaaaggaaatggagttggggaggagggtgcagagtcaggattctcgccgacctggtgccgtagatactaacattttggggtggaaaattctgcaagccagagctgtgagggcagaattggtggaaatcattttggaggaatcctgcattgtgtcaaatatgaagggtggaaggaagaaagcttttgcgtttgctctcagctggatcctttcttctcatcagttaaaatgtcattttttaggaaggctttccgtaatatcacaccctaacgttttctcccagatactttatatcacaccatcttatttaatctccttcacaacccttatcactctgataagatttatttgttcattgctttcagtacatggaaacgtaagccttatgaggatatagaatttttctactatcttattcattgttgtattcctgagtgcctatatcagtgctgggtagcaagtaagagctcgataataaatattttttgaatgagggagacaggtctgaagcctggagaatgagatgcagaagaggtgcaagacctgctgcgccctctgcaggcggcgggggggcggtgcaggtgctttaagaattaccgcgggactcggtagggggagcgtaggcgcttctcgccaagatagaagcgttcagactacaactcccagcagccacgaggagccctagggcttgatgggaacgggaaaccttctaacctttcacgtcccggctccgcgggttccgtgggtcgcccgcgaaatctgatccgggatgcggcggcccaatcggaaggtggaccgaaatcccgcgacagcaagaggcccgtagcgacccgcggtgctaaggaacacagtgctttcaaaagaattggcgtccgctgttcgcctctcctcccgggagtcttctgcctactcccagaagaggagggaagcacaggtgggtttctttagctctgcgtcggatccctgagaacttcgaagccatcctggctgaggctaatctccgctgtgcttcctctgcagtatgaagactttggagactcaaccgttagctccggactgctgtccttcagaccaggacccagctccagcccatccttctccccacgcttccccgatgaataaaaatgcggactctgaactgatgccaccgcctcccgaaaggggggatccgccccggttgtccccagatcctgtggctggctcagctgtgtcccaggagctacgggagggggacccagtttctctctccactcccctggaaacagagtttggttcccctagtgagttgagtcctcgaatcgaggagcaagaactttctgaaaatacaagccttcctgcagaagaagcaaacgggagcctttctgaagaagaagcgaacgggccagagttggggtctggaaaagccatggaagatacctctggggaacccgctgcagaggacgagggagacaccgcttggaactacagcttctcccagctgcctcgatttctcagtggttcctggtcagagttcagcacccaacctgagaacttcttgaaaggctgtaagtgggctcctgacggttcctgcatcttgaccaatagtgctgataacatcttgcgaatttataacctgcccccagagctgtaccatgagggggagcaggtggaatatgcagaaatggtccctgtccttcgaatggtggaaggtgataccatctatgattactgctggtattctctgatgtcctcagcccagccagacacctcctacgtggccagcagcagccgggagaacccgattcatatctgggacgcattcactggagagctccgggcttcctttcgcgcctacaaccacctggatgagctgacggcagcccattcgctctgcttctccccggatggctcccagctcttctgtggcttcaaccggactgtgcgtgttttttccacggcccggcctggccgagactgcgaggtccgagccacatttgcaaaaaagcagggccagagcggcatcatctcctgcatagccttcagcccagcccagcccctctatgcctgtggctcctacggccgctccctgggtctgtatgcctgggatgatggctcccctctcgccttgctgggagggcaccaagggggcatcacccacctctgctttcatcccgatggcaaccgcttcttctcaggagcccgcaaggatgctgagctcctgtgctgggatctccggcagtctggttacccactgtggtccctgggtcgagaggtgaccaccaatcagcgcatctacttcgatctggacccgaccgggcagttcctagtgagtggcagcacgagcggggctgtctctgtgtgggacacggacgggcctggcaatgatgggaagccggagcccgtgttgagttttctgccccagaaggactgcaccaatggcgtgagcctgcaccctagcctgcctctcctggccactgcctccggtcagcgtgtgtttcctgagcccacagagagtggggacgaaggagaggagctgggccttcccttgctctccacgcgccacgtccaccttgaatgtcggcttcagctctggtggtgtgggggggcgccagactccagcatccctgatgatcaccagggcgagaaagggcagggaggaacggagggaggtgtgggtgagctgatataaaaaggtttttatgata

SEQ ID NO: 4524 - DNA, 1905 bp, Homo sapiens
  source 1..1905: mol_type = genomic DNA
gggaacgggaaaccttctaacctttcacgtcccggctccgcgggttccgtgggtcgcccgcgaaatctgatccgggatgcggcggcccaatcggaaggtggaccgaaatcccgcgacagcaagaggcccgtagcgacccgcggtgctaaggaacacagtgctttcaaaagaattggcgtccgctgttcgcctctcctcccgggagtcttctgcctactcccagaagaggagggaagcacagtatgaagactttggagactcaaccgttagctccggactgctgtccttcagaccaggacccagctccagcccatccttctccccacgcttccccgatgaataaaaatgcggactctgaactgatgccaccgcctcccgaaaggggggatccgccccggttgtccccagatcctgtggctggctcagctgtgtcccaggagctacgggagggggacccagtttctctctccactcccctggaaacagagtttggttcccctagtgagttgagtcctcgaatcgaggagcaagaactttctgaaaatacaagccttcctgcagaagaagcaaacgggagcctttctgaagaagaagcgaacgggccagagttggggtctggaaaagccatggaagatacctctggggaacccgctgcagaggacgagggagacaccgcttggaactacagcttctcccagctgcctcgatttctcagtggttcctggtcagagttcagcacccaacctgagaacttcttgaaaggctgtaagtgggctcctgacggttcctgcatcttgaccaatagtgctgataacatcttgcgaatttataacctgcccccagagctgtaccatgagggggagcaggtggaatatgcagaaatggtccctgtccttcgaatggtggaaggtgataccatctatgattactgctggtattctctgatgtcctcagcccagccagacacctcctacgtggccagcagcagccgggagaacccgattcatatctgggacgcattcactggagagctccgggcttcctttcgcgcctacaaccacctggatgagctgacggcagcccattcgctctgcttctccccggatggctcccagctcttctgtggcttcaaccggactgtgcgtgttttttccacggcccggcctggccgagactgcgaggtccgagccacatttgcaaaaaagcagggccagagcggcatcatctcctgcatagccttcagcccagcccagcccctctatgcctgtggctcctacggccgctccctgggtctgtatgcctgggatgatggctcccctctcgccttgctgggagggcaccaagggggcatcacccacctctgctttcatcccgatggcaaccgcttcttctcaggagcccgcaaggatgctgagctcctgtgctgggatctccggcagtctggttacccactgtggtccctgggtcgagaggtgaccaccaatcagcgcatctacttcgatctggacccgaccgggcagttcctagtgagtggcagcacgagcggggctgtctctgtgtgggacacggacgggcctggcaatgatgggaagccggagcccgtgttgagttttctgccccagaaggactgcaccaatggcgtgagcctgcaccctagcctgcctctcctggccactgcctccggtcagcgtgtgtttcctgagcccacagagagtggggacgaaggagaggagctgggccttcccttgctctccacgcgccacgtccaccttgaatgtcggcttcagctctggtggtgtgggggggcgccagactccagcatccctgatgatcaccagggcgagaaagggcagggaggaacggagggaggtgtgggtgagctgatataaaaaggtttttatgata

SEQ ID NO: 4525 - DNA, 1818 bp, Homo sapiens
  source 1..1818: mol_type = genomic DNA
tgaattcgagttccgcctcctaccaggaagaaccggctcgggccggagggctgcacggaggaccacacggacgcctgcgggcccgccccttccgcttcacgacgttcagcctgcgtctggaactggaatggcctagcccaaagctagataacagtatgaagactttggagactcaaccgttagctccggactgctgtccttcagaccaggacccagctccagcccatccttctccccacgcttccccgatgaataaaaatgcggactctgaactgatgccaccgcctcccgaaaggggggatccgccccggttgtccccagatcctgtggctggctcagctgtgtcccaggagctacgggagggggacccagtttctctctccactcccctggaaacagagtttggttcccctagtgagttgagtcctcgaatcgaggagcaagaactttctgaaaatacaagccttcctgcagaagaagcaaacgggagcctttctgaagaagaagcgaacgggccagagttggggtctggaaaagccatggaagatacctctggggaacccgctgcagaggacgagggagacaccgcttggaactacagcttctcccagctgcctcgatttctcagtggttcctggtcagagttcagcacccaacctgagaacttcttgaaaggctgtaagtgggctcctgacggttcctgcatcttgaccaatagtgctgataacatcttgcgaatttataacctgcccccagagctgtaccatgagggggagcaggtggaatatgcagaaatggtccctgtccttcgaatggtggaaggtgataccatctatgattactgctggtattctctgatgtcctcagcccagccagacacctcctacgtggccagcagcagccgggagaacccgattcatatctgggacgcattcactggagagctccgggcttcctttcgcgcctacaaccacctggatgagctgacggcagcccattcgctctgcttctccccggatggctcccagctcttctgtggcttcaaccggactgtgcgtgttttttccacggcccggcctggccgagactgcgaggtccgagccacatttgcaaaaaagcagggccagagcggcatcatctcctgcatagccttcagcccagcccagcccctctatgcctgtggctcctacggccgctccctgggtctgtatgcctgggatgatggctcccctctcgccttgctgggagggcaccaagggggcatcacccacctctgctttcatcccgatggcaaccgcttcttctcaggagcccgcaaggatgctgagctcctgtgctgggatctccggcagtctggttacccactgtggtccctgggtcgagaggtgaccaccaatcagcgcatctacttcgatctggacccgaccgggcagttcctagtgagtggcagcacgagcggggctgtctctgtgtgggacacggacgggcctggcaatgatgggaagccggagcccgtgttgagttttctgccccagaaggactgcaccaatggcgtgagcctgcaccctagcctgcctctcctggccactgcctccggtcagcgtgtgtttcctgagcccacagagagtggggacgaaggagaggagctgggccttcccttgctctccacgcgccacgtccaccttgaatgtcggcttcagctctggtggtgtgggggggcgccagactccagcatccctgatgatcaccagggcgagaaagggcagggaggaacggagggaggtgtgggtgagctgatataaaaaggtttttatgata

SEQ ID NO: 4526 - DNA, 1173 bp, Homo sapiens
  source 1..1173: mol_type = genomic DNA
aaaagaattggcgtccgctgttcgcctctcctcccgggagtcttctgcctactcccagaagaggagggaagcacaggtgggtttctttagctctgcgtcggatccctgagaacttcgaagccatcctggctgaggctaatctccgctgtgcttcctctgcagtatgaagactttggagactcaaccgttagctccggactgctgtccttcagaccaggacccagctccagcccagccagacacctcctacgtggccagcagcagccgggagaacccgattcatatctgggacgcattcactggagagctccgggcttcctttcgcgcctacaaccacctggatgagctgacggcagcccattcgctctgcttctccccggatggctcccagctcttctgtggcttcaaccggactgtgcgtgttttttccacggcccggcctggccgagactgcgaggtccgagccacatttggtaagcatctgtgcctccaagggaggaggagagggaagggcactgccacctgcacaggggccttttgtgagccgggggccacctgtgggggttcacgccgtcctctgtacggccccgggagcaggtgcagcccagtcggcagaggagcaaacaggctcagagcaggtaggaaaccttcccaaggccaaccagctggtcaaaggactgcttccttcctgaactcataccctgtcagctgtggagcttttggtctctgaaatctttctagaaaattgttgataaagctgattccgttttcctgtaggccttcaacttgcatctctccaaggaagaactgggatttgagagggatgaagtggggcttgggcatttaggtcctttgggaggatagatgtggggagcatcagaggtctttgtcctgcttgtgacagacagcatgggggggatgttgagtccaagcatgttggtgctgggacgggagacagacctctgcttagcctggttagtgccaggagccattgccccctcccccactttgttccttccctctctagcaaaaaagcagggccagagcggcatcatctcctgcatagccttcagcccagcccagcccctctatgcctgtggctcctacggccgctccctgggtctgtatgcctgggatgatggctcccctctcgccttgctgggagggcaccaa

SEQ ID NO: 4527 - DNA, 1828 bp, Homo sapiens
  source 1..1828: mol_type = genomic DNA
ccggagcccagcagctacctgctccctggacggtggctctagacttttgagaagctcaaaacttttagcgccagtcttgagcacatgggaggggaaaaccccaatcccatcaacccctgcgaggctcctggcacaaagctggacagtcgccatgacaagtaaggtatgaagactttggagactcaaccgttagctccggactgctgtccttcagaccaggacccagctccagcccatccttctccccacgcttccccgatgaataaaaatgcggactctgaactgatgccaccgcctcccgaaaggggggatccgccccggttgtccccagatcctgtggctggctcagctgtgtcccaggagctacgggagggggacccagtttctctctccactcccctggaaacagagtttggttcccctagtgagttgagtcctcgaatcgaggagcaagaactttctgaaaatacaagccttcctgcagaagaagcaaacgggagcctttctgaagaagaagcgaacgggccagagttggggtctggaaaagccatggaagatacctctggggaacccgctgcagaggacgagggagacaccgcttggaactacagcttctcccagctgcctcgatttctcagtggttcctggtcagagttcagcacccaacctgagaacttcttgaaaggctgtaagtgggctcctgacggttcctgcatcttgaccaatagtgctgataacatcttgcgaatttataacctgcccccagagctgtaccatgagggggagcaggtggaatatgcagaaatggtccctgtccttcgaatggtggaaggtgataccatctatgattactgctggtattctctgatgtcctcagcccagccagacacctcctacgtggccagcagcagccgggagaacccgattcatatctgggacgcattcactggagagctccgggcttcctttcgcgcctacaaccacctggatgagctgacggcagcccattcgctctgcttctccccggatggctcccagctcttctgtggcttcaaccggactgtgcgtgttttttccacggcccggcctggccgagactgcgaggtccgagccacatttgcaaaaaagcagggccagagcggcatcatctcctgcatagccttcagcccagcccagcccctctatgcctgtggctcctacggccgctccctgggtctgtatgcctgggatgatggctcccctctcgccttgctgggagggcaccaagggggcatcacccacctctgctttcatcccgatggcaaccgcttcttctcaggagcccgcaaggatgctgagctcctgtgctgggatctccggcagtctggttacccactgtggtccctgggtcgagaggtgaccaccaatcagcgcatctacttcgatctggacccgaccgggcagttcctagtgagtggcagcacgagcggggctgtctctgtgtgggacacggacgggcctggcaatgatgggaagccggagcccgtgttgagttttctgccccagaaggactgcaccaatggcgtgagcctgcaccctagcctgcctctcctggccactgcctccggtcagcgtgtgtttcctgagcccacagagagtggggacgaaggagaggagctgggccttcccttgctctccacgcgccacgtccaccttgaatgtcggcttcagctctggtggtgtgggggggcgccagactccagcatccctgatgatcaccagggcgagaaagggcagggaggaacggagggaggtgtgggtgagctgatataaaaaggtttttatgata

SEQ ID NO: 4528 - DNA, 3203 bp, Homo sapiens
  source 1..3203: mol_type = genomic DNA
atgtaactgaacaatgggcctcgtctggaacttcatcttacaaaggggccgatcggcccgtccgggtggccaaggatttgccgcccgttgagtccgggccgccccgagcgtgtcagccccgagtgcggcaccgataacgcggttcgcgaggatgctggagggtgccggcccggccacctgacactcccgagccataggatgccttttaaacgcggcgatcgggcctgtaatttgggcggcgcgggcagaaggagtttaaagaaaaataattgtcccgccctgatcgtgtcgtgtcgtgtggcgtggatgggggaaaggtctggggcatgcagggagactacgcttggacttgggagtaaaggctggccttccaagcatttacagtcctacagactcatcctaagtccaggcagtactgaggcctgtttctggacaaggtcttggcccagcatttgtttttatcgtgggtttgcggtgcccagagtttggccggcctccgtgtgattaggaacatcctaccgtagataaggtatcttaaagaaggaggtgttcagcacctgtgttttgaaaggccttcgagtactgcgcagatgaccacttttaaaactgcagattttaaagctgatacttccagagattaagacaagcctcgcatttgtaaggttaacagggaagatgcaccttttaaaagtttgctctccaaagctcggggaattgattccagctctgttaaactccggggtagttctctcttcatggatacagaaaaatcaggaaaaagggaatttgatgtgcgacagactcctcaagtgaatattaatccttttactccggattctttgttgcttcattcctcaggacagtgtcgtcgtagaaagagaacgtattggaatgattcctgtggtgaagacatggaagccagtgattatgagcttgaagatgaaacaagacctgctaagagaattacaattactgaaagcaatatgaagtcccggtatacaacagaatttcatgagctagagaaaatcggctctggagaatttggttctgtatttaagtgtgtgaagaggctggatggatgcatttatgccattaagcgatcaaaaaagccattggcgggctctgttgatgagcagaacgctttgagagaagtatatgctcatgcagtgcttggacagcattctcatgtagttcgatatttctctgcgtgggcagaagatgatcatatgcttatacagaatgaatattgtaatggtggaagtttagctgatgctataagtgaaaactacagaatcatgagttactttaaagaagcagagttgaaggatctccttttgcaagttggccgaggcttgaggtatattcattcaatgtctttggttcacatggatataaaacctagtaatattttcatatctcgaacctcaatcccaaatgctgcctctgaagaaggagacgaagatgattgggcatccaacaaagttatgtttaaaataggtgatcttgggcatgtaacaaggatctccagtccacaagttgaagagggcgatagtcgttttcttgcaaatgaagttttacaggagaattatacccatctaccaaaagcagatatttttgcgcttgccctcacagtggtatgtgctgctggtgctgaacctcttccgagaaatggagatcaatggcatgaaatcagacagggtagattacctcggataccacaagtgctttcccaagaatttacagagttgctaaaagttatgattcatccagatccagagagaagaccttcagcaatggcactggtaaagcattcagtattgctgtccgcttctagaaagagtgcagaacaattacgaatagaattgaatgccgaaaagttcaaaaattcacttttacaaaaagaactcaagaaagcacagatggcaaaagctgcagctgaggaaagagcactcttcactgaccggatggccactaggtccaccacccagagtaatagaacatctcgacttattggaaagaaaatgaaccgctctgtcagccttactatatactgagctactcctttcccacctccccctgaacactgtgacaagaggaagctaggttgaaatcactgatagaatccagtttgcaattactttctcgattggtgtcagtagttttactgattaggacttttattgtgaattacagttgaaagctgtattttgatgattgctatgtcaggctttcatctaatcttaccagtctgtcttctgtaggatgtgtcactgttggatgttacaccagcctttccagggttaaccactgtggtggtgtgctgcttatagtttgctgttgcattgtaataaaaggtgtctttccctgtagtgacctgtaaaaagtactcaagggctttattacagacataccctccctttgaaaagggacatgctaaaagactcattactactcagccttcaatgtacctgtgtgtccatcttatatttcttttttttttaattgtgaattagacttgtatatcccactgggagcactttgtaggcattgcatgaaccatgggatgatgattctgtggaggtattgccttgtgaatttgctgctattttagttttgtctttgctgtaaacttgtagcattaaacaatcattgttgttaataggtcttctttttgaaacaattatgtgaaatgtatagctgcttttgatgaaaagcagctatttgcctttttttttttttcctttgaactttgaagctagtgcattggaaaaatgcaccctttccctcctttggaatgctgtattaatgtagtataataattactggttttgtaacttgttctggtaatgtccttcccggactctttttaaatgtctccccctaagttttatacttgattgtattattagtctgtttttaaatgttttgcccggtttttctcttcaatatttgtgtatataaaccgatcttcgtgatactgtacatagctgtttgaaatgccagaatgacttctgacattccaagtttttcacaaaatatattttatctgtgattagccatttgactaataatactggctaacagatgttgaaaaaaattgtctgtttgttttctcattaattttggtctaaaacatgtttgcacttgtctttgacttgtgttttattaacattgattggcatattaaaagtcactctgagctt

SEQ ID NO: 4529 - DNA, 2799 bp, Homo sapiens
  source 1..2799: mol_type = genomic DNA
ctgagactggacctgaggagacctcagcctcggtgctcgggccgccccgcctctgccggaaagtccgcgccgccgctgccgccaccgtccgcagcccgagcgccccggagccgcaggccgccgccgcgcagagacgccgcggctgcgactaggcgcgcccagccgcacgtggcggacccgcccccaggcccgcagtgtcctggaccccgcaggcctccgctctcctgtcctcggccccgtccccagggccgcgatgagcttcctgagccgacagcagccgccgccaccccgccgcgccggggcggcctgcaccttgcggcagaagctgatcttctcgccctgcagcgactgtgaggaggaggaagaagaggaggaggaggagggcagcggccacagcaccggggaggactcggcctttcaagagcccgactcgccgctgccgcccgcgcggagccccacggagcccgggcccgagcgccgccgctcgcccgggccggcccccggcagccccggcgagctggaggaggacctgttgctgcccggcgcctgcccgggcgcggacgaggcgggcggtggggcggagggcgactcgtgggaggaggagggcttcggctcctcgtcgccggtcaagtcgccggcggccccctacttcctgggtagctctttctcgccggtgcgctgcggcggcccaggagatgcgtcgccgcggggttgcggggcgcgccgggcgggcgaaggccgccgctcgccgcggccggaccacccgggcaccccgccacacaagaccttccgcaagctgcgactcttcgacaccccgcacacgcccaagagtttgctctccaaagctcggggaattgattccagctctgttaaactccggggtagttctctcttcatggatacagaaaaatcaggaaaaagggaatttgatgtgcgacagactcctcaagtgaatattaatccttttactccggattctttgttgcttcattcctcaggacagtgtcgtcgtagaaagagaacgtattggaatgattcctgtggtgaagacatggaagccagtgattatgagcttgaagatgaaacaagacctgctaagagaattacaattactgaaagcaatatgaagtcccggtatacaacagaatttcatgagctagagaaaatcggctctggagaatttggttctgtatttaagtgtgtgaagaggctggatggatgcatttatgccattaagcgatcaaaaaagccattggcgggctctgttgatgagcagaacgctttgagagaagtatatgctcatgcagtgcttggacagcattctcatgtagttcgatatttctctgcgtgggcagaagatgatcatatgcttatacagaatgaatattgtaatggtggaagtttagctgatgctataagtgaaaactacagaatcatgagttactttaaagaagcagagttgaaggatctccttttgcaagttggccgaggcttgaggtatattcattcaatgtctttggttcacatggatataaaacctagtaatattttcatatctcgaacctcaatcccaaatgctgcctctgaagaaggagacgaagatgattgggcatccaacaaagttatgtttaaaataggtgatcttgggcatgtaacaaggatctccagtccacaagttgaagagggcgatagtcgttttcttgcaaatgaagttttacaggagaattatacccatctaccaaaagcagatatttttgcgcttgccctcacagtggtatgtgctgctggtgctgaacctcttccgagaaatggagatcaatggcatgaaatcagacagggtagattacctcggataccacaagtgctttcccaagaatttacagagttgctaaaagttatgattcatccagatccagagagaagaccttcagcaatggcactggtaaagcattcagtattgctgtccgcttctagaaagagtgcagaacaattacgaatagaattgaatgccgaaaagttcaaaaattcacttttacaaaaagaactcaagaaagcacagatggcaaaagctgcagctgaggaaagagcactcttcactgaccggatggccactaggtccaccacccagagtaatagaacatctcgacttattggaaagaaaatgaaccgctctgtcagccttactatatactgagctactcctttcccacctccccctgaacactgtgacaagaggaagctaggttgaaatcactgatagaatccagtttgcaattactttctcgattggtgtcagtagttttactgattaggacttttattgtgaattacagttgaaagctgtattttgatgattgctatgtcaggctttcatctaatcttaccagtctgtcttctgtaggatgtgtcactgttggatgttacaccagcctttccagggttaaccactgtggtggtgtgctgcttatagtttgctgttgcattgtaataaaaggtgtctttccctgtagtgacctgtaaaaagtactcaagggctttattacagacataccctccctttgaaaagggacatgctaaaagactcattactactcagccttcaatgtacctgtgtgtccatcttatatttcttttttttttaattgtgaattagacttgtatatcccactgggagcactttgtaggcattgcatgaaccatgggatgatgattctgtggaggtattgccttgtgaatttgctgctattttagttttgtctttgctgtaaacttgtagcattaaacaatcattgttgttaa

SEQ ID NO: 4530 - DNA, 3122 bp, Homo sapiens
  source 1..3122: mol_type = genomic DNA
tgagtgaatggagcggccgagcctcctggctcctcctcttccccgcgccgccggcccctcttatttgagctttgggaagctgagggcagccaggcagctggggtaaggagttcaaggcagcgcccacacccgggggctctccgcaacccgaccgcctgtccgctcccccacttcccgccctccctcccacctactcattcacccacccacccacccagagccgggacggcagcccaggcgcccgggccccgccgtctcctcgccgcgatcctggacttcctcttgctgcaggacccggcttccacgtgtgtcccggagccggcgtctcagcacacgctccgctccgggcctgggtgcctacagcagccagagcagcagggagtccgggacccgggcggcatctgggccaagttaggcgccgccgaggccagcgctgaacgtctccagggccggaggagccgcggggcgtccgggtctgagccgcagcaaatgggctccgacgtgcgggacctgaacgcgctgctgcccgccgtcccctccctgggtggcggcggcggctgtgccctgcctgtgagcggcgcggcgcagtgggcgccggtgctggactttgcgcccccgggcgcttcggcttacgggtcgttgggcggccccgcgccgccaccggctccgccgccacccccgccgccgccgcctcactccttcatcaaacaggagccgagctggggcggcgcggagccgcacgaggagcagtgcctgagcgccttcactgtccacttttccggccagttcactggcacagccggagcctgtcgctacgggcccttcggtcctcctccgcccagccaggcgtcatccggccaggccaggatgtttcctaacgcgccctacctgcccagctgcctcgagagccagcccgctattcgcaatcagggttacagcacggtcaccttcgacgggacgcccagctacggtcacacgccctcgcaccatgcggcgcagttccccaaccactcattcaagcatgaggatcccatgggccagcagggctcgctgggtgagcagcagtactcggtgccgcccccggtctatggctgccacacccccaccgacagctgcaccggcagccaggctttgctgctgaggacgccctacagcagtgacaatttataccaaatgacatcccagcttgaatgcatgacctggaatcagatgaacttaggagccaccttaaagggagttgctgctgggagctccagctcagtgaaatggacagaagggcagagcaaccacagcacagggtacgagagcgataaccacacaacgcccatcctctgcggagcccaatacagaatacacacgcacggtgtcttcagaggcattcaggatgtgcgacgtgtgcctggagtagccccgactcttgtacggtcggcatctgagaccagtgagaaacgccccttcatgtgtgcttacccaggctgcaataagagatattttaagctgtcccacttacagatgcacagcaggaagcacactggtgagaaaccataccagtgtgacttcaaggactgtgaacgaaggttttctcgttcagaccagctcaaaagacaccaaaggagacatacaggtgtgaaaccattccagtgtaaaacttgtcagcgaaagttctcccggtccgaccacctgaagacccacaccaggactcatacaggtaaaacaagtgaaaagcccttcagctgtcggtggccaagttgtcagaaaaagtttgcccggtcagatgaattagtccgccatcacaacatgcatcagagaaacatgaccaaactccagctggcgctttgaggggtctccctcggggaccgttcagtgtcccaggcagcacagtgtgtgaactgctttcaagtctgactctccactcctcctcactaaaaaggaaacttcagttgatcttcttcatccaacttccaagacaagataccggtgcttctggaaactaccaggtgtgcctggaagagttggtctctgccctgcctacttttagttgactcacaggccctggagaagcagctaacaatgtctggttagttaaaagcccattgccatttggtgtggattttctactgtaagaagagccatagctgatcatgtccccctgacccttcccttctttttttatgctcgttttcgctggggatggaattattgtaccattttctatcatggaatatttataggccagggcatgtgtatgtgtctgctaatgtaaactttgtcatggtttccatttactaacagcaacagcaagaaataaatcagagagcaaggcatcgggggtgaatcttgtctaacattcccgaggtcagccaggctgctaacctggaaagcaggatgtagttctgccaggcaacttttaaagctcatgcatttcaagcagctgaagaaaaaatcagaactaaccagtacctctgtatagaaatctaaaagaattttaccattcagttaattcaatgtgaacactggcacactgctcttaagaaactatgaagatctgagatttttttgtgtatgtttttgactcttttgagtggtaatcatatgtgtctttatagatgtacatacctccttgcacaaatggaggggaattcattttcatcactgggagtgtccttagtgtataaaaaccatgctggtatatggcttcaagttgtaaaaatgaaagtgactttaaaagaaaataggggatggtccaggatctccactgataagactgtttttaagtaacttaaggacctttgggtctacaagtatatgtgaaaaaaatgagacttactgggtgaggaaatccattgtttaaagatggtcgtgtgtgtgtgtgtgtgtgtgtgtgtgtgtgtgttgtgttgtgttttgttttttaagggagggaatttattatttaccgttgcttgaaattactgtgtaaatatatgtctgataatgatttgctctttgacaactaaaattaggactgtataagtactagatgcatcactgggtgttgatcttacaagatattgatgataacacttaaaattgtaacctgcatttttcactttgctctcaattaaagtctattcaaaaggaaa

SEQ ID NO: 4531 - DNA, 3032 bp, Homo sapiens
  source 1..3032: mol_type = genomic DNA
gggccccgccgtctcctcgccgcgatcctggacttcctcttgctgcaggacccggcttccacgtgtgtcccggagccggcgtctcagcacacgctccgctccgggcctgggtgcctacagcagccagagcagcagggagtccgggacccgggcggcatctgggccaagttaggcgccgccgaggccagcgctgaacgtctccagggccggaggagccgcggggcgtccgggtctgagccgcagcaaatgggctccgacgtgcgggacctgaacgcgctgctgcccgccgtcccctccctgggtggcggcggcggctgtgccctgcctgtgagcggcgcggcgcagtgggcgccggtgctggactttgcgcccccgggcgcttcggcttacgggtcgttgggcggccccgcgccgccaccggctccgccgccacccccgccgccgccgcctcactccttcatcaaacaggagccgagctggggcggcgcggagccgcacgaggagcagtgcctgagcgccttcactgtccacttttccggccagttcactggcacagccggagcctgtcgctacgggcccttcggtcctcctccgcccagccaggcgtcatccggccaggccaggatgtttcctaacgcgccctacctgcccagctgcctcgagagccagcccgctattcgcaatcagggttacagcacggtcaccttcgacgggacgcccagctacggtcacacgccctcgcaccatgcggcgcagttccccaaccactcattcaagcatgaggatcccatgggccagcagggctcgctgggtgagcagcagtactcggtgccgcccccggtctatggctgccacacccccaccgacagctgcaccggcagccaggctttgctgctgaggacgccctacagcagtgacaatttataccaaatgacatcccagcttgaatgcatgacctggaatcagatgaacttaggagccaccttaaaggggtaaggttttctctattccattgcctttccacagtaacttatacctgtttgaaccatttcaaaggtgcttagaacttatgaagaaagtacagttttagaagaaagggcaaagctctctgtgacattagaacgctttcctccttcccctagttgagttgctgctgggagctccagctcagtgaaatggacagaagggcagagcaaccacagcacagggtacgagagcgataaccacacaacgcccatcctctgcggagcccaatacagaatacacacgcacggtgtcttcagaggcattcaggatgtgcgacgtgtgcctggagtagccccgactcttgtacggtcggcatctgagaccagtgagaaacgccccttcatgtgtgcttacccaggctgcaataagagatattttaagctgtcccacttacagatgcacagcaggaagcacactggtgagaaaccataccagtgtgacttcaaggactgtgaacgaaggttttctcgttcagaccagctcaaaagacaccaaaggagacatacaggtgtgaaaccattccagtgtaaaacttgtcagcgaaagttctcccggtccgaccacctgaagacccacaccaggactcatacaggtaaaacaagtgaaaagcccttcagctgtcggtggccaagttgtcagaaaaagtttgcccggtcagatgaattagtccgccatcacaacatgcatcagagaaacatgaccaaactccagctggcgctttgaggggtctccctcggggaccgttcagtgtcccaggcagcacagtgtgtgaactgctttcaagtctgactctccactcctcctcactaaaaaggaaacttcagttgatcttcttcatccaacttccaagacaagataccggtgcttctggaaactaccaggtgtgcctggaagagttggtctctgccctgcctacttttagttgactcacaggccctggagaagcagctaacaatgtctggttagttaaaagcccattgccatttggtgtggattttctactgtaagaagagccatagctgatcatgtccccctgacccttcccttctttttttatgctcgttttcgctggggatggaattattgtaccattttctatcatggaatatttataggccagggcatgtgtatgtgtctgctaatgtaaactttgtcatggtttccatttactaacagcaacagcaagaaataaatcagagagcaaggcatcgggggtgaatcttgtctaacattcccgaggtcagccaggctgctaacctggaaagcaggatgtagttctgccaggcaacttttaaagctcatgcatttcaagcagctgaagaaaaaatcagaactaaccagtacctctgtatagaaatctaaaagaattttaccattcagttaattcaatgtgaacactggcacactgctcttaagaaactatgaagatctgagatttttttgtgtatgtttttgactcttttgagtggtaatcatatgtgtctttatagatgtacatacctccttgcacaaatggaggggaattcattttcatcactgggagtgtccttagtgtataaaaaccatgctggtatatggcttcaagttgtaaaaatgaaagtgactttaaaagaaaataggggatggtccaggatctccactgataagactgtttttaagtaacttaaggacctttgggtctacaagtatatgtgaaaaaaatgagacttactgggtgaggaaatccattgtttaaagatggtcgtgtgtgtgtgtgtgtgtgtgtgtgtgtgtgtgttgtgttgtgttttgttttttaagggagggaatttattatttaccgttgcttgaaattactgtgtaaatatatgtctgataatgatttgctctttgacaactaaaattaggactgtataagtactagatgcatcactgggtgttgatcttacaagatattgatgataacacttaaaattgtaacctgcatttttcactttgctctcaattaaagtctattcaaaaggaaa

SEQ ID NO: 4532 - DNA, 2466 bp, Homo sapiens
  source 1..2466: mol_type = genomic DNA
gctttcaccactgcccctcccggggggacctgaaggagagggtttgaggccggtctttgcccgccgaggtctgcgtgtccggtctgggaggaggcctaggagggctcgcgggccacgggcatccttgggcccgagttctggggtgcggacggacgtctcgagagtgggtgccgcgactcgggacccacggccctcgccgggcacggacagttgcggagcagggctctgaggattgtgcagtgccctgggtccctgcctactcctgggctcaggaatggagaagggttacagcacggtcaccttcgacgggacgcccagctacggtcacacgccctcgcaccatgcggcgcagttccccaaccactcattcaagcatgaggatcccatgggccagcagggctcgctgggtgagcagcagtactcggtgccgcccccggtctatggctgccacacccccaccgacagctgcaccggcagccaggctttgctgctgaggacgccctacagcagtgacaatttataccaaatgacatcccagcttgaatgcatgacctggaatcagatgaacttaggagccaccttaaagggagttgctgctgggagctccagctcagtgaaatggacagaagggcagagcaaccacagcacagggtacgagagcgataaccacacaacgcccatcctctgcggagcccaatacagaatacacacgcacggtgtcttcagaggcattcaggatgtgcgacgtgtgcctggagtagccccgactcttgtacggtcggcatctgagaccagtgagaaacgccccttcatgtgtgcttacccaggctgcaataagagatattttaagctgtcccacttacagatgcacagcaggaagcacactggtgagaaaccataccagtgtgacttcaaggactgtgaacgaaggttttctcgttcagaccagctcaaaagacaccaaaggagacatacaggtgtgaaaccattccagtgtaaaacttgtcagcgaaagttctcccggtccgaccacctgaagacccacaccaggactcatacaggtgaaaagcccttcagctgtcggtggccaagttgtcagaaaaagtttgcccggtcagatgaattagtccgccatcacaacatgcatcagagaaacatgaccaaactccagctggcgctttgaggggtctccctcggggaccgttcagtgtcccaggcagcacagtgtgtgaactgctttcaagtctgactctccactcctcctcactaaaaaggaaacttcagttgatcttcttcatccaacttccaagacaagataccggtgcttctggaaactaccaggtgtgcctggaagagttggtctctgccctgcctacttttagttgactcacaggccctggagaagcagctaacaatgtctggttagttaaaagcccattgccatttggtgtggattttctactgtaagaagagccatagctgatcatgtccccctgacccttcccttctttttttatgctcgttttcgctggggatggaattattgtaccattttctatcatggaatatttataggccagggcatgtgtatgtgtctgctaatgtaaactttgtcatggtttccatttactaacagcaacagcaagaaataaatcagagagcaaggcatcgggggtgaatcttgtctaacattcccgaggtcagccaggctgctaacctggaaagcaggatgtagttctgccaggcaacttttaaagctcatgcatttcaagcagctgaagaaaaaatcagaactaaccagtacctctgtatagaaatctaaaagaattttaccattcagttaattcaatgtgaacactggcacactgctcttaagaaactatgaagatctgagatttttttgtgtatgtttttgactcttttgagtggtaatcatatgtgtctttatagatgtacatacctccttgcacaaatggaggggaattcattttcatcactgggagtgtccttagtgtataaaaaccatgctggtatatggcttcaagttgtaaaaatgaaagtgactttaaaagaaaataggggatggtccaggatctccactgataagactgtttttaagtaacttaaggacctttgggtctacaagtatatgtgaaaaaaatgagacttactgggtgaggaaatccattgtttaaagatggtcgtgtgtgtgtgtgtgtgtgtgtgtgtgtgtgtgttgtgttgtgttttgttttttaagggagggaatttattatttaccgttgcttgaaattactgtgtaaatatatgtctgataatgatttgctctttgacaactaaaattaggactgtataagtactagatgcatcactgggtgttgatcttacaagatattgatgataacacttaaaattgtaacctgcatttttcactttgctctcaattaaagtctattcaaaaggaaa

SEQ ID NO: 4533 - DNA, 2114 bp, Homo sapiens
  source 1..2114: mol_type = genomic DNA
agctggggtaaggagttcaaggcagcgcccacacccgggggctctccgcaacccgaccgcctgtccgctcccccacttcccgccctccctcccacctactcattcacccacccacccacccagagccgggacggcagcccaggcgcccgggccccgccgtctcctcgccgcgatcctggacttcctcttgctgcaggacccggcttccacgtgtgtcccggagccggcgtctcagcacacgctccgctccgggcctgggtgcctacagcagccagagcagcagggagtccgggacccgggcggcatctgggccaagttaggcgccgccgaggccagcgctgaacgtctccagggccggaggagccgcggggcgtccgggtctgagccgcagcaaatgggctccgacgtgcgggacctgaacgcgctgctgcccgccgtcccctccctgggtggcggcggcggctgtgccctgcctgtgagcggcgcggcgcagtgggcgccggtgctggactttgcgcccccgggcgcttcggcttacgggtcgttgggcggccccgcgccgccaccggctccgccgccacccccgccgccgccgcctcactccttcatcaaacaggagccgagctggggcggcgcggagccgcacgaggagcagtgcctgagcgccttcactgtccacttttccggccagttcactggcacagccggagcctgtcgctacgggcccttcggtcctcctccgcccagccaggcgtcatccggccaggccaggatgtttcctaacgcgccctacctgcccagctgcctcgagagccagcccgctattcgcaatcagggttacagcacggtcaccttcgacgggacgcccagctacggtcacacgccctcgcaccatgcggcgcagttccccaaccactcattcaagcatgaggatcccatgggccagcagggctcgctgggtgagcagcagtactcggtgccgcccccggtctatggctgccacacccccaccgacagctgcaccggcagccaggctttgctgctgaggacgccctacagcagtgacaatttataccaaatgacatcccagcttgaatgcatgacctggaatcagatgaacttaggagccaccttaaagggagttgctgctgggagctccagctcagtgaaatggacagaagggcagagcaaccacagcacagggtacgagagcgataaccacacaacgcccatcctctgcggagcccaatacagaatacacacgcacggtgtcttcagaggcattcaggatgtgcgacgtgtgcctggagtagccccgactcttgtacggtcggcatctgagaccagtgagaaacgccccttcatgtgtgcttacccaggctgcaataagagatattttaagctgtcccacttacagatgcacagcaggaagcacactggtgagaaaccataccagtgtgacttcaaggactgtgaacgaaggttttctcgttcagaccagctcaaaagacaccaaaggagacatacaggtgtgaaaccattccagtgtaaaacttgtcagcgaaagttctcccggtccgaccacctgaagacccacaccaggactcatacaggtgaaaagcccttcagctgtcggtggccaagttgtcagaaaaagtttgcccggtcagatgaattagtccgccatcacaacatgcatcagagaaacatgaccaaactccagctggcgctttgaggggtctccctcggggaccgttcagtgtcccaggcagcacagtgtgtgaactgctttcaagtctgactctccactcctcctcactaaaaaggaaacttcagttgatcttcttcatccaacttccaagacaagataccggtgcttctggaaactaccaggtgtgcctggaagagttggtctctgccctgcctacttttagttgactcacaggccctggagaagcagctaacaatgtctggttagttaaaagcccattgccatttggtgtggattttctactgtaagaagagccatagctgatcatgtccccctgacccttcccttctttttttatgctcgttttcgctggggatggaattattgtaccattttctatcat

SEQ ID NO: 4534 - DNA, 2768 bp, Homo sapiens
  source 1..2768: mol_type = genomic DNA
ctgcaggacccggcttccacgtgtgtcccggagccggcgtctcagcacacgctccgctccgggcctgggtgcctacagcagccagagcagcagggagtccgggacccgggcggcatctgggccaagttaggcgccgccgaggccagcgctgaacgtctccagggccggaggagccgcggggcgtccgggtctgagccgcagcaaatgggctccgacgtgcgggacctgaacgcgctgctgcccgccgtcccctccctgggtggcggcggcggctgtgccctgcctgtgagcggcgcggcgcagtgggcgccggtgctggactttgcgcccccgggcgcttcggcttacgggtcgttgggcggccccgcgccgccaccggctccgccgccacccccgccgccgccgcctcactccttcatcaaacaggagccgagctggggcggcgcggagccgcacgaggagcagtgcctgagcgccttcactgtccacttttccggccagttcactggcacagccggagcctgtcgctacgggcccttcggtcctcctccgcccagccaggcgtcatccggccaggccaggatgtttcctaacgcgccctacctgcccagctgcctcgagagccagcccgctattcgcaatcagggttacagcacggtcaccttcgacgggacgcccagctacggtcacacgccctcgcaccatgcggcgcagttccccaaccactcattcaagcatgaggatcccatgggccagcagggctcgctgggtgagcagcagtactcggtgccgcccccggtctatggctgccacacccccaccgacagctgcaccggcagccaggctttgctgctgaggacgccctacagcagtgacaatttataccaaatgacatcccagcttgaatgcatgacctggaatcagatgaacttaggagccaccttaaagggccacagcacagggtacgagagcgataaccacacaacgcccatcctctgcggagcccaatacagaatacacacgcacggtgtcttcagaggcattcaggatgtgcgacgtgtgcctggagtagccccgactcttgtacggtcggcatctgagaccagtgagaaacgccccttcatgtgtgcttacccaggctgcaataagagatattttaagctgtcccacttacagatgcacagcaggaagcacactggtgagaaaccataccagtgtgacttcaaggactgtgaacgaaggttttctcgttcagaccagctcaaaagacaccaaaggagacatacaggtgtgaaaccattccagtgtaaaacttgtcagcgaaagttctcccggtccgaccacctgaagacccacaccaggactcatacaggtgaaaagcccttcagctgtcggtggccaagttgtcagaaaaagtttgcccggtcagatgaattagtccgccatcacaacatgcatcagagaaacatgaccaaactccagctggcgctttgaggggtctccctcggggaccgttcagtgtcccaggcagcacagtgtgtgaactgctttcaagtctgactctccactcctcctcactaaaaaggaaacttcagttgatcttcttcatccaacttccaagacaagataccggtgcttctggaaactaccaggtgtgcctggaagagttggtctctgccctgcctacttttagttgactcacaggccctggagaagcagctaacaatgtctggttagttaaaagcccattgccatttggtgtggattttctactgtaagaagagccatagctgatcatgtccccctgacccttcccttctttttttatgctcgttttcgctggggatggaattattgtaccattttctatcatggaatatttataggccagggcatgtgtatgtgtctgctaatgtaaactttgtcatggtttccatttactaacagcaacagcaagaaataaatcagagagcaaggcatcgggggtgaatcttgtctaacattcccgaggtcagccaggctgctaacctggaaagcaggatgtagttctgccaggcaacttttaaagctcatgcatttcaagcagctgaagaaaaaatcagaactaaccagtacctctgtatagaaatctaaaagaattttaccattcagttaattcaatgtgaacactggcacactgctcttaagaaactatgaagatctgagatttttttgtgtatgtttttgactcttttgagtggtaatcatatgtgtctttatagatgtacatacctccttgcacaaatggaggggaattcattttcatcactgggagtgtccttagtgtataaaaaccatgctggtatatggcttcaagttgtaaaaatgaaagtgactttaaaagaaaataggggatggtccaggatctccactgataagactgtttttaagtaacttaaggacctttgggtctacaagtatatgtgaaaaaaatgagacttactgggtgaggaaatccattgtttaaagatggtcgtgtgtgtgtgtgtgtgtgtgtgtgtgtgtgtgttgtgttgtgttttgttttttaagggagggaatttattatttaccgttgcttgaaattactgtgtaaatatatgtctgataatgatttgctctttgacaactaaaattaggactgtataagtactagatgcatcactgggtgttgatcttacaagatattgatgataacacttaaaattgtaacctgcatttttcactttgctctcaattaaagtctattc

SEQ ID NO: 4535 - DNA, 578 bp, Homo sapiens
  source 1..578: mol_type = genomic DNA
agattcatttcgcttgcccgcgctgctcctgcggaagagctgcagtttatttttggggggtgaacaaccttctctgtcgatcaggttacagcacggtcaccttcgacgggacgcccagctacggtcacacgccctcgcaccatgcggcgcagttccccaaccactcattcaagcatgaggatcccatgggccagcagggctcgctgggtgagcagcagtactcggtgccgcccccggtctatggctgccacacccccaccgacagctgcaccggcagccaggctttgctgctgaggacgccctacagcagtgacaatttataccaaatgacatcccagcttgaatgcatgacctggaatcagatgaacttaggagccaccttaaagggagttgctgctgggagctccagctcagtgaaatggacagaagggcagagcaaccacagcacagggtacgagagcgataaccacacaacgcccatcctctgcggagcccaatacagaatacacacgcacggtgtcttcagaggcattcaggatgtgcgacgtgtgcctggagtagccccgactcttgtacgg

SEQ ID NO: 4536 - DNA, 551 bp, Homo sapiens
  source 1..551: mol_type = genomic DNA
cttaggagccaccttaaagggagttgctgctgggagctccagctcagtgaaatggacagaagggcagagcaaccacagcacagggtacgagagcgataaccacacaacgcccatcctctgcggagcccaatacagaatacacacgcacggtgtcttcagaggcattcaggatgtgcgacgtgtgcctggagtagccccgactcttgtacggtcggcatctgagaccagtgagaaacgccccttcatgtgtgcttacccaggctgcaataagagatattttaagctgtcccacttacagatgcacagcaggaagcacactggtgtgaaaccattccagtgtaaaacttgtcagcgaaagttctcccggtccgaccacctgaagacccacaccaggactcatacaggtaaaacaagtgaaaagcccttcagctgtcggtggccaagttgtcagaaaaagtttgcccggtcagatgaattagtccgccatcacaacatgcatcagagaaacatgaccaaactccagctggcgctttgaggggtctccctcgggg

SEQ ID NO: 4537 - DNA, 2421 bp, Homo sapiens
  source 1..2421: mol_type = genomic DNA
gctttcaccactgcccctcccggggggacctgaaggagagggtttgaggccggtctttgcccgccgaggtctgcgtgtccggtctgggaggaggcctaggagggctcgcgggccacgggcatccttgggcccgagttctggggtgcggacggacgtctcgagagtgggtgccgcgactcgggacccacggccctcgccgggcacggacagttgcggagcagggctctgaggattgtgcagtgccctgggtccctgcctactcctgggctcaggaatggagaagggttacagcacggtcaccttcgacgggacgcccagctacggtcacacgccctcgcaccatgcggcgcagttccccaaccactcattcaagcatgaggatcccatgggccagcagggctcgctgggtgagcagcagtactcggtgccgcccccggtctatggctgccacacccccaccgacagctgcaccggcagccaggctttgctgctgaggacgccctacagcagtgacaatttataccaaatgacatcccagcttgaatgcatgacctggaatcagatgaacttaggagccaccttaaagggccacagcacagggtacgagagcgataaccacacaacgcccatcctctgcggagcccaatacagaatacacacgcacggtgtcttcagaggcattcaggatgtgcgacgtgtgcctggagtagccccgactcttgtacggtcggcatctgagaccagtgagaaacgccccttcatgtgtgcttacccaggctgcaataagagatattttaagctgtcccacttacagatgcacagcaggaagcacactggtgagaaaccataccagtgtgacttcaaggactgtgaacgaaggttttctcgttcagaccagctcaaaagacaccaaaggagacatacaggtgtgaaaccattccagtgtaaaacttgtcagcgaaagttctcccggtccgaccacctgaagacccacaccaggactcatacaggtaaaacaagtgaaaagcccttcagctgtcggtggccaagttgtcagaaaaagtttgcccggtcagatgaattagtccgccatcacaacatgcatcagagaaacatgaccaaactccagctggcgctttgaggggtctccctcggggaccgttcagtgtcccaggcagcacagtgtgtgaactgctttcaagtctgactctccactcctcctcactaaaaaggaaacttcagttgatcttcttcatccaacttccaagacaagataccggtgcttctggaaactaccaggtgtgcctggaagagttggtctctgccctgcctacttttagttgactcacaggccctggagaagcagctaacaatgtctggttagttaaaagcccattgccatttggtgtggattttctactgtaagaagagccatagctgatcatgtccccctgacccttcccttctttttttatgctcgttttcgctggggatggaattattgtaccattttctatcatggaatatttataggccagggcatgtgtatgtgtctgctaatgtaaactttgtcatggtttccatttactaacagcaacagcaagaaataaatcagagagcaaggcatcgggggtgaatcttgtctaacattcccgaggtcagccaggctgctaacctggaaagcaggatgtagttctgccaggcaacttttaaagctcatgcatttcaagcagctgaagaaaaaatcagaactaaccagtacctctgtatagaaatctaaaagaattttaccattcagttaattcaatgtgaacactggcacactgctcttaagaaactatgaagatctgagatttttttgtgtatgtttttgactcttttgagtggtaatcatatgtgtctttatagatgtacatacctccttgcacaaatggaggggaattcattttcatcactgggagtgtccttagtgtataaaaaccatgctggtatatggcttcaagttgtaaaaatgaaagtgactttaaaagaaaataggggatggtccaggatctccactgataagactgtttttaagtaacttaaggacctttgggtctacaagtatatgtgaaaaaaatgagacttactgggtgaggaaatccattgtttaaagatggtcgtgtgtgtgtgtgtgtgtgtgtgtgtgtgtgtgttgtgttgtgttttgttttttaagggagggaatttattatttaccgttgcttgaaattactgtgtaaatatatgtctgataatgatttgctctttgacaactaaaattaggactgtataagtactagatgcatcactgggtgttgatcttacaagatattgatgataacacttaaaattgtaacctgcatttttcactttgctctcaattaaagtctattcaaaagg

SEQ ID NO: 4538 - DNA, 1930 bp, Homo sapiens
  source 1..1930: mol_type = genomic DNA
cttaacccgccgcctccgctctccccggctgcaggcggcgtgcaggaccagcggcggccgtgcaggcggaggacttcggcgcggctcctcctgggtgtgaccccgggcgcgcccgccgcgcgacgatgagggcgcggccgcaggtctgcgaggcgctgctcttcgccctggcgctccagaccggcgtgtgctatggcatcaagtggctggcgctgtccaagacaccatcggccctggcactgaaccagacgcaacactgcaagcagctggagggtctggtgtctgcacaggtgcagctgtgccgcagcaacctggagctcatgcacacggtggtgcacgccgcccgcgaggtcatgaaggcctgtcgccgggcctttgccgacatgcgctggaactgctcctccattgagctcgcccccaactatttgcttgacctggagagagggacccgggagtcggccttcgtgtatgcgctgtcggccgccgccatcagccacgccatcgcccgggcctgcacctccggcgacctgcccggctgctcctgcggccccgtcccaggtgagccacccgggcccgggaaccgctggggaggatgtgcggacaacctcagctacgggctcctcatgggggccaagttttccgatgctcctatgaaggtgaaaaaaacaggatcccaagccaataaactgatgcgtctacacaacagtgaagtggggagacaggctctgcgcgcctctctggaaatgaagtgtaagtgccatggggtgtctggctcctgctccatccgcacctgctggaaggggctgcaggagctgcaggatgtggctgctgacctcaagacccgatacctgtcggccaccaaggtagtgcaccgacccatgggcacccgcaagcacctggtgcccaaggacctggatatccggcctgtgaaggactcggaactcgtctatctgcagagctcacctgacttctgcatgaagaatgagaaggtgggctcccacgggacacaagacaggcagtgcaacaagacatccaacggaagcgacagctgcgaccttatgtgctgcgggcgtggctacaacccctacacagaccgcgtggtcgagcggtgccactgtaagtaccactggtgctgctacgtcacctgccgcaggtgtgagcgtaccgtggagcgctatgtctgcaagtgaggccctgccctccgccccacgcaggagcgaggactctgctcaaggaccctcagcaactggggccaggggcctggagacactccatggagctctgcttgtgaattccagatgccaggcatgggaggcggcttgtgctttgccttcacttggaagccaccaggaacagaaggtctggccaccctggaaggagggcaggacatcaaaggaaaccgacaagattaaaaataacttggcagcctgaggctctggagtgcccacaggctggtgtaaggagcggggcttgggatcggtgagactgatacagacttgacctttcagggccacagagaccagcctccgggaaggggtctgcccgccttcttcagaatgttctgcgggaccccctggcccaccctggggtctgagcctgctgggcccaccacatggaatcactagcttgggttgtaaatgttttcttttgttttttgctttttcttcctttgggatgtggaagctacagaaatatttataaaacatagctttttctttggggtggcacttctcaattcctctttatatattttatatatataaatatatatgtatatatataatgatctctattttaaaactagctttttaagcagctgtatgaaataaatgctgagtgagccccagcccgcccctgcagttcccggcctcgtcaagtgaactcggcagaccctggggctggcagagggagctctccagtttccaggcaa

SEQ ID NO: 4539 - DNA, 1638 bp, Homo sapiens
  source 1..1638: mol_type = genomic DNA
agatcgcgccaggcgaggaggagagctcgggcgagcggcgagcacaggccacgggagctgagcgcagcagagagcagccggagtccgcgcctgactccgcgcgggtcctgagccggccgcagcttgccaggatccccggcgtccttctcgcgccgcttcacgaagagggcgccttcgccgctcgcccagccggagtgcgcacgggcccgctggaaaccgcactcgccgctccctgggcaggccggggcacccgggcacgcagggcgcgcctggcgagcgccccgggaggcggcgtgcaggaccagcggcggccgtgcaggcggaggacttcggcgcggctcctcctgggtgtgaccccgggcgcgcccgccgcgcgacgatgagggcgcggccgcaggtctgcgaggcgctgctcttcgccctggcgctccagaccggcgtgtgctatggcatcaagtggctggcgctgtccaagacaccatcggccctggcactgaaccagacgcaacactgcaagcagctggagggtctggtgtctgcacaggtgcagctgtgccgcagcaacctggagctcatgcacacggtggtgcacgccgcccgcgaggtcatgaaggcctgtcgccgggcctttgccgacatgcgctggaactgctcctccattgagctcgcccccaactatttgcttgacctggagagagggacccgggagtcggccttcgtgtatgcgctgtcggccgccgccatcagccacgccatcgcccgggcctgcacctccggcgacctgcccggctgctcctgcggccccgtcccaggtgagccacccgggcccgggaaccgctggggaggatgtgcggacaacctcagctacgggctcctcatgggggccaagttttccgatgctcctatgaaggtgaaaaaaacaggatcccaagccaataaactgatgcgtctacacaacagtgaagtggggagacaggctctgcgcgcctctctgcttgtgaattccagatgccaggcatgggaggcggcttgtgctttgccttcacttggaagccaccaggaacagaaggtctggccaccctggaaggagggcaggacatcaaaggaaaccgacaagattaaaaataacttggcagcctgaggctctggagtgcccacaggctggtgtaaggagcggggcttgggatcggtgagactgatacagacttgacctttcagggccacagagaccagcctccgggaaggggtctgcccgccttcttcagaatgttctgcgggaccccctggcccaccctggggtctgagcctgctgggcccaccacatggaatcactagcttgggttgtaaatgttttcttttgttttttgctttttcttcctttgggatgtggaagctacagaaatatttataaaacatagctttttctttggggtggcacttctcaattcctctttatatattttatatatataaatatatatgtatatatataatgatctctattttaaaactagctttttaagcagctgtatgaaataaatgctgagtgagccccagcccgcccctgcagttcccggcctcgtcaagtgaactcggcagaccctggggctggcagagggagctctccagtttccaggc

SEQ ID NO: 4540 - DNA, 453 bp, Homo sapiens
  source 1..453: mol_type = genomic DNA
agctcgggcgagcggcgagcacaggccacgggagctgagcgcagcagagagcagccggagtccgcgcctgactccgcgcgggtcctgagccggccgcagcttgccaggatccccggcgtccttctcgcgccgcttcacgaagagggcgccttcgccgctcgcccagccggagtgcgcacgggcccgctggaaaccgcactcgccgctccctgggcaggccggggcacccgggcacgcagggcgcgcctggcgagcgccccgggagggataagccccagctccgggtcctcgactctgctgcctcgcctggactcctgattcctcattcctctcctttccgtcccaggcggcgtgcaggaccagcggcggccgtgcaggcggaggacttcggcgcggctcctcctgggtgtgaccccgggcgcgcccgccgcgcgacgatgagggcgcggccgc

SEQ ID NO: 4541 - DNA, 5837 bp, Homo sapiens
  source 1..5837: mol_type = genomic DNA
agttgcctgcgcgccctcgccggaccggcggctccctagttgcgccccgaccaggccctgcccttgctgccggctcgcgcgcgtccgcgccccctccattcctgggcgcatcccagctctgccccaactcgggagtccaggcccgggcgccagtgcccgcttcagctccggttcactgcgcccgccggacgcgcgccggaggactccgcagccctgctcctgaccgtccccccaggcttaacccggtcgctccgctcggattcctcggctgcgctcgctcgggtggcgacttcctccccgcgccccctccccctcgccatgaagaagtccattggaatattaagcccaggagttgctttggggatggctggaagtgcaatgtcttccaagttcttcctagtggctttggccatatttttctccttcgcccaggttgtaattgaagccaattcttggtggtcgctaggtatgaataaccctgttcagatgtcagaagtatatattataggagcacagcctctctgcagccaactggcaggactttctcaaggacagaagaaactgtgccacttgtatcaggaccacatgcagtacatcggagaaggcgcgaagacaggcatcaaagaatgccagtatcaattccgacatcgaaggtggaactgcagcactgtggataacacctctgtttttggcagggtgatgcagataggcagccgcgagacggccttcacatacgcggtgagcgcagcaggggtggtgaacgccatgagccgggcgtgccgcgagggcgagctgtccacctgcggctgcagccgcgccgcgcgccccaaggacctgccgcgggactggctctggggcggctgcggcgacaacatcgactatggctaccgctttgccaaggagttcgtggacgcccgcgagcgggagcgcatccacgccaagggctcctacgagagtgctcgcatcctcatgaacctgcacaacaacgaggccggccgcaggacggtgtacaacctggctgatgtggcctgcaagtgccatggggtgtccggctcatgtagcctgaagacatgctggctgcagctggcagacttccgcaaggtgggtgatgccctgaaggagaagtacgacagcgcggcggccatgcggctcaacagccggggcaagttggtacaggtcaacagccgcttcaactcgcccaccacacaagacctggtctacatcgaccccagccctgactactgcgtgcgcaatgagagcaccggctcgctgggcacgcagggccgcctgtgcaacaagacgtcggagggcatggatggctgcgagctcatgtgctgcggccgtggctacgaccagttcaagaccgtgcagacggagcgctgccactgcaagttccactggtgctgctacgtcaagtgcaagaagtgcacggagatcgtggaccagtttgtgtgcaagtagtgggtgccacccagcactcagccccgctcccaggacccgcttatttatagaaagtacagtgattctggtttttggtttttagaaatattttttatttttccccaagaattgcaaccggaaccattttttttcctgttaccatctaagaactctgtggtttattattaatattataattattatttggcaataatgggggtgggaaccaagaaaaatatttattttgtggatctttgaaaaggtaatacaagacttcttttgatagtatagaatgaaggggaaataacacataccctaacttagctgtgtggacatggtacacatccagaaggtaaagaaatacattttctttttctcaaatatgccatcatatgggatgggtaggttccagttgaaagagggtggtagaaatctattcacaattcagcttctatgaccaaaatgagttgtaaattctctggtgcaagataaaaggtcttgggaaaacaaaacaaaacaaaacaaacctcccttccccagcagggctgctagcttgctttctgcattttcaaaatgataatttacaatggaaggacaagaatgtcatattctcaaggaaaaaaggtatatcacatgtctcattctcctcaaatattccatttgcagacagaccgtcatattctaatagctcatgaaatttgggcagcagggaggaaagtccccagaaattaaaaaatttaaaactcttatgtcaagatgttgatttgaagctgttataagaattaggattccagattgtaaaaagatccccaaatgattctggacactagatttttttgtttggggaggttggcttgaacataaatgaaaatatcctgttattttcttagggatacttggttagtaaattataatagtaaaaataatacatgaatcccattcacaggttctcagcccaagcaacaaggtaattgcgtgccattcagcactgcaccagagcagacaacctatttgaggaaaaacagtgaaatccaccttcctcttcacactgagccctctctgattcctccgtgttgtgatgtgatgctggccacgtttccaaacggcagctccactgggtcccctttggttgtaggacaggaaatgaaacattaggagctctgcttggaaaacagttcactacttagggatttttgtttcctaaaacttttattttgaggagcagtagttttctatgttttaatgacagaacttggctaatggaattcacagaggtgttgcagcgtatcactgttatgatcctgtgtttagattatccactcatgcttctcctattgtactgcaggtgtaccttaaaactgttcccagtgtacttgaacagttgcatttataaggggggaaatgtggtttaatggtgcctgatatctcaaagtcttttgtacataacatatatatatatatacatatatataaatataaatataaatatatctcattgcagccagtgatttagatttacagtttactctggggttatttctctgtctagagcattgttgtccttcactgcagtccagttgggattattccaaaagttttttgagtcttgagcttgggctgtggccctgctgtgatcataccttgagcacgacgaagcaaccttgtttctgaggaagcttgagttctgactcactgaaatgcgtgttgggttgaagatatcttttttcttttctgcctcacccctttgtctccaacctccatttctgttcactttgtggagagggcattacttgttcgttatagacatggacgttaagagatattcaaaactcagaagcatcagcaatgtttctcttttcttagttcattctgcagaatggaaacccatgcctattagaaatgacagtacttattaattgagtccctaaggaatattcagcccactacatagatagcttttttttttttttttttaataaggacacctctttccaaacagtgccatcaaatatgttcttatctcagacttacgttgttttaaaagtttggaaagatacacatctttcataccccccttaggcaggttggctttcatatcacctcagccaactgtggctcttaatttattgcataatgatattcacatcccctcagttgcagtgaattgtgagcaaaagatcttgaaagcaaaaagcactaattagtttaaaatgtcacttttttggtttttattatacaaaaaccatgaagtactttttttatttgctaaatcagattgttcctttttagtgactcatgtttatgaagagagttgagtttaacaatcctagcttttaaaagaaactatttaatgtaaaatattctacatgtcattcagatattatgtatatcttctagcctttattctgtacttttaatgtacatatttctgtcttgcgtgatttgtatatttcactggtttaaaaaacaaacatcgaaaggcttatgccaaatggaagatagaatataaaataaaacgttacttgtatattggtaagtggtttcaattgtccttcagataattcatgtggagatttttggagaaaccatgacggatagtttaggatgactacatgtcaaagtaataaaagagtggtgaattttaccaaaaccaagctatttggaagcttcaaaaggtttctatatgtaatggaacaaaaggggaattctcttttcctatatatgttccttacaaaaaaaaaaaaaaaagaaatcaagcagatggcttaaagctggttataggattgctcacattcttttagcattatgcatgtaacttaattgttttagagcgtgttgctgttgtaacatcccagagaagaatgaaaaggcacatgcttttatccgtgaccagatttttagtccaaaaaaatgtatttttttgtgtgtttaccactgcaactattgcacctctctatttgaatttactgtggaccatgtgtggtgtctctatgccctttgaaagcagtttttataaaaagaaagcccgggtctgcagagaatgaaaactggttggaaactaaaggttcattgtgttaagtgcaattaatacaagttattgtgcttttcaaaaatgtacacggaaatctggacagtgctccacagattgatacattagcctttgctttttctctttccggataaccttgtaacatattgaaaccttttaaggatgccaagaatgcattattccacaaaaaaacagcagaccaacatatagagtgtttaaaatagcatttctgggcaaattcaaactcttgtggttctaggactcacatctgtttcagtttttcctcagttgtatattgaccagtgttctttattgcaaaaacatatacccgatttagcagtgtcagcgtattttttcttctcatcctggagcgtattcaagatcttcccaatacaagaaaattaataaaaaatttatatataggcagcagcaaaagagccatgttcaaaatagtcattatgggctcaaatagaaagaagacttttaagttttaatccagtttatctgttgagttctgtgagctactgacctcctgagactggcactgtgtaagttttagttgcctaccctagctcttttctcgtacaattttgccaataccaagtttcaatttgtttttacaaaacattattcaagccactagaattatcaaatatgacgctatagcagagtaaatactctgaataagagaccggtactagctaactccaagagatcgttagcagcatcagtccacaaacacttagtggcccacaatatatagagagatagaaaaggtagttataacttgaagcatgtatttaatgcaaataggcacgaaggcacaggtctaaaatactacattgtcactgtaagctatacttttaaaatatttattttttttaaagtattttctagtcttttctctctctgtggaatggtgaaagagagatgccgtgttttgaaagtaagatgatgaaatgaatttttaattcaagaaacattcagaaacataggaattaaaacttagagaaatgatctaatttccctgttcacacaaactttacactttaatctgatgattggatattttattttagtgaaacatcatcttgttagctaactttaaaaaatggatgtagaatgattaaaggttggtatgatttttttttaatgtatcagtttgaacctagaatattgaattaaaatgctgtctcagtattttaaaagcaaaaaaggaatggaggaaaattgcatcttagaccatttttatatgcagtgtacaatttgctgggctagaaatgagataaagattatttatttttgttcatatcttgtacttttctattaaaatcattttatgaaatcc

SEQ ID NO: 4542 - DNA, 491 bp, Homo sapiens
  source 1..491: mol_type = genomic DNA
caggcttaacccggtcgctccgctcggattcctcggctgcgctcgctcgggtggcgacttcctccccgcgccccctccccctcgccatgaagaagtccattggaatattaagcccaggagttgctttggggatggctggaagtgcaatgtcttccaagttcttcctagtggctttggccatatttttctccttcgcccaggttgtaattgaagccaattcttggtggtcgctaggtatgaataaccctgttcagatgtcacaagacgtcggagggcatggatggctgcgagctcatgtgctgcggccgtggctacgaccagttcaagaccgtgcagacggagcgctgccactgcaagttccactggtgctgctacgtcaagtgcaagaagtgcacggagatcgtggaccagtttgtgtgcaagtagtgggtgccacccagcactcagccccgctcccaggacccgcttatttatagaaagtacagtgattc

SEQ ID NO: 4543 - DNA, 6042 bp, Homo sapiens
  source 1..6042: mol_type = genomic DNA
agtctgcggccactgggcagaacggcaagggagagggggaagggcggagggacgcagcctgggggcgatttgccgggcggagacgctctttttcagacaccctcctcaggtcttttgcacaatcacgcccacatttggggttggaaagccctaattaccgccgtcgctgatggacgttggaaacggagcgcctctccgtggaacagttgcctgcgcgccctcgccggaccggcggctccctagttgcgccccgaccaggccctgcccttgctgccggctcgcgcgcgtccgcgccccctccattcctgggcgcatcccagctctgccccaactcgggagtccaggcccgggcgccagtgcccgcttcagctccggttcactgcgcccgccggacgcgcgccggaggactccgcagccctgctcctgaccgtccccccaggcttaacccggtcgctccgctcggattcctcggctgcgctcgctcgggtggcgacttcctccccgcgccccctccccctcgccatgaagaagtccattggaatattaagcccaggagttgctttggggatggctggaagtgcaatgtcttccaagttcttcctagtggctttggccatatttttctccttcgcccaggttgtaattgaagccaattcttggtggtcgctaggtatgaataaccctgttcagatgtcagaagtatatattataggagcacagcctctctgcagccaactggcaggactttctcaaggacagaagaaactgtgccacttgtatcaggaccacatgcagtacatcggagaaggcgcgaagacaggcatcaaagaatgccagtatcaattccgacatcgaaggtggaactgcagcactgtggataacacctctgtttttggcagggtgatgcagataggcagccgcgagacggccttcacatacgcggtgagcgcagcaggggtggtgaacgccatgagccgggcgtgccgcgagggcgagctgtccacctgcggctgcagccgcgccgcgcgccccaaggacctgccgcgggactggctctggggcggctgcggcgacaacatcgactatggctaccgctttgccaaggagttcgtggacgcccgcgagcgggagcgcatccacgccaagggctcctacgagagtgctcgcatcctcatgaacctgcacaacaacgaggccggccgcaggacggtgtacaacctggctgatgtggcctgcaagtgccatggggtgtccggctcatgtagcctgaagacatgctggctgcagctggcagacttccgcaaggtgggtgatgccctgaaggagaagtacgacagcgcggcggccatgcggctcaacagccggggcaagttggtacaggtcaacagccgcttcaactcgcccaccacacaagacctggtctacatcgaccccagccctgactactgcgtgcgcaatgagagcaccggctcgctgggcacgcagggccgcctgtgcaacaagacgtcggagggcatggatggctgcgagctcatgtgctgcggccgtggctacgaccagttcaagaccgtgcagacggagcgctgccactgcaagttccactggtgctgctacgtcaagtgcaagaagtgcacggagatcgtggaccagtttgtgtgcaagtagtgggtgccacccagcactcagccccgctcccaggacccgcttatttatagaaagtacagtgattctggtttttggtttttagaaatattttttatttttccccaagaattgcaaccggaaccattttttttcctgttaccatctaagaactctgtggtttattattaatattataattattatttggcaataatgggggtgggaaccaagaaaaatatttattttgtggatctttgaaaaggtaatacaagacttcttttgatagtatagaatgaaggggaaataacacataccctaacttagctgtgtggacatggtacacatccagaaggtaaagaaatacattttctttttctcaaatatgccatcatatgggatgggtaggttccagttgaaagagggtggtagaaatctattcacaattcagcttctatgaccaaaatgagttgtaaattctctggtgcaagataaaaggtcttgggaaaacaaaacaaaacaaaacaaacctcccttccccagcagggctgctagcttgctttctgcattttcaaaatgataatttacaatggaaggacaagaatgtcatattctcaaggaaaaaaggtatatcacatgtctcattctcctcaaatattccatttgcagacagaccgtcatattctaatagctcatgaaatttgggcagcagggaggaaagtccccagaaattaaaaaatttaaaactcttatgtcaagatgttgatttgaagctgttataagaattaggattccagattgtaaaaagatccccaaatgattctggacactagatttttttgtttggggaggttggcttgaacataaatgaaaatatcctgttattttcttagggatacttggttagtaaattataatagtaaaaataatacatgaatcccattcacaggttctcagcccaagcaacaaggtaattgcgtgccattcagcactgcaccagagcagacaacctatttgaggaaaaacagtgaaatccaccttcctcttcacactgagccctctctgattcctccgtgttgtgatgtgatgctggccacgtttccaaacggcagctccactgggtcccctttggttgtaggacaggaaatgaaacattaggagctctgcttggaaaacagttcactacttagggatttttgtttcctaaaacttttattttgaggagcagtagttttctatgttttaatgacagaacttggctaatggaattcacagaggtgttgcagcgtatcactgttatgatcctgtgtttagattatccactcatgcttctcctattgtactgcaggtgtaccttaaaactgttcccagtgtacttgaacagttgcatttataaggggggaaatgtggtttaatggtgcctgatatctcaaagtcttttgtacataacatatatatatatatacatatatataaatataaatataaatatatctcattgcagccagtgatttagatttacagtttactctggggttatttctctgtctagagcattgttgtccttcactgcagtccagttgggattattccaaaagttttttgagtcttgagcttgggctgtggccctgctgtgatcataccttgagcacgacgaagcaaccttgtttctgaggaagcttgagttctgactcactgaaatgcgtgttgggttgaagatatcttttttcttttctgcctcacccctttgtctccaacctccatttctgttcactttgtggagagggcattacttgttcgttatagacatggacgttaagagatattcaaaactcagaagcatcagcaatgtttctcttttcttagttcattctgcagaatggaaacccatgcctattagaaatgacagtacttattaattgagtccctaaggaatattcagcccactacatagatagcttttttttttttttttttaataaggacacctctttccaaacagtgccatcaaatatgttcttatctcagacttacgttgttttaaaagtttggaaagatacacatctttcataccccccttaggcaggttggctttcatatcacctcagccaactgtggctcttaatttattgcataatgatattcacatcccctcagttgcagtgaattgtgagcaaaagatcttgaaagcaaaaagcactaattagtttaaaatgtcacttttttggtttttattatacaaaaaccatgaagtactttttttatttgctaaatcagattgttcctttttagtgactcatgtttatgaagagagttgagtttaacaatcctagcttttaaaagaaactatttaatgtaaaatattctacatgtcattcagatattatgtatatcttctagcctttattctgtacttttaatgtacatatttctgtcttgcgtgatttgtatatttcactggtttaaaaaacaaacatcgaaaggcttatgccaaatggaagatagaatataaaataaaacgttacttgtatattggtaagtggtttcaattgtccttcagataattcatgtggagatttttggagaaaccatgacggatagtttaggatgactacatgtcaaagtaataaaagagtggtgaattttaccaaaaccaagctatttggaagcttcaaaaggtttctatatgtaatggaacaaaaggggaattctcttttcctatatatgttccttacaaaaaaaaaaaaaaaagaaatcaagcagatggcttaaagctggttataggattgctcacattcttttagcattatgcatgtaacttaattgttttagagcgtgttgctgttgtaacatcccagagaagaatgaaaaggcacatgcttttatccgtgaccagatttttagtccaaaaaaatgtatttttttgtgtgtttaccactgcaactattgcacctctctatttgaatttactgtggaccatgtgtggtgtctctatgccctttgaaagcagtttttataaaaagaaagcccgggtctgcagagaatgaaaactggttggaaactaaaggttcattgtgttaagtgcaattaatacaagttattgtgcttttcaaaaatgtacacggaaatctggacagtgctccacagattgatacattagcctttgctttttctctttccggataaccttgtaacatattgaaaccttttaaggatgccaagaatgcattattccacaaaaaaacagcagaccaacatatagagtgtttaaaatagcatttctgggcaaattcaaactcttgtggttctaggactcacatctgtttcagtttttcctcagttgtatattgaccagtgttctttattgcaaaaacatatacccgatttagcagtgtcagcgtattttttcttctcatcctggagcgtattcaagatcttcccaatacaagaaaattaataaaaaatttatatataggcagcagcaaaagagccatgttcaaaatagtcattatgggctcaaatagaaagaagacttttaagttttaatccagtttatctgttgagttctgtgagctactgacctcctgagactggcactgtgtaagttttagttgcctaccctagctcttttctcgtacaattttgccaataccaagtttcaatttgtttttacaaaacattattcaagccactagaattatcaaatatgacgctatagcagagtaaatactctgaataagagaccggtactagctaactccaagagatcgttagcagcatcagtccacaaacacttagtggcccacaatatatagagagatagaaaaggtagttataacttgaagcatgtatttaatgcaaataggcacgaaggcacaggtctaaaatactacattgtcactgtaagctatacttttaaaatatttattttttttaaagtattttctagtcttttctctctctgtggaatggtgaaagagagatgccgtgttttgaaagtaagatgatgaaatgaatttttaattcaagaaacattcagaaacataggaattaaaacttagagaaatgatctaatttccctgttcacacaaactttacactttaatctgatgattggatattttattttagtgaaacatcatcttgttagctaactttaaaaaatggatgtagaatgattaaaggttggtatgatttttttttaatgtatcagtttgaacctagaatattgaattaaaatgctgtctcagtattttaaaagcaaaaaaggaatggaggaaaattgcatcttagaccatttttatatgcagtgtacaatttgctgggctagaaatgagataaagattatttatttttgttcatatcttgtacttttctattaaaatcattttatgaaatcca

SEQ ID NO: 4544 - DNA, 959 bp, Homo sapiens
  source 1..959: mol_type = genomic DNA
ccagggctttgactcaacagaattgagacacgtttgtaatcgctggcgtgccccgcgcacaggatcccagcgaaatcagatttcctggtgaggttgcgtgggtggattaatttggaaaaagaaactgcctatatcttgccatcaaaaaactcacggaggagaagcgcagtcaatcaacagtaaacttaagagaccccggatgcttccgttgtttaaacttgtatgcttgaaaattatctgagaggcaataaacatctgctcctttcttccctctccagaagtccattggaatattaagcccaggagttgctttggggatggctggaagtgcaatgtcttccaagttcttcctagtggctttggccatatttttctccttcgcccaggttgtaattgaagccaattcttggtggtcgctaggtatgaataaccctgttcagatgtcagaagtatatattataggagcacagcctctctgcagccaactggcaggactttctcaaggacagaagaaactgtgccacttgtatcaggaccacatgcagtacatcggagaaggcgcgaagacaggcatcaaagaatgccagtatcaattccgacatcgaaggtggaactgcagcactgtggataacacctctgtttttggcagggtgatgcagataggcagccgcgagacggccttcacatacgcggtgagcgcagcaggggtggtgaacgccatgagccgggcgtgccgcgagggcgagctgtccacctgcggctgcagccgcgccgcgcgccccaaggacctgccgcgggactggctctggggcggctgcggcgacaacatcgactatggctaccgctttgccaaggagttcgtggacgcccgcgagcgggagcgcatccacgccaagggctcctacgagagtgctcgcatcctcatgaacctgcacaacaacgaggccggccgcagggtg

SEQ ID NO: 4545 - DNA, 1299 bp, Homo sapiens
  source 1..1299: mol_type = genomic DNA
actcgcctccgtgctcctctcgcccatggaattaattctggctccacttgttgctcggcccagaagtccattggaatattaagcccaggagttgctttggggatggctggaagtgcaatgtcttccaagttcttcctagtggctttggccatatttttctccttcgcccaggttgtaattgaagccaattcttggtggtcgctaggtatgaataaccctgttcagatgtcagaagtatatattataggagcacagcctctctgcagccaactggcaggactttctcaaggacagaagaaactgtgccacttgtatcaggaccacatgcagtacatcggagaaggcgcgaagacaggcatcaaagaatgccagtatcaattccgacatcgaaggtggaactgcagcactgtggataacacctctgtttttggcagggtgatgcagataggcagccgcgagacggccttcacatacgcggtgagcgcagcaggggtggtgaacgccatgagccgggcgtgccgcgagggcgagctgtccacctgcggctgcagccgcgccgcgcgccccaaggacctgccgcgggactggctctggggcggctgcggcgacaacatcgactatggctaccgctttgccaaggagttcgtggacgcccgcgagcgggagcgcatccacgccaagggctcctacgagagtgctcgcatcctcatgaacctgcacaacaacgaggccggccgcaggacggtgtacaacctggctgatgtggcctgcaagtgccatggggtgtccggctcatgtagcctgaagacatgctggctgcagctggcagacttccgcaaggtgggtgatgccctgaaggagaagtacgacagcgcggcggccatgcggctcaacagccggggcaagttggtacaggtcaacagccgcttcaactcgcccaccacacaagacctggtctacatcgaccccagccctgactactgcgtgcgcaatgagagcaccggctcgctgggcacgcagggccgcctgtgcaacaagacgtcggagggcatggatggctgcgagctcatgtgctgcggccgtggctacgaccagttcaagaccgtgcagacggagcgctgccactgcaagttccactggtgctgctacgtcaagtgcaagaagtgcacggagatcgtggaccagtttgtgtgcaagtagtgggtgccacccagcactcagccccgctcccaggacccgcttatttatagaaagtacagtgattctggtttttggtttttagaaatattttttattttt

SEQ ID NO: 4546 - DNA, 2976 bp, Homo sapiens
  source 1..2976: mol_type = genomic DNA
actaactcgcggctgcaggatcagcgtctggaagcagacgtttcggctacagacccagagaggaggagctggagatcaggaggcgtgagccgccaagagtttgcagaatctgtggtgtgaatgaactgggggcacctgggcgcacagatcgccccccttcccccgccccgggccacagttgagtagtggtacatttttttcaccctcttgtgaagaatttctttttattattatttgtcgtaaggtcttttgcacaatcacgcccacatttggggttggaaagccctaattaccgccgtcgctgatggacgttggaaacggagcgcctctccgtggaacagttgcctgcgcgccctcgccggaccggcggctccctagttgcgccccgaccaggccctgcccttgctgccggctcgcgcgcgtccgcgccccctccattcctgggcgcatcccagctctgccccaactcgggagtccaggcccgggcgccagtgcccgcttcagctccggttcactgcgcccgccggacgcgcgccggaggactccgcagccctgctcctgaccgtccccccaggcttaacccggtcgctccgctcggattcctcggctgcgctcgctcgggtggcgacttcctccccgcgccccctccccctcgccatgaagaagtccattggaatattaagcccaggagttgctttggggatggctggaagtgcaatgtcttccaagttcttcctagtggctttggccatatttttctccttcgcccaggactttctcaaggacagaagaaactgtgccacttgtatcaggaccacatgcagtacatcggagaaggcgcgaagacaggcatcaaagaatgccagtatcaattccgacatcgaaggtggaactgcagcactgtggataacacctctgtttttggcagggtgatgcagataggcagccgcgagacggccttcacatacgcggtgagcgcagcaggggtggtgaacgccatgagccgggcgtgccgcgagggcgagctgtccacctgcggctgcagccgcgccgcgcgccccaaggacctgccgcgggactggctctggggcggctgcggcgacaacatcgactatggctaccgctttgccaaggagttcgtggacgcccgcgagcgggagcgcatccacgccaagggctcctacgagagtgctcgcatcctcatgaacctgcacaacaacgaggccggccgcaggacggtgtacaacctggctgatgtggcctgcaagtgccatggggtgtccggctcatgtagcctgaagacatgctggctgcagctggcagacttccgcaaggtgggtgatgccctgaaggagaagtacgacagcgcggcggccatgcggctcaacagccggggcaagttggtacaggtcaacagccgcttcaactcgcccaccacacaagacctggtctacatcgaccccagccctgactactgcgtgcgcaatgagagcaccggctcgctgggcacgcagggccgcctgtgcaacaagacgtcggagggcatggatggctgcgagctcatgtgctgcggccgtggctacgaccagttcaagaccgtgcagacggagcgctgccactgcaagttccactggtgctgctacgtcaagtgcaagaagtgcacggagatcgtggaccagtttgtgtgcaagtagtgggtgccacccagcactcagccccgctcccaggacccgcttatttatagaaagtacagtgattctggtttttggtttttagaaatattttttatttttccccaagaattgcaaccggaaccattttttttcctgttaccatctaagaactctgtggtttattattaatattataattattatttggcaataatgggggtgggaaccaagaaaaatatttattttgtggatctttgaaaaggtaatacaagacttcttttgatagtatagaatgaaggggaaataacacataccctaacttagctgtgtggacatggtacacatccagaaggtaaagaaatacattttctttttctcaaatatgccatcatatgggatgggtaggttccagttgaaagagggtggtagaaatctattcacaattcagcttctatgaccaaaatgagttgtaaattctctggtgcaagataaaaggtcttgggaaaacaaaacaaaacaaaacaaacctcccttccccagcagggctgctagcttgctttctgcattttcaaaatgataatttacaatggaaggacaagaatgtcatattctcaaggaaaaaaggtatatcacatgtctcattctcctcaaatattccatttgcagaaatgacagtacttattaattgagtccctaaggaatattcagcccactacatagatagcttttttttttttttttttaataaggacacctctttccaaacagtgccatcaaatatgttcttatctcagacttacgttgttttaaaagtttggaaagatacacatctttcataccccccttaggcaggttggctttcatatcacctcagccaactgtggctcttaatttattgcataatgatattcacatcccctcagttgcagtgaattgtgagcaaaagatcttgaaagcaaaaagcactaattagtttaaaatgtcacttttttggtttttattatacaaaaaccatgaagtactttttttatttgctaaatcagattgttcctttttagtgactcatgtttatgaagagagttgagtttaacaatcctagcttttaaaagaaactatttaatgtaaaatattctacatgtcattcagatattatgtatatcttctagcctttattctgtacttttaatgtacatatttctgtcttgcgtgatttgtatatttcactggtttaaaaaacaaacatcgaaaggcttatgccaaatggaagatagaatataaaataaaacgttacttgtatattggt

SEQ ID NO: 4547 - DNA, 2184 bp, Homo sapiens
  source 1..2184: mol_type = genomic DNA
tattcttccaaatggaaactgctaatttttgaagcagaaggttgacagcttcagtaagatctcaagagagcgagaagactggaatcagggaaccctactctggaaactgtcagtcccagggcactggggagggctgaggccgaccatgcccagcctgctgctgctgttcacggctgctctgctgtccagctgggctcagcttctgacagacgccaactcctggtggtcattagctttgaacccggtgcagagacccgagatgtttatcatcggtgcccagcccgtgtgcagtcagcttcccgggctctcccctggccagaggaagctgtgccaattgtaccaggagcacatggcctacataggggagggagccaagactggcatcaaggaatgccagcaccagttccggcagcggcggtggaattgcagcacagcggacaacgcatctgtctttgggagagtcatgcagataggcagccgagagaccgccttcacccacgcggtgagcgccgcgggcgtggtcaacgccatcagccgggcctgccgcgagggcgagctctccacctgcggctgcagccggacggcgcggcccaaggacctgccccgggactggctgtggggcggctgtggggacaacgtggagtacggctaccgcttcgccaaggagtttgtggatgcccgggagcgagagaagaactttgccaaaggatcagaggagcagggccgggtgctcatgaacctgcaaaacaacgaggccggtcgcagggctgtgtataagatggcagacgtagcctgcaaatgccacggcgtctcggggtcctgcagcctcaagacctgctggctgcagctggccgagttccgcaaggtcggggaccggctgaaggagaagtacgacagcgcggccgccatgcgcgtcacccgcaagggccggctggagctggtcaacagccgcttcacccagcccaccccggaggacctggtctatgtggaccccagccccgactactgcctgcgcaacgagagcacgggctccctgggcacgcagggccgcctctgcaacaagacctcggagggcatggatggctgtgagctcatgtgctgcgggcgtggctacaaccagttcaagagcgtgcaggtggagcgctgccactgcaagttccactggtgctgcttcgtcaggtgtaagaagtgcacggagatcgtggaccagtacatctgtaaatagcccggagggcctgctcccggcccccctgcactctgcctcacaaaggtctatattatataaatctatataaatctattttatatttgtataagtaaatgggtgggtgctatacaatggaaagatgaaaatggaaaggaagagcttatttaagagacgctggagatctctgaggagtggactttgctggttctctcctcttggtgggtgggagacagggctttttctctccctctggcgaggactctcaggatgtagggacttggaaatatttactgtctgtccaccacggcctggaggagggaggttgtggttggatggaggagatgatcttgtctggaagtctagagtctttgttggttagaggactgcctgtgatcctggccactaggccaagaggccctatgaaggtggcgggaactcagcttcaacctcgatgtcttcagggtcttgtccagaatgtagatgggttccgtaagaggcctggtgctctcttactctttcatccacgtgcacttgtgcggcatctgcagtttacaggaacggctccttccctaaaatgagaagtccaaggtcatctctggcccagtgaccacagagagatctgcacctcccggacttcaggcctgcctttccagcgagaattcttcatcctccacggttcactagctcctacctgaagaggaaagggggccatttgacctgacatgtcaggaaagccctaaactgaatgtttgcgcctgggctgcagaagccagggtgcatgaccaggctgcgtggacgttatactgtcttcccccacccccggggaggggaagcttgagctgctgctgtcactcctccaccgagggaggcctcacaaaccacaggacgctgcaacgggtcaggctggcgggcccggcgtgctcatcatctctgccccaggtgtacggtttctctctgacattaaatgcccttcatgg

SEQ ID NO: 4548 - DNA, 2303 bp, Homo sapiens
  source 1..2303: mol_type = genomic DNA
ggctctagttaccgtgtcagcctgtcctgggggcagtcacagccacagtgaccattagcaggcacccaggcctgtctttggctcggaaacggtggcccccaatgtagcctagtttgaacctaggaactgcaggaccagagagattccactggagcctgatggacgggtgacagagggaaccctactctggaaactgtcagtcccagggcactggggagggctgaggccgaccatgcccagcctgctgctgctgttcacggctgctctgctgtccagctgggctcagcttctgacagacgccaactcctggtggtcattagctttgaacccggtgcagagacccgagatgtttatcatcggtgcccagcccgtgtgcagtcagcttcccgggctctcccctggccagaggaagctgtgccaattgtaccaggagcacatggcctacataggggagggagccaagactggcatcaaggaatgccagcaccagttccggcagcggcggtggaattgcagcacagcggacaacgcatctgtctttgggagagtcatgcagataggcagccgagagaccgccttcacccacgcggtgagcgccgcgggcgtggtcaacgccatcagccgggcctgccgcgagggcgagctctccacctgcggctgcagccggacggcgcggcccaaggacctgccccgggactggctgtggggcggctgtggggacaacgtggagtacggctaccgcttcgccaaggagtttgtggatgcccgggagcgagagaagaactttgccaaaggatcagaggagcagggccgggtgctcatgaacctgcaaaacaacgaggccggtcgcagggctgtgtataagatggcagacgtagcctgcaaatgccacggcgtctcggggtcctgcagcctcaagacctgctggctgcagctggccgagttccgcaaggtcggggaccggctgaaggagaagtacgacagcgcggccgccatgcgcgtcacccgcaagggccggctggagctggtcaacagccgcttcacccagcccaccccggaggacctggtctatgtggaccccagccccgactactgcctgcgcaacgagagcacgggctccctgggcacgcagggccgcctctgcaacaagacctcggagggcatggatggctgtgagctcatgtgctgcgggcgtggctacaaccagttcaagagcgtgcaggtggagcgctgccactgcaagttccactggtgctgcttcgtcaggtgtaagaagtgcacggagatcgtggaccagtacatctgtaaatagcccggagggcctgctcccggcccccctgcactctgcctcacaaaggtctatattatataaatctatataaatctattttatatttgtataagtaaatgggtgggtgctatacaatggaaagatgaaaatggaaaggaagagcttatttaagagacgctggagatctctgaggagtggactttgctggttctctcctcttggtgggtgggagacagggctttttctctccctctggcgaggactctcaggatgtagggacttggaaatatttactgtctgtccaccacggcctggaggagggaggttgtggttggatggaggagatgatcttgtctggaagtctagagtctttgttggttagaggactgcctgtgatcctggccactaggccaagaggccctatgaaggtggcgggaactcagcttcaacctcgatgtcttcagggtcttgtccagaatgtagatgggttccgtaagaggcctggtgctctcttactctttcatccacgtgcacttgtgcggcatctgcagtttacaggaacggctccttccctaaaatgagaagtccaaggtcatctctggcccagtgaccacagagagatctgcacctcccggacttcaggcctgcctttccagcgagaattcttcatcctccacggttcactagctcctacctgaagaggaaagggggccatttgacctgacatgtcaggaaagccctaaactgaatgtttgcgcctgggctgcagaagccagggtgcatgaccaggctgcgtggacgttatactgtcttcccccacccccggggaggggaagcttgagctgctgctgtcactcctccaccgagggaggcctcacaaaccacaggacgctgcaacgggtcaggctggcgggcccggcgtgctcatcatctctgccccaggtgtacggtttctctctgacattaaatgcccttcatggaggttttgctccctttccttatttggacccac

SEQ ID NO: 4549 - DNA, 1437 bp, Homo sapiens
  source 1..1437: mol_type = genomic DNA
aaatgctccagatcctcagtgttcaagaacctcaggaagcttcgcagtcctgcctcgtgcctgcttgaacagctggatgtgggcaggaggctgtgggagcgggccatgccagcagaatcccgccttactctggggacttactcttgtcacagcccctggtgtcctgagggtcatttcagtgtcatggaaccctactctggaaactgtcagtcccagggcactggggagggctgaggccgaccatgcccagcctgctgctgctgttcacggctgctctgctgtccagctgggctcagcttctgacagacgccaactcctggtggtcattagctttgaacccggtgcagagacccgagatgtttatcatcggtgcccagcccgtgtgcagtcagcttcccgggctctcccctggccagaggaagctgtgccaattgtaccaggagcacatggcctacataggggagggagccaagactggcatcaaggaatgccagcaccagttccggcagcggcggtggaattgcagcacagcggacaacgcatctgtctttgggagagtcatgcagataggcagccgagagaccgccttcacccacgcggtgagcgccgcgggcgtggtcaacgccatcagccgggcctgccgcgagggcgagctctccacctgcggctgcagccggacggcgcggcccaaggacctgccccgggactggctgtggggcggctgtggggacaacgtggagtacggctaccgcttcgccaaggagtttgtggatgcccgggagcgagagaagaactttgccaaaggatcagaggagcagggccgggtgctcatgaacctgcaaaacaacgaggccggtcgcagggctgtgtataagatggcagacgtagcctgcaaatgccacggcgtctcggggtcctgcagcctcaagacctgctggctgcagctggccgagttccgcaaggtcggggaccggctgaaggagaagtacgacagcgcggccgccatgcgcgtcacccgcaagggccggctggagctggtcaacagccgcttcacccagcccaccccggaggacctggtctatgtggaccccagccccgactactgcctgcgcaacgagagcacgggctccctgggcacgcagggccgcctctgcaacaagacctcggagggcatggatggctgtgagctcatgtgctgcgggcgtggctacaaccagttcaagagcgtgcaggtggagcgctgccactgcaagttccactggtgctgcttcgtcaggtgtaagaagtgcacggagatcgtggaccagtacatctgtaaatagcccggagggcctgctcccggcccccctgcactctgcctcacaaaggtctatattatataaatctatataaatctattttatatttgtataagtaaatgggtgggtgctatacaat

SEQ ID NO: 4550 - DNA, 4435 bp, Homo sapiens
  source 1..4435: mol_type = genomic DNA
atgttggattgtgcggccgccgccgccgctgcgggagggttgggggaggagttgggagtttagcgcagtcgccggagtgcgaggacaacgaccatccggccctagcctggccgggcgggtgccgggagcttccctttctcagcgcggcgcgaaggtggctcgccgtcagcgcctgcttccctcgacctcgtcctcctccccgctccggaggagctgcgagatgtggcgcctctgactccacttctccccgcccctgtcaccgagagggggaacgagctctcgcccactcgccggaggagacggccctggactcccaaccccgccggcgaaaccatgagctccgtccagcagcagccgccgccgccgcggagggtcaccaacgtggggtccctgttgctcaccccgcaggagaacgagtccctcttcactttcctcggcaagaaatgtgtgactatgtcttcagcagtggtgcagttatatgcagcagatcggaactgtatgtggtcaaagaagtgcagtggtgttgcttgtcttgttaaggacaatccacagagatcttattttttaagaatatttgacattaaggatgggaaactattgtgggaacaagagctatacaataactttgtatataatagtcctagaggatattttcatacctttgctggagatacttgtcaagttgctcttaattttgccaatgaagaagaagcaaaaaaatttcgaaaagcagttacagaccttttgggccgtcgacaaaggaaatctgagaaaagacgagatcccccaaatggtcctaatctacccatggctacagttgatataaaaaatccagaaatcacaacaaatagattttatggtccacaagtcaacaacatctcccataccaaagaaaagaagaagggaaaagctaaaaagaagagattaaccaaggcagatataggaacaccaagcaatttccagcacattggacatgttggttgggatccaaatacaggctttgatctgaataatttggatccagaattgaagaatcttttcgatatgtgtggaatctcagaggcacaacttaaagacagagaaacatcaaaagttatatatgactttattgaaaaaacaggaggtgttgaagctgttaaaaatgaactgcggaggcaagcaccaccacctccaccaccatcaaggggagggccacctcctcctcctccccctccacacaactcaggtcctcctcctcctcctgctaggggaagaggcgctcctcccccaccaccttcaagagctcccacagctgcacctccaccaccgcctccttccaggccaagtgtagcagtccctccaccaccgccaaataggatgtaccctcctccacctccagcccttccctcctcagcaccttcagggcctccaccaccacctccatctgtgttgggggtagggccagtggcaccacccccaccgcctccacctccacctcctcctgggccaccgcccccgcctggcctgccttctgatggggaccatcaggttccaactactgcaggaaacaaagcagctcttttagatcaaattagagagggtgctcagctaaaaaaagtggagcagaacagtcggccagtgtcctgctctggacgagatgcactgttagaccagatacgacagggtatccaactaaaatctgtggctgatggccaagagtctacaccaccaacacctgcacccacttcaggaattgtgggtgcattaatggaagtgatgcagaaaaggagcaaagccattcattcttcagatgaagatgaagatgaagatgatgaagaagattttgaggatgatgatgagtgggaagactgatctatatattatatatatatatatatttttaaggtgaaatactaaacactactttctgtctgtggattctgtaaaattatcatgtaaatgttctaccaatttgctgtatatttttgttgccttttttgcttttttttaatctgtgcaatacctcatttaatctgtaaaggtttgtcgtaatcctctacaaagctactccctgttattgtgtgcaagtttacaccaggatgctcacttgatttgtgaatatttttcattccatcaacaagggagtttaaatactatatgtgagactgacaaaaaccttaatgtaatttacttataatgccagaaggaaaacactattttcataccctactttttctgtacctaaattttcttaaaaaaaaatctagtatagcactacattcttttttaagtgatgcagaccttagtttctttagcccctttattttgaatacaatgctacatatgaatgttgaagctgatacattgcacagttctgtagacatcactacaccgatgtagtttctcaaattttagcaatatgctctacataaaatcactacagagatactagtggggaagacgattaacacacctcttacagtaatactgcctgttattggtatagcagtggtatttgcagactgggatcataaggagcccttaaatacttgttattgactggggttatttttatgctgtagcaaatgtgacaggctctttttagcaaaatttttgaaaatttttttggtattactctgaaacaaaatttaagttggagtttcagggatttagggagtagttttcattctacatgaactgaggtaatattatggtaactccaatatttggttaaaaaaactatacaaatcagaatagtactaaaatactgtagaattttagcatttttattttgcactttgtgtggattgaggtgttcagaaataccaaccataaaaatgtaatctagttggcaaaggtgtgcgctaaaacacggaaccgaacatgcattgatttggataacttttgagggtttttgtcaaatagcatgtgaagagttacatttttcttaaaagattggtggtcccaatgtcagagttcttggaacagataactgaatgatagattttttttttttaaagataaaactttacaacctgcacatttgttatgcatactaaatggtgtgttaaaattagggtttctttgcctctctacactacactaatctgcctaaaggtggttgtttcatatttataatgctaattatcatacctacctactttaaattttaggtagaaaattatctgatttaaatacaaacatatttttctcacattgagtaatatgcataatgtagttccaaatgtatttcattactatagtcacaatatccaactaaaaattacgctatctagaattgtaccaaccaaaatctcgtattggcagatcttgacaggctggacctgcaagatgtggcttgaattttaaccatttattacataatctctagtgatcatgcatctagttatcataagaaataatttaaaaggttttgttgctgaaagcagtaagtggtgcagtaaaatacttaagttattcaaagaatgttatctttcttgcaagagtaatttaagcacatgggaaagattctagactttttgtttcttgcaacaacagtgccctctgctgctagaaacctttttctacttactatcatttttattgtggcttgagctcagtcaatctggtgcagatgaggctggacaactactaaccaataaaatcaggagtttgtacaaaagttaaatggaacattataattattttaagtaatgttaattgaaaaaattttttctttttgacaatataaaaaacattttaaatttcctagaaatgtcttcagggtaatgccaatttaagatctctcttaacttgtggccaagaaattctagattttccagctgactttggtataatatatatttatcaggaacttctctcagcagagagtacccattcttcgagttcaaagcacaattttaaacatgtaaaatggatatataatttgccaaaggtaattaatttattctttttttcttaaagaagaaaaagacattggttgttgttacaaaaagtctaaattactgttggttgaaacacagcagctgtggagttcagtccaggcatgaagactaaatctgctttaccaagtaaggtgtaaggttgcatgtttcagtcctctaccatcctgcactgtgagcagcactatacctgtgcgttgtctgaaagccttccgtatattctccagctaaatggtcgtctggtagcctttgcatttaacaaactagcatgaggctttttatatctaaatgctacgtgatagacaatttcagctagccacatattgtatgtatgagattcataaagactttcaatcatttcattttcagacaactgaaattttgtttagtatgtgaattctttttttgaaatgtatagtgaataggatgttgcactggtggcaattcatcatggagcataataaaattaatttgacccaaatagaataaaataa

SEQ ID NO: 4551 - DNA, 4325 bp, Homo sapiens
  source 1..4325: mol_type = genomic DNA
agtcgccggagtgcgaggacaacgaccatccggccctagcctggccgggcgggtgccgggagcttccctttctcagcgcggcgcgaaggtggctcgccgtcagcgcctgcttccctcgacctcgtcctcctccccgctccggaggagctgcgagatgtggcgcctctgactccacttctccccgcccctgtcaccgagagggggaacgagctctcgcccactcgccggaggagacggccctggactcccaaccccgccggcgaaaccatgagctccgtccagcagcagccgccgccgccgcggagggtcaccaacgtggggtccctgttgctcaccccgcaggagaacgagtccctcttcactttcctcggcaagaaatgtgtgactatgtcttcagcagtggtgcagttatatgcagcagatcggaacttgtcttgttaaggacaatccacagagatcttattttttaagaatatttgacattaaggatgggaaactattgtgggaacaagagctatacaataactttgtatataatagtcctagaggatattttcatacctttgctggagatacttgtcaagttgctcttaattttgccaatgaagaagaagcaaaaaaatttcgaaaagcagttacagaccttttgggccgtcgacaaaggaaatctgagaaaagacgagatcccccaaatggtcctaatctacccatggctacagttgatataaaaaatccagaaatcacaacaaatagattttatggtccacaagtcaacaacatctcccataccaaagaaaagaagaagggaaaagctaaaaagaagagattaaccaaggcagatataggaacaccaagcaatttccagcacattggacatgttggttgggatccaaatacaggctttgatctgaataatttggatccagaattgaagaatcttttcgatatgtgtggaatctcagaggcacaacttaaagacagagaaacatcaaaagttatatatgactttattgaaaaaacaggaggtgttgaagctgttaaaaatgaactgcggaggcaagcaccaccacctccaccaccatcaaggggagggccacctcctcctcctccccctccacacaactcaggtcctcctcctcctcctgctaggggaagaggcgctcctcccccaccaccttcaagagctcccacagctgcacctccaccaccgcctccttccaggccaagtgtagcagtccctccaccaccgccaaataggatgtaccctcctccacctccagcccttccctcctcagcaccttcagggcctccaccaccacctccatctgtgttgggggtagggccagtggcaccacccccaccgcctccacctccacctcctcctgggccaccgcccccgcctggcctgccttctgatggggaccatcaggttccaactactgcaggaaacaaagcagctcttttagatcaaattagagagggtgctcagctaaaaaaagtggagcagaacagtcggccagtgtcctgctctggacgagatgcactgttagaccagatacgacagggtatccaactaaaatctgtggctgatggccaagagtctacaccaccaacacctgcacccacttcaggaattgtgggtgcattaatggaagtgatgcagaaaaggagcaaagccattcattcttcagatgaagatgaagatgaagatgatgaagaagattttgaggatgatgatgagtgggaagactgatctatatattatatatatatatatatttttaaggtgaaatactaaacactactttctgtctgtggattctgtaaaattatcatgtaaatgttctaccaatttgctgtatatttttgttgccttttttgcttttttttaatctgtgcaatacctcatttaatctgtaaaggtttgtcgtaatcctctacaaagctactccctgttattgtgtgcaagtttacaccaggatgctcacttgatttgtgaatatttttcattccatcaacaagggagtttaaatactatatgtgagactgacaaaaaccttaatgtaatttacttataatgccagaaggaaaacactattttcataccctactttttctgtacctaaattttcttaaaaaaaaatctagtatagcactacattcttttttaagtgatgcagaccttagtttctttagcccctttattttgaatacaatgctacatatgaatgttgaagctgatacattgcacagttctgtagacatcactacaccgatgtagtttctcaaattttagcaatatgctctacataaaatcactacagagatactagtggggaagacgattaacacacctcttacagtaatactgcctgttattggtatagcagtggtatttgcagactgggatcataaggagcccttaaatacttgttattgactggggttatttttatgctgtagcaaatgtgacaggctctttttagcaaaatttttgaaaatttttttggtattactctgaaacaaaatttaagttggagtttcagggatttagggagtagttttcattctacatgaactgaggtaatattatggtaactccaatatttggttaaaaaaactatacaaatcagaatagtactaaaatactgtagaattttagcatttttattttgcactttgtgtggattgaggtgttcagaaataccaaccataaaaatgtaatctagttggcaaaggtgtgcgctaaaacacggaaccgaacatgcattgatttggataacttttgagggtttttgtcaaatagcatgtgaagagttacatttttcttaaaagattggtggtcccaatgtcagagttcttggaacagataactgaatgatagattttttttttttaaagataaaactttacaacctgcacatttgttatgcatactaaatggtgtgttaaaattagggtttctttgcctctctacactacactaatctgcctaaaggtggttgtttcatatttataatgctaattatcatacctacctactttaaattttaggtagaaaattatctgatttaaatacaaacatatttttctcacattgagtaatatgcataatgtagttccaaatgtatttcattactatagtcacaatatccaactaaaaattacgctatctagaattgtaccaaccaaaatctcgtattggcagatcttgacaggctggacctgcaagatgtggcttgaattttaaccatttattacataatctctagtgatcatgcatctagttatcataagaaataatttaaaaggttttgttgctgaaagcagtaagtggtgcagtaaaatacttaagttattcaaagaatgttatctttcttgcaagagtaatttaagcacatgggaaagattctagactttttgtttcttgcaacaacagtgccctctgctgctagaaacctttttctacttactatcatttttattgtggcttgagctcagtcaatctggtgcagatgaggctggacaactactaaccaataaaatcaggagtttgtacaaaagttaaatggaacattataattattttaagtaatgttaattgaaaaaattttttctttttgacaatataaaaaacattttaaatttcctagaaatgtcttcagggtaatgccaatttaagatctctcttaacttgtggccaagaaattctagattttccagctgactttggtataatatatatttatcaggaacttctctcagcagagagtacccattcttcgagttcaaagcacaattttaaacatgtaaaatggatatataatttgccaaaggtaattaatttattctttttttcttaaagaagaaaaagacattggttgttgttacaaaaagtctaaattactgttggttgaaacacagcagctgtggagttcagtccaggcatgaagactaaatctgctttaccaagtaaggtgtaaggttgcatgtttcagtcctctaccatcctgcactgtgagcagcactatacctgtgcgttgtctgaaagccttccgtatattctccagctaaatggtcgtctggtagcctttgcatttaacaaactagcatgaggctttttatatctaaatgctacgtgatagacaatttcagctagccacatattgtatgtatgagattcataaagactttcaatcatttcattttcagacaactgaaattttgtttagtatgtgaattctttttttgaaatgtatagtgaataggatgttgcactggtggcaattcatcatggagcataataaaattaatttgacccaaat

SEQ ID NO: 4552 - DNA, 2238 bp, Homo sapiens
  source 1..2238: mol_type = genomic DNA
gccccactcctcgctcgcacctcgctcgcgccagcccttcccgctcttctgttctcgctctatttgccccgctgactgctggcctcgccagctttgccagtcttacgtctctgccgcccccactcccgcccgcgccccatcttcttgcgcgactcgcgcccgctggtccccccctcctcctcccgcgtcctgcctgccccctcctcctgctctcgcaggctccttggcacccaggccgggaggcgacgcgcccagccgtctaaacgggaacagccctggctgagggagctgcagcgcagcagagtatctgacggcgccaggttgcgtaggtgcggcacgaggagttttcccggcagcgaggaggtcctgagcagcatggcccggaggagcgccttccctgccgccgcgctctggctctggagcatcctcctgtgcctgctggcactgcgggcggaggccgggccgccgcaggaggagagcctgtacctatggatcgatgctcaccaggcaagagtactcataggatttgaagaagatatcctgattgtttcagaggggaaaatggcaccttttacacatgatttcagaaaagcacaacagagaatgccagctattcctgtcaatatccattccatgaattttacctggcaagctgcagggcaggcagaatacttctatgaattcctgtccttgcgctccctggataaaggcatcatggcagatccaaccgtcaatgtccctctgctgggaacagtgcctcacaaggcatcagttgttcaagttggtttcccatgtcttggaaaacaggatggggtggcagcatttgaagtggatgtgattgttatgaattctgaaggcaacaccattctccaaacacctcaaaatgctatcttctttaaaacatgtcaacaagctgagtgcccaggcgggtgccgaaatggaggcttttgtaatgaaagacgcatctgcgagtgtcctgatgggttccacggacctcactgtgagaaagccctttgtaccccacgatgtatgaatggtggactttgtgtgactcctggtttctgcatctgcccacctggattctatggagtgaactgtgacaaagcaaactgctcaaccacctgctttaatggagggacctgtttctaccctggaaaatgtatttgccctccaggactagagggagagcagtgtgaaatcagcaaatgcccacaaccctgtcgaaatggaggtaaatgcattggtaaaagcaaatgtaagtgttccaaaggttaccagggagacctctgttcaaagcctgtctgcgagcctggctgtggtgcacatggaacctgccatgaacccaacaaatgccaatgtcaagaaggttggcatggaagacactgcaataaaaggtacgaagccagcctcatacatgccctgaggccagcaggcgcccagctcaggcagcacacgccttcacttaaaaaggccgaggagcggcgggatccacctgaatccaattacatctggtgaactccgacatctgaaacgttttaagttacaccaagttcatagcctttgttaacctttcatgtgttgaatgttcaaataatgttcattacacttaagaatactggcctgaattttattagcttcattataaatcactgagctgatatttactcttccttttaagttttctaagtacgtctgtagcatgatggtatagattttcttgtttcagtgctttgggacagattttatattatgtcaattgatcaggttaaaattttcagtgtgtagttggcagatattttcaaaattacaatgcatttatggtgtctgggggcaggggaacatcagaaaggttaaattgggcaaaaatgcgtaagtcacaagaatttggatggtgcagttaatgttgaagttacagcatttcagattttattgtcagatatttagatgtttgttacatttttaaaaattgctcttaatttttaaactctcaatacaatatattttgaccttaccattattccagagattcagtattaaaaaaaaaaaaattacactgtggtagtggcatttaaacaatataatatattctaaacacaatgaaatagggaatataatgtatgaactttttgcattggcttgaagcaatataatatattgtaaacaaaacacagctcttacctaataaacattttatactgtttgtatgtataaaataaaggtgctgctttagttttctga

SEQ ID NO: 4553 - DNA, 120 bp, Homo sapiens
  source 1..120: mol_type = genomic DNA
aagaaaagaaaagaaaagaaaagagaaaagaggagaggaaaggaaaggaaagagttgttcaagttggtttcccatgtcttggaaaacaggatggggtggcagcatttgaagtggatgtga

SEQ ID NO: 4554 - DNA, 1095 bp, Homo sapiens
  source 1..1095: mol_type = genomic DNA
atggcaagggcgagtgaagcagtgtcacgcattttagaagaatggcataaagccaaggtagaagcaatgaccctggacctcgctctgctccgtagcgtgcagcattttgctgaagcattcaaggccaagaatgtgcctcttcatgtgcttgtgtgcaacgcagcaacttttgctctaccctggagtctcaccaaagatggcctggagaccacctttcaagtgaatcatctggggcacttctaccttgtccagctcctcaggatgttttgtgccgctcagctcctgcccgtgtcattgtggtctcctcagagtcccatcgatttacagatattaacgactccttgggaaaactggacttcagtcgcctctctccaacaaaaaacgactattgggcgatgctggcttataacaggtccaagctctgcaacatcctcttctccaacgagctgcaccgtcgcccccacgcggggtcacgtcgaacgcagtgcatcctggaaatatgatgtactccaacattcatcgcagctggtgggtgtacacactgctgtttaccttggcgaggcctttcaccaagtccatgcaacagggagctgccaccaccgtgtactgtgctgctgtcccagaactggagggtctgggagggatgtacttcaacaactgctgccgctgcatgccctcaccagaagctcagagcgaagagacggcccggaccctgtgggcagcgagaggctgatccaagaacggcttgccagtccggctaagtggagctcagagcggatgggcacacacacccgccctgtgtgtgtcccctcacgcaagtgccaggggccccttccaaatgtccctccaacacagatccgcaagagtaaaggaaataagagcagtcacaacagagtgaaaaatcttaagtaccaatgggaagcagggaattcctggggtaaagtatcacttttctggggctgggctaggcataggtctctttgctttctggtggtggcctgtttgaaagtaaaaacctgcttggtgtgtaggttccgtatctccctggagaagcaccagcaattctctttcttttactgttatagaatagcctga

SEQ ID NO: 4555 - DNA, 735 bp, Homo sapiens
  source 1..735: mol_type = genomic DNA
gcagtgcgcaggcgtgagcggtcgggccccgacgcgcgcgggtctcgtttggagcgggagtgagttcctgagcgagtggacccggcagcgggcgataggggggccaggtgcctccacagtcagccatggcagcgctgcgctacgcggggctggacgacacggacagtgaggacgagctgcctccgggctgggaggagagaaccaccaaggacggctgggtttactacgccaatcacaccgaggagaagactcagtgggaacatccaaaaactggaaaaagaaaacgagtggcaggagatttgccatacggatgggaacaagaaactgatgagaacggacaagtgttttttgttgaccatataaataaaagaaccacctacttggacccaagactggcgtttactgtggatgataatccgaccaagccaaccacccggcaaagatacgacggcagcaccactgccatggaaattctccagggccgggatttcactggcaaagtggttgtggtcactggagctaattcaggaatagggttcgaaaccgccaagtcttttgccctccatggtgcacatgtgatcttggcctgcaggaacatggcaagggcgagtgaagcagtgtcacgcattttagaagaatggaaaacaaaataccaccctccgccagaaaagtgcagaataaaaattttccactagcaaaagaaggaaaaaataaaagatcttgaatagtctcatc

SEQ ID NO: 4556 - DNA, 936 bp, Homo sapiens
  source 1..936: mol_type = genomic DNA
atggcagcgctgcgctacgcggggctggacgacacggacagtgaggacgagctgcctccgggctgggaggagagaaccaccaaggacggctgggtttactacgccaatcacaccgaggagaagactcagtgggaacatccaaaaactggaaaaagaaaacgagtggcaggagatttgccatacggatgggaacaagaaactgatgagaacggacaagtgttttttgttgaccatataaataaaagaaccacctacttggacccaagactggcgtttactgtggatgataatccgaccaagccaaccacccggcaaagatacgacggcagcaccactgccatggaaattctccagggccgggatttcactggcaaagtggttgtggtcactggagctaattcaggaatagcaacagggagctgccaccaccgtgtactgtgctgctgtcccagaactggagggtctgggagggatgtacttcaacaactgctgccgctgcatgccctcaccagaagctcagagcgaagagacggcccggaccctgtgggcgctcagcgagaggctgatccaagaacggcttggcagccagtccggctaagtggagctcagagcggatgggcacacacacccgccctgtgtgtgtcccctcacgcaagtgccagggctgggccccttccaaatgtccctccaacacagatccgcaagagtaaaggaaataagagcagtcacaacagagtgaaaaatcttaagtaccaatgggaagcagggaattcctggggtaaagtatcacttttctggggctgggctaggcataggtctctttgctttctggtggtggcctgtttgaaagtaaaaacctgcttggtgtgtaggttccgtatctccctggagaagcaccagcaattctctttcttttactgttatagaatagcctga

SEQ ID NO: 4557 - DNA, 705 bp, Homo sapiens
  source 1..705: mol_type = genomic DNA
atggcagcgctgcgctacgcggggctggacgacacggacagtgaggacgagctgcctccgggctgggaggagagaaccaccaaggacggctgggtttactacgccaatcacaccgaggagaagactcagtgggaacatccaaaaactggaaaaagaaaacgagtggcaggagatttgccatacggatgggaacaagaaactgatgagaacggacaagtgttttttgttgaccatataaataaaagaaccacctacttggacccaagactggcgtttactgtggatgataatccgaccaagccaaccacccggcaaagatacgacggcagcaccactgccatggaaattctccagggccgggatttcactggcaaagtggttgtggtcactggagctaattcaggaatagggttcgaaaccgccaagtcttttgccctccatggtgcacatgtgatcttggcctgcaggaacatggcaagggcgagtgaagcagtgtcacgcattttagaagaatggcaacagggagctgccaccaccgtgtactgtgctgctgtcccagaactggagggtctgggagggatgtacttcaacaactgctgccgctgcatgccctcaccagaagctcagagcgaagagacggcccggaccctgtgggcgctcagcgagaggctgatccaagaacggcttggcagccagtccggctaa

SEQ ID NO: 4558 - DNA, 1370 bp, Homo sapiens
  source 1..1370: mol_type = genomic DNA
gcagtgcgcaggcgtgagcggtcgggccccgacgcgcgcgggtctcgtttggagcgggagtgagttcctgagcgagtggacccggcagcgggcgataggggggccaggtgcctccacagtcagccatggcagcgctgcgctacgcggggctggacgacacggacagtgaggacgagctgcctccgggctgggaggagagaaccaccaaggacggctgggtttactacgccaatcacaccgaggagaagactcagtgggaacatccaaaaactggaaaaagaaaacgagtggcaggagatttgccatacggatgggaacaagaaactgatgagaacggacaagtgttttttgttgaccatataaataaaagaaccacctacttggacccaagactggcgtttactgtggatgataatccgaccaagccaaccacccggcaaagatacgacggcagcaccactgccatggaaattctccagggccgggatttcactggcaaagtggttgtggtcactggagctaattcaggaatagggttcgaaaccgccaagtcttttgccctccatggtgcacatgtgatcttggcctgcaggaacatggcaagggcgagtgaagcagtgtcacgcattttagaagaatggcataaagccaaggtagaagcaatgaccctggacctcgctctgctccgtagcgtgcagcattttgctgaagcattcaaggccaagaatgtgcctcttcatgtgcttgtgtgcaacgcagcaacttttgctctaccctggagtctcaccaaagatggcctggagaccacctttcaagtgaatcatctggggcacttctaccttgtccagctcctccaggatgttttgtgccgctcagctcctgcccgtgtcattgtggtctcctcagagtcccatcgatttacagatattaacgactccttgggaaaactggacttcagtcgcctctctccaacaaaaaacgactattgggcgatgctggcttataacaggtccaagctctgcaacatcctcttctccaacgagctgcaccgtcgcctctccccacgcggggtcacgtcgaacgcagtgcatcctggaaatatgatgtactccaacattcatcgcagctggtgggtgtacacactgctgtttaccttggcgaggcctttcaccaagtccatgcaacagggagctgccaccaccgtgtactgtgctgctgtcccagaactggagggtctgggagggatgtacttcaacaactgctgccgctgcatgccctcaccagaagctcagagcgaagagacggcccggaccctgtgggcgctcagcgagaggctgatccaagaacggcttggcagccagtccggctaa

SEQ ID NO: 4559 - DNA, 642 bp, Homo sapiens
  source 1..642: mol_type = genomic DNA
atggcagcgctgcgctacgcggggctggacgacacggacagtgaggacgagctgcctccgggctgggaggagagaaccaccaaggacggctgggtttactacgccaatcacaccgaggagaagactcagtgggaacatccaaaaactggaaaaagaaaacgagtggcaggagatttgccatacggatgggaacaagaaactgatgagaacggacaagtgttttttgttgaccatataaataaaagaaccacctacttggacccaagactggcgtttactgtggatgataatccgaccaagccaaccacccggcaaagatacgacggcagcaccactgccatggaaattctccagggccgggatttcactggcaaagtggttgtggtcactggagctaattcaggaataggaaaagccagctgccatgttgggaggatactcaagcatacccgtgtagaagaactgagcctcctgccaacagccatcaacagggagctgccaccaccgtgtactgtgctgctgtcccagaactggagggtctgggagggatgtacttcaacaactgctgccgctgcatgccctcaccagaagctcagagcgaagagacggcccggaccctgtgggcgctcagcgagaggctga

SEQ ID NO: 4560 - DNA, 2482 bp, Homo sapiens
  source 1..2482: mol_type = genomic DNA
gtcctggcccgaaactggatgcgcacgccccttccctgcggcggggaggctgacaaggctccgctctatctctagcgcctcggagcgctctccggctttgctgtctagcccggcggcagcgcgatctcttaggcactttcaccgccttcctctccaggccctgcccctttgacgccggccgtcgcgatattgcggagactggatttcagcttcgtggtcggcggagcggcccctggagggcgcagtgcgcaggcgtgagcggtcgggccccgacgcgcgcgggtctcgtttggagcgggagtgagttcctgagcgagtggacccggcagcgggcgataggggggccaggtgcctccacagtcagccatggcagcgctgcgctacgcggggctggacgacacggacagtgaggacgagctgcctccgggctgggaggagagaaccaccaaggacggctgggtttactacgccaatcacaccgaggagaagactcagtgggaacatccaaaaactggaaaaagaaaacgagtggcaggagatttgccatacggatgggaacaagaaactgatgagaacggacaagtgttttttgttgaccatataaataaaagaaccacctacttggacccaagactggcgtttactgtggatgataatccgaccaagccaaccacccggcaaagatacgacggcagcaccactgccatggaaattctccagggccgggatttcactggcaaagtggttgtggtcactggagctaattcaggaatagggttcgaaaccgccaagtcttttgccctccatggtgcacatgtgatcttggcctgcaggaacatggcaagggcgagtgaagcagtgtcacgcattttagaagaatggcataaagccaaggtagaagcaatgaccctggacctcgctctgctccgtagcgtgcagcattttgctgaagcattcaaggccaagaatgtgcctcttcatgtgcttgtgtgcaacgcagcaacttttgctctaccctggagtctcaccaaagatggcctggagaccacctttcaagtgaatcatctggggcacttctaccttgtccagctcctccaggatgttttgtgccgctcagctcctgcccgtgtcattgtggtctcctcagagtcccatcgatttacagatattaacgactccttgggaaaactggacttcagtcgcctctctccaacaaaaaacgactattgggcgatgctggcttataacaggtccaagctctgcaacatcctcttctccaacgagctgcaccgtcgcctctccccacgcggggtcacgtcgaacgcagtgcatcctggaaatatgatgtactccaacattcatcgcagctggtgggtgtacacactgctgtttaccttggcgaggcctttcaccaagtccatgcaacagggagctgccaccaccgtgtactgtgctgctgtcccagaactggagggtctgggagggatgtacttcaacaactgctgccgctgcatgccctcaccagaagctcagagcgaagagacggcccggaccctgtgggcgctcagcgagaggctgatccaagaacggcttggcagccagtccggctaagtggagctcagagcggatgggcacacacacccgccctgtgtgtgtcccctcacgcaagtgccagggctgggccccttccaaatgtccctccaacacagatccgcaagagtaaaggaaataagagcagtcacaacagagtgaaaaatcttaagtaccaatgggaagcagggaattcctggggtaaagtatcacttttctggggctgggctaggcataggtctctttgctttctggtggtggcctgtttgaaagtaaaaacctgcttggtgtgtaggttccgtatctccctggagaagcaccagcaattctctttcttttactgttatagaatagcctgaggtcccctcgtcccatccagctaccaccacggccaccactgcagccgggggctggccttctcctacttagggaagaaaaagcaagtgttcactgctccttgctgcattgatccaggagataattgtttcattcatcctgaccaagactgagccagcttagcaactgctggggagacaaatctcagaaccttgtcccagccagtgaggatgacagtgacacccagagggagtagaatacgcagaactaccaggtggcaaagtacttgtcatagactcctttgctaatgctatgcaaaaaattctttagagattataacaaatttttcaaatcattccttagataccttgaaaggcaggaagggaagcgtatatacttaagaatacacaggatattttggggggcagagaataaaacgttagttaatccctttgtctgtcaatcacagtctcagttctcttgctttcacattgtacttaaacctcctgctgtgcctcgcatcctatgcttaataaaagaacatgcttgaatatca

SEQ ID NO: 4561 - DNA, 525 bp, Homo sapiens
  source 1..525: mol_type = genomic DNA
tcgggccccgacgcgcgcgggtctcgtttggagcgggagtgagttcctgagcgagtggacccggcagcgggcgataggggggccaggtgcctccacagtcagccatggcagcgctgcgctacgcggggctggacgacacggacagtgaggacgagctgcctccgggctgggaggagagaaccaccaaggacggctgggtttactacgccaagtaagggggccgcagtggggccgcggacgcacctgggaccctgcacagcccacggacgccacctgcgcggggaggacgcgcactccagcgcagcgcgtgcggtgcaaagtgaaagtaactgttaaggagcttcagggaaaagggtccagggttcccagtaggggccggcccccttggtgggcctcgggtccagcgggggtcacctggtggcttcccggcgcgccctctgctgttcaggatgcagcactgcgcggcgcggcgagggcaaagcggcctcatccccgccaaaaaataaagatgttttaaaaagcgca

SEQ ID NO: 4562 - DNA, 1850 bp, Homo sapiens
  source 1..1850: mol_type = genomic DNA
agaaaggccgggcgcggcgaggctgggcgctgggcggctgcggcgcgcggtgcgcggtgcgtagtctggagctatggtggtggtggcagccgcgccgaacccggccgacgggacccctaaagttctgcttctgtcggggcagcccgcctccgccgccggagccccggccggccaggccctgccgctcatggtgccagcccagagaggggccagcccggaggcagcgagcggggggctgccccaggcgcgcaagcgacagcgcctcacgcacctgagccccgaggagaaggcgctgaggaggaaactgaaaaacagagtagcagctcagactgccagagatcgaaagaaggctcgaatgagtgagctggaacagcaagtggtagatttagaagaagagaaccaaaaacttttgctagaaaatcagcttttacgagagaaaactcatggccttgtagttgagaaccaggagttaagacagcgcttggggatggatgccctggttgctgaagaggaggcggaagccaaggggaatgaagtgaggccagtggccgggtctgctgagtccgcagcactcagactacgtgcacctctgcagcaggtgcaggcccagttgtcacccctccagaacatctccccatggattctggcggtattgactcttcagattcagagtctgatatcctgttgggcattctggacaacttggacccagtcatgttcttcaaatgcccttccccagagcctgccagcctggaggagctcccagaggtctacccagaaggacccagttccttaccagcctccctttctctgtcagtggggacgtcatcagccaagctggaagccattaatgaactaattcgttttgaccacatatataccaagcccctagtcttagagataccctctgagacagagagccaagctaatgtggtagtgaaaatcgaggaagcacctctcagcccctcagagaatgatcaccctgaattcattgtctcagtgaaggaagaacctgtagaagatgacctcgttccggagctgggtatctcaaatctgctttcatccagccactgcccaaagccatcttcctgcctactggatgcttacagtgactgtggatacgggggttccctttccccattcagtgacatgtcctctctgcttggtgtaaaccattcttgggaggacacttttgccaatgaactctttccccagctgattagtgtctaaggaatgatccaatactgttgcccttttccttgactattacactgcctggaggatagcagagaagcctgtctgtacttcattcaaaaagccaaaatagagagtatacagtcctagagaattcctctatttgttcagatctcatagatgacccccaggtattgtcttttgacatccagcagtccaaggtattgagacatattactggaagtaagaaatattactataattgagaactacagcttttaagattgtacttttatcttaaaagggtggtagttttccctaaaatacttattatgtaagggtcattagacaaatgtcttgaagtagacatggaatttatgaatggttctttatcatttctcttccccctttttggcatcctggcttgcctccagttttaggtcctttagtttgcttctgtaagcaacgggaacacctgctgagggggctctttccctcatgtatacttcaagtaagatcaagaatcttttgtgaaattatagaaatttactatgtaaatgcttgatggaattttttcctgctagtgtagcttctgaaaggtgctttctccatttatttaaaactacccatgcaattaaaaggtacaatgcagcatc

SEQ ID NO: 4563 - DNA, 1777 bp, Homo sapiens
  source 1..1777: mol_type = genomic DNA
ggcgcgcggtgcgcggtgcgtagtctggagctatggtggtggtggcagccgcgccgaacccggccgacgggacccctaaagttctgcttctgtcggggcagcccgcctccgccgccggagccccggccggccaggccctgccgctcatggtgccagcccagagaggggccagcccggaggcagcgagcggggggctgccccaggcgcgcaagcgacagcgcctcacgcacctgagccccgaggagaaggcgctgaggaggaaactgaaaaacagagtagcagctcagactgccagagatcgaaagaaggctcgaatgagtgagctggaacagcaagtggtagatttagaagaagagaaccaaaaacttttgctagaaaatcagcttttacgagagaaaactcatggccttgtagttgagaaccaggagttaagacagcgcttggggatggatgccctggttgctgaagaggaggcggaagccaaggggaatgaagtgaggccagtggccgggtctgctgagtccgcagcaggtgcaggcccagttgtcacccctccagaacatctccccatggattctggcggtattgactcttcagattcagagtctgatatcctgttgggcattctggacaacttggacccagtcatgttcttcaaatgcccttccccagagcctgccagcctggaggagctcccagaggtctacccagaaggacccagttccttaccagcctccctttctctgtcagtggggacgtcatcagccaagctggaagccattaatgaactaattcgttttgaccacatatataccaagcccctagtcttagagataccctctgagacagagagccaagctaatgtggtagtgaaaatcgaggaagcacctctcagcccctcagagaatgatcaccctgaattcattgtctcagtgaaggaagaacctgtagaagatgacctcgttccggagctgggtatctcaaatctgctttcatccagccactgcccaaagccatcttcctgcctactggatgcttacagtgactgtggatacgggggttccctttccccattcagtgacatgtcctctctgcttggtgtaaaccattcttgggaggacacttttgccaatgaactctttccccagctgattagtgtctaaggaatgatccaatactgttgcccttttccttgactattacactgcctggaggatagcagagaagcctgtctgtacttcattcaaaaagccaaaatagagagtatacagtcctagagaattcctctatttgttcagatctcatagatgacccccaggtattgtcttttgacatccagcagtccaaggtattgagacatattactggaagtaagaaatattactataattgagaactacagcttttaagattgtacttttatcttaaaagggtggtagttttccctaaaatacttattatgtaagggtcattagacaaatgtcttgaagtagacatggaatttatgaatggttctttatcatttctcttccccctttttggcatcctggcttgcctccagttttaggtcctttagtttgcttctgtaagcaacgggaacacctgctgagggggctctttccctcatgtatacttcaagtaagatcaagaatcttttgtgaaattatagaaatttactatgtaaatgcttgatggaattttttcctgctagtgtagcttctgaaaggtgctttctccatttatttaaaactacccatgcaattaaaaggtacaatgc

SEQ ID NO: 4564 - DNA, 1824 bp, Homo sapiens
  source 1..1824: mol_type = genomic DNA
gcggcgcgcggtgcgcggtgcgtagtctggagctatggtggtggtggcagccgcgccgaacccggccgacgggacccctaaagttctgcttctgtcggggcagcccgcctccgccgccggagccccggccggccaggccctgccgctcatggtgccagcccagagaggggccagcccggaggcagcgagcggggggctgccccaggcgcgcaagcgacagcgcctcacgcacctgagccccgaggagaaggcgctgaggaggaaactgaaaaacagagtagcagctcagactgccagagatcgaaagaaggctcgaatgagtgagctggaacagcaagtggtagatttagaagaagaggtaaaactacttaagaaccaaaaacttttgctagaaaatcagcttttacgagagaaaactcatggccttgtagttgagaaccaggagttaagacagcgcttggggatggatgccctggttgctgaagaggaggcggaagccaaggggaatgaagtgaggccagtggccgggtctgctgagtccgcagcactcagactacgtgcacctctgcagcaggtgcaggcccagttgtcacccctccagaacatctccccatggattctggcggtattgactcttcagattcagagtctgatatcctgttgggcattctggacaacttggacccagtcatgttcttcaaatgcccttccccagagcctgccagcctggaggagctcccagaggtctacccagaaggacccagttccttaccagcctccctttctctgtcagtggggacgtcatcagccaagctggaagccattaatgaactaattcgttttgaccacatatataccaagcccctagtcttagagataccctctgagacagagagccaagctaatgtggtagtgaaaatcgaggaagcacctctcagcccctcagagaatgatcaccctgaattcattgtctcagtgaaggaagaacctgtagaagatgacctcgttccggagctgggtatctcaaatctgctttcatccagccactgcccaaagccatcttcctgcctactggatgcttacagtgactgtggatacgggggttccctttccccattcagtgacatgtcctctctgcttggtgtaaaccattcttgggaggacacttttgccaatgaactctttccccagctgattagtgtctaaggaatgatccaatactgttgcccttttccttgactattacactgcctggaggatagcagagaagcctgtctgtacttcattcaaaaagccaaaatagagagtatacagtcctagagaattcctctatttgttcagatctcatagatgacccccaggtattgtcttttgacatccagcagtccaaggtattgagacatattactggaagtaagaaatattactataattgagaactacagcttttaagattgtacttttatcttaaaagggtggtagttttccctaaaatacttattatgtaagggtcattagacaaatgtcttgaagtagacatggaatttatgaatggttctttatcatttctcttccccctttttggcatcctggcttgcctccagttttaggtcctttagtttgcttctgtaagcaacgggaacacctgctgagggggctctttccctcatgtatacttcaagtaagatcaagaatcttttgtgaaattatagaaatttactatgtaaatgcttgatggaattttttcctgctagtgtagcttctgaaaggtgctttctccatttatttaaaactacccatgcaattaaaaggtacaatgcagca

SEQ ID NO: 4565 - DNA, 1690 bp, Homo sapiens
  source 1..1690: mol_type = genomic DNA
ccggactgaccggatccgccacgctgggaacctagggcggcccagggctcttttctgtactttttaactctctcgttagagatgaccagagctggggatgcgggcacctgtcttccaggccctcttgctgtgtggccgcagactggtggttcagcctcttaactcggacatgaggaaactgaaaaacagagtagcagctcagactgccagagatcgaaagaaggctcgaatgagtgagctggaacagcaagtggtagatttagaagaagagaaccaaaaacttttgctagaaaatcagcttttacgagagaaaactcatggccttgtagttgagaaccaggagttaagacagcgcttggggatggatgccctggttgctgaagaggaggcggaagccaaggggaatgaagtgaggccagtggccgggtctgctgagtccgcagcactcagactacgtgcacctctgcagcaggtgcaggcccagttgtcacccctccagaacatctccccatggattctggcggtattgactcttcagattcagagtctgatatcctgttgggcattctggacaacttggacccagtcatgttcttcaaatgcccttccccagagcctgccagcctggaggagctcccagaggtctacccagaaggacccagttccttaccagcctccctttctctgtcagtggggacgtcatcagccaagctggaagccattaatgaactaattcgttttgaccacatatataccaagcccctagtcttagagataccctctgagacagagagccaagctaatgtggtagtgaaaatcgaggaagcacctctcagcccctcagagaatgatcaccctgaattcattgtctcagtgaaggaagaacctgtagaagatgacctcgttccggagctgggtatctcaaatctgctttcatccagccactgcccaaagccatcttcctgcctactggatgcttacagtgactgtggatacgggggttccctttccccattcagtgacatgtcctctctgcttggtgtaaaccattcttgggaggacacttttgccaatgaactctttccccagctgattagtgtctaaggaatgatccaatactgttgcccttttccttgactattacactgcctggaggatagcagagaagcctgtctgtacttcattcaaaaagccaaaatagagagtatacagtcctagagaattcctctatttgttcagatctcatagatgacccccaggtattgtcttttgacatccagcagtccaaggtattgagacatattactggaagtaagaaatattactataattgagaactacagcttttaagattgtacttttatcttaaaagggtggtagttttccctaaaatacttattatgtaagggtcattagacaaatgtcttgaagtagacatggaatttatgaatggttctttatcatttctcttccccctttttggcatcctggcttgcctccagttttaggtcctttagtttgcttctgtaagcaacgggaacacctgctgagggggctctttccctcatgtatacttcaagtaagatcaagaatcttttgtgaaattatagaaatttactatgtaaatgcttgatggaattttttcctgctagtgtagcttctgaaaggtgctttctccatttatttaaaa

SEQ ID NO: 4566 - DNA, 1417 bp, Homo sapiens
  source 1..1417: mol_type = genomic DNA
ggctcgcctcggcgtgcagtgcgcgtgcgtggagctgggagctaggtcctcggagtgggccagagatggcggcggccgacggggctttgccggaggcggcggctttagagcaacccgcggagctgcctgcctcggtgcgggcgagtatcgagcggaagcggcagcgggcactgatgctgcgccaggcccggctggctgcccggccctactcggcgacggcggctgcggctactggaggcatggctaatgtaaaagcagccccaaagataattgacacaggaggaggcttcattttagaagaggaagaagaagaagaacagaaaattggaaaagttgttcatcaaccaggacctgttatggaatttgattatgtaatatgcgaagaatgtgggaaagaatttatggattcttatcttatgaaccactttgatttgccaacttgtgataactgcagagatgctgatgataaacacaagcttataaccaaaacagaggcaaaacaagaatatcttctgaaagactgtgatttagaaaaaagagagccacctcttaaatttattgtgaagaagaatccacatcattcacaatggggtgatatgaaactctacttaaagttacagattgtgaagaggtctcttgaagtttggggtagtcaagaagcattagaagaagcaaaggaagtccgacaggaaaaccgagaaaaaatgaaacagaagaaatttgataaaaaagtaaaagaattgcggcgagcagtaagaagcagcgtgtggaaaagggagacgattgttcatcaacatgagtatggaccagaagaaaacctagaagatgacatgtaccgtaagacttgtactatgtgtggccatgaactgacatatgaaaaaatgtgattttttagttcagtgacctgttttatagaattttatatttaaataaaggaaatttagattggtccttttcaaaattcaaaaaaaaaagcaacatcttcatagatgaatgaaacccttgtataagtaatacttcagtaataattatgtatgttatggcttaaaagcaagtttcagtgaaggtcacctggcctggttgtgtgcacaatgtcatgtctgtgattgccttcttacaacagagatgggagctgagtgctagagtaggtgcagaagtggtaggtcagctacaaatttgaggacaagataccaaggcaaaccctagattggggtagagggaaaagggttcaacaaaggctgaactggattcttaaccaagaaacaaataatagcaatggtggtgcaccactgtaccccaggttctagtcatgtgttttttaggacgatttctgtctccacgatggtggaaacagtggggaactactgctggaaaaagccctaatagcagaaataaacattgagttgtacgagtctga

SEQ ID NO: 4567 - DNA, 3832 bp, Homo sapiens
  source 1..3832: mol_type = genomic DNA
atacaccggaaatagagagaaacctgttgtgctctttcctgcttcccgcagttttttagtggccacgggtatggggtggagcttcctttaggggcgtgactaggcctccaacgaaggggcgtggccaagcgcaccgcctcggggcggggccggcgttctagcgcatcgcggccgggtgcgtcactcgcgaagtggaatttgcccagacaagcaacatggctcggaaacgcgcggccggcggggagccgcggggacgcgaactgcgcagccagaaatccaaggccaagagcaaggcccggcgtgaggaggaggaggaggatgcctttgaagatgagaaacccccaaagaagagccttctctccaaagtttcacaaggaaagaggaaaagaggctgcagtcatcctgggggttcagcagatggtccagcaaaaaagaaagtggccaaggtgactgttaaatctgaaaacctcaaggttataaaggatgaagccctcagcgatggggatgacctcagggactttccaagtgacctcaagaaggcacaccatctgaagagaggggctaccatgaatgaagacagcaatgaagaagaggaagaaagtgaaaatgattgggaagaggttgaagaacttagtgagcctgtgctgggtgacgtgagagaaagtacagccttctctcgatctcttctgcctgtgaagccagtggagatagagattgaaacgccagagcaggcgaagacaagagaaagaagtgaaaagataaaactggagtttgagacatatcttcggagggcgatgaaacgtttcaataaaggggtccatgaggacacacacaaggttcaccttctctgcctgctagcaaatggcttctatcgaaataacatctgcagccagccagatctgcatgctattggcctgtccatcatcccagcccgctttaccagagtgctgcctcgagatgtggacacctactacctctcaaacctggtgaagtggttcattggaacatttacagttaatgcagaactttcagccagtgaacaagataacctgcagactacattggaaaggagatttgctatttactctgctcgagatgatgaggaattggtccatatattcttactgattctccgggctctgcagctcttgacccggctggtattgtctctacagccaattcctctgaagtcagcaacagcaaagggaaagaaaccttccaaggaaagattgactgcggatccaggaggctcctcagaaacttccagccaagttctagaaaaccacaccaaaccaaagaccagcaaaggaaccaaacaagaggaaacctttgctaagggcacctgcaggccaagtgccaaagggaagaggaacaagggaggcagaaagaaacggagcaagccctcctccagcgaggaagatgagggcccaggagacaagcaggagaaggcaacccagcgacgtccgcatggccgggagcggcgggtggcctccagggtgtcttataaagaggagagtgggagtgatgaggctggcagcggctctgattttgagctctccagtggagaagcctctgatccctctgatgaggattccgaacctggccctccaaagcagaggaaagcccccgctcctcagaggacaaaggctgggtccaagagtgcctccaggacccatcgtgggagccatcgtaaggacccaagcttgccagcggcatcctcaagctcttcaagcagtaaaagaggcaagaaaatgtgcagcgatggtgagaaggcagaaaaaagaagcatagctggtatagaccagtggctagaggtgttctgtgagcaggaggaaaagtgggtatgtgtagactgtgtgcacggtgtggtgggccagcctctgacctgttacaagtacgccaccaagcccatgacctatgtggtgggcattgacagtgacggctgggtccgagatgtcacacagaggtacgacccagtctggatgacagtgacccgcaagtgccgggttgatgctgagtggtgggccgagaccttgagaccataccagagcccatttatggacagggagaagaaagaagacttggagtttcaggctaaacacatggaccagcctttgcccactgccattggcttatataagaaccaccctctgtatgccctgaagcggcatctcctgaaatatgaggccatctatcccgagacagctgccatccttgggtattgtcgtggagaagcggtctactccagggattgtgtgcacactctgcattccagggacacgtggctgaagaaagcaagagtggtgaggcttggagaagtaccctacaagatggtgaaaggcttttctaaccgtgctcggaaagcccgacttgctgagccccagctgcgggaagaaaatgacctgggcctgtttggctactggcagacagaggagtatcagcccccagtggccgtggacgggaaggtgccccggaacgagtttgggaatgtgtacctcttcctgcccagcatgatgcctattggctgtgtccagctgaacctgcccaatctacaccgcgtggcccgcaagctggacatcgactgtgtccaggccatcactggctttgatttccatggcggctactcccatcccgtgactgatggatacatcgtctgcgaggaattcaaagacgtgctcctgactgcctgggaaaatgagcaggcagtcattgaaaggaaggagaaggagaaaaaggagaagcgggctctagggaactggaagttgctggccaaaggtctgctcatcagggagaggctgaagcgtcgctacgggcccaagagtgaggcagcagctccccacacagatgcaggaggtggactctcttctgatgaagaggaggggaccagctctcaagcagaagcggccaggatactggctgcctcctggcctcaaaaccgagaagatgaagaaaagcagaagctgaagggtgggcccaagaagaccaaaagggaaaagaaagcagcagcttcccacctgttcccatttgagcagctgtgagctgagcgcccactagaggggcacccaccagttgctgctgccccactacaggccccacacctgccctgggcatgcccagcccctggtggtgggggcttctctgctgagaaggcaaactgaggcagcatgcacggaggcggggtcaggggagacgaggccaagctgaggaggtgctgcaggtcccgtctggctccagcccttgtcagattcacccagggtgaagccttcaaagctttttgctaccaaagcccactcaccctttgagctacagaacactttgctaggagatactcttctgcctcctagacctgttctttccatctttagaaacatcagtttttgtatggaagccaccgggagatttctggatggtggtgcatccgtgaatgcgctgatcgtttcttccagttagagtcttcatctgtccgacaagttcactcgcctcggttgcggacctaggaccatttctctgcaggccacttaccttcccctgagtcaggcttactaatgctgccctcactgcctctttgcagtaggggagagagcagagaagtacaggtcatctgctgggatctagttttccaagtaacattttgtggtgacagaagcctaaaaaaagctaaaatcaggaaagaaaaggaaaaatacgaattgaaaattaaggaaatgttagtaaaatagatgagtgttaaactagattgtattcattactagataaaatgtataaagctctctgtactaaggagaaatgacttttataacattttgagaaaataataaagcatttatctaaa

SEQ ID NO: 4568 - DNA, 2712 bp, Homo sapiens
  source 1..2712: mol_type = genomic DNA
atggctcggaaacgcgcggccggcggggagccgcggggacgcgaactgcgcagccagaaatccaaggccaagagcaaggcccggcgtgaggaggaggaggaggatgcctttgaagatgagaaacccccaaagaagagccttctctccaaagtttcacaaggaaagaggaaaagaggctgcagtcatcctgggggttcagcagatggtccagcaaaaaagaaagtggccaaggtgactgttaaatctgaaaacctcaaggttataaaggatgaagccctcagcgatggggatgacctcagggactttccaagtgacctcaagaaggcacaccatctgaagagaggggctaccatgaatgaagacagcaatgaagaagaggaagaaagtgaaaatgattgggaagaggcgaagacaagagaaagaagtgaaaagataaaactggagtttgagacatatcttcggagggcgatgaaacgtttcaataaaggggtccatgaggacacacacaaggttcaccttctctgcctgctagcaaatggcttctatcgaaataacatctgcagccagccagatctgcatgctattggcctgtccatcatcccagcccgctttaccagagtgctgcctcgagatgtggacacctactacctctcaaacctggtgaagtggttcattggaacatttacagttaatgcagaactttcagccagtgaacaagataacctgcagactacattggaaaggagatttgctatttactctgctcgagatgatgaggaattggtccatatattcttactgattctccgggctctgcagctcttgacccggctggtattgtctctacagccaattcctctgaagtcagcaacagcaaagggaaagaaaccttccaaggaaagattgactgcggatccaggaggctcctcagaaacttccagccaagttctagaaaaccacaccaaaccaaagaccagcaaaggaaccaaacaagaggaaacctttgctaagggcacctgcaggccaagtgccaaagggaagaggaacaagggaggcagaaagaaacggagcaagccctcctccagcgaggaagatgagggcccaggagacaagcaggagaaggcaacccagcgacgtccgcatggccgggagcggcgggtggcctccagggtgtcttataaagaggagagtgggagtgatgaggctggcagcggctctgattttgagctctccagtggagaagcctctgatccctctgatgaggattccgaacctggccctccaaagcagaggaaagcccccgctcctcagaggacaaaggctgggtccaagagtgcctccaggacccatcgtgggagccatcgtaaggacccaagcttgccagcggcatcctcaagctcttcaagcagtaaaagaggcaagaaaatgtgcagcgatggtgagaaggcagaaaaaagaagcatagctggtatagaccagtggctagaggtgttctgtgagcaggaggaaaagtgggtatgtgtagactgtgtgcacggtgtggtgggccagcctctgacctgttacaagtacgccaccaagcccatgacctatgtggtgggcattgacagtgacggctgggtccgagatgtcacacagaggtacgacccagtctggatgacagtgacccgcaagtgccgggttgatgctgagtggtgggccgagaccttgagaccataccagagcccatttatggacagggagaagaaagaagacttggagtttcaggctaaacacatggaccagcctttgcccactgccattggcttatataagaaccaccctctgtatgccctgaagcggcatctcctgaaatatgaggccatctatcccgagacagctgccatccttgggtattgtcgtggagaagcggtctactccagggattgtgtgcacactctgcattccagggacacgtggctgaagaaagcaagagtggtgaggcttggagaagtaccctacaagatggtgaaaggcttttctaaccgtgctcggaaagcccgacttgctgagccccagctgcgggaagaaaatgacctgggcctgtttggctactggcagacagaggagtatcagcccccagtggccgtggacgggaaggtgccccggaacgagtttgggaatgtgtacctcttcctgcccagcatgatgcctattggctgtgtccagctgaacctgcccaatctacaccgcgtggcccgcaagctggacatcgactgtgtccaggccatcactggctttgatttccatggcggctactcccatcccgtgactgatggatacatcgtctgcgaggaattcaaagacgtgctcctgactgcctgggaaaatgagcaggcagtcattgaaaggaaggagaaggagaaaaaggagaagcgggctctagggaactggaagttgctggccaaaggtctgctcatcagggagaggctgaagcgtcgctacgggcccaagagtgaggcagcagctccccacacagatgcaggaggtggactctcttctgatgaagaggaggggaccagctctcaagcagaagcggccaggatactggctgcctcctggcctcaaaaccgagaagatgaagaaaagcagaagctgaagggtgggcccaagaagaccaaaagggaaaagaaagcagcagcttcccacctgttcccatttgagcagctgtga

SEQ ID NO: 4569 - DNA, 2944 bp, Homo sapiens
  source 1..2944: mol_type = genomic DNA
actcgcgaagtggaatttgcccagacaagcaacatggctcggaaacgcgcggccggcggggagccgcggggacgcgaactgcgcagccagaaatccaaggccaagagcaaggcccggcgtgaggaggaggaggaggatgcctttgaagatgagaaacccccaaagaagagccttctctccaaagtttcacaaggaaagaggaaaagaggctgcagtcatcctgggggttcagcagatggtccagcaaaaaagaaagtggccaaggtgactgttaaatctgaaaacctcaaggttataaaggatgaagccctcagcgatggggatgacctcagggactttccaagtgacctcaagaaggcacaccatctgaagagaggggctaccatgaatgaagacagcaatgaagaagaggaagaaagtgaaaatgattgggaagaggttgaagtgaaaagataaaactggagtttgagacatatcttcggagggcgatgaaacgtttcaataaaggggtccatgaggacacacacaaggttcaccttctctgcctgctagcaaatggcttctatcgaaataacatctgcagccagccagatctgcatgctattggcctgtccatcatcccagcccgctttaccagagtgctgcctcgagatgtggacacctactacctctcaaacctggtgaagtggttcattggaacatttacagttaatgcagaactttcagccagtgaacaagataacctgcagactacattggaaaggagatttgctatttactctgctcgagatgatgaggaattggtccatatattcttactgattctccgggctctgcagctcttgacccggctggtattgtctctacagccaattcctctgaagtcagcaacagcaaagggaaagaaaccttccaaggaaagattgactgcggatccaggaggctcctcagaaacttccagccaagttctagaaaaccacaccaaaccaaagaccagcaaaggaaccaaacaagaggaaacctttgctaagggcacctgcaggccaagtgccaaagggaagaggaacaagggaggcagaaagaaacggagcaagccctcctccagcgaggaagatgagggcccaggagacaagcaggagaaggcaacccagcgacgtccgcatggccgggagcggcgggtggcctccagggtgtcttataaagaggagagtgggagtgatgaggctggcagcggctctgattttgagctctccagtggagaagcctctgatccctctgatgaggattccgaacctggccctccaaagcagaggaaagcccccgctcctcagaggacaaaggctgggtccaagagtgcctccaggacccatcgtgggagccatcgtaaggacccaagcttgccagcggcatcctcaagctcttcaagcagtaaaagaggcaagaaaatgtgcagcgatggtgagaaggcagaaaaaagaagcatagctggtatagaccagtggctagaggtgttctgtgagcaggaggaaaagtgggtatgtgtagactgtgtgcacggtgtggtgggccagcctctgacctgttacaagtacgccaccaagcccatgacctatgtggtgggcattgacagtgacggctgggtccgagatgtcacacagaggtacgacccagtctggatgacagtgacccgcaagtgccgggttgatgctgagtggtgggccgagaccttgagaccataccagagcccatttatggacagggagaagaaagaagacttggagtttcaggctaaacacatggaccagcctttgcccactgccattggcttatataagaaccaccctctgtatgccctgaagcggcatctcctgaaatatgaggccatctatcccgagacagctgccatccttgggtattgtcgtggagaagcggtctactccagggattgtgtgcacactctgcattccagggacacgtggctgaagaaagcaagagtggtgaggcttggagaagtaccctacaagatggtgaaaggcttttctaaccgtgctcggaaagcccgacttgctgagccccagctgcgggaagaaaatgacctgggcctgtttggctactggcagacagaggagtatcagcccccagtggccgtggacgggaaggtgccccggaacgagtttgggaatgtgtacctcttcctgcccagcatgatgcctattggctgtgtccagctgaacctgcccaatctacaccgcgtggcccgcaagctggacatcgactgtgtccaggccatcactggctttgatttccatggcggctactcccatcccgtgactgatggatacatcgtctgcgaggaattcaaagacgtgctcctgactgcctgggaaaatgagcaggcagtcattgaaaggaaggagaaggagaaaaaggagaagcgggctctagggaactggaagttgctggccaaaggtctgctcatcagggagaggctgaagcgtcgctacgggcccaagagtgaggcagcagctccccacacagatgcaggaggtggactctcttctgatgaagaggaggggaccagctctcaagcagaagcggccaggatactggctgcctcctggcctcaaaaccgagaagatgaagaaaagcagaagctgaagggtgggcccaagaagaccaaaagggaaaagaaagcagcagcttcccacctgttcccatttgagcagctgtgagctgagcgcccactagaggggcacccaccagttgctgctgccccactacaggccccacacctgccctgggcatgcccagcccctggtggtgggggcttctctgctgagaaggcaaactgaggcagcatgcacggaggcggggtcaggggagacgaggccaagctgaggaggtgctgcaggtcccgtctggctccagcccttgtcagattcac

SEQ ID NO: 4570 - DNA, 557 bp, Homo sapiens
  source 1..557: mol_type = genomic DNA
gcatcgcggccgggtgcgtcactcgcgaagtggaatttgcccagacaagcaacatggctcggaaacgcgcggccggcggggagccgcggggacgcgaactgcgcagccagaaatccaaggccaagagcaaggcccggcatgcctttgaagatgagaaacccccaaagaagagccttctctccaaagtttcacaaggaaagaggaaaagaggctgcagtcatcctgggggttcagcagatggtccagcaaaaaagaaagtggccaaggtgactgttaaatctgaaaacctcaaggttataaaggatgaagccctcagcgatggggatgacctcagggactttccaagtgacctcaagaaggcacaccatctgaagagaggggctaccatgaatgaagacagcaatgaagaagaggaagaaagtgaaaatgattgggaagaggttgaagaacttagtgagcctgtgctgggtgacgtgagagaaagtacagccttctctcgatctcttctgcctgtgaagccagtggagatagagattgaaacgccagagcaggcgaag

SEQ ID NO: 4571 - DNA, 1868 bp, Homo sapiens
  source 1..1868: mol_type = genomic DNA
tcaagcagtaaaagaggcaagaaaatgtgcagcgatggtgagaaggcagaaaaaagaagcatagctggtatagaccagtggctagaggtgttctgtgagcaggaggaaaagtgggtatgtgtagactgtgtgcacggtgtggtgggccagcctctgacctgttacaagtacgccaccaagcccatgacctatgtggtgggcattgacagtgacggctgggtccgagatgtcacacagaggtacgacccagtctggatgacagtgacccgcaagtgccgggttgatgctgagtggtgggccgagaccttgagaccataccagagcccatttatggacagggagaagaaagaagacttggagggattgtgtgcacactctgcattccagggacacgtggctgaagaaagcaagagtggtgaggcttggagaagtaccctacaagatggtgaaaggcttttctaaccgtgctcggaaagcccgacttgctgagccccagctgcgggaagaaaatgacctgggcctgtttggctactggcagacagaggagtatcagcccccagtggccgtggacgggaaggtgccccggaacgagtttgggaatgtgtacctcttcctgcccagcatgatgcctattggctgtgtccagctgaacctgcccaatctacaccgcgtggcccgcaagctggacatcgactgtgtccaggccatcactggctttgatttccatggcggctactcccatcccgtgactgatggatacatcgtctgcgaggaattcaaagacgtgctcctgactgcctgggaaaatgagcaggcagtcattgaaaggaaggagaaggagaaaaaggagaagcgggctctagggaactggaagttgctggccaaaggtctgctcatcagggagaggctgaagcgtcgctacgggcccaagagtgaggcagcagctccccacacagatgcaggaggtggactctcttctgatgaagaggaggggaccagctctcaagcagaagcggccaggatactggctgcctcctggcctcaaaaccgagaagatgaagaaaagcagaagctgaagggtgggcccaagaagaccaaaagggaaaagaaagcagcagcttcccacctgttcccatttgagcagctgtgagctgagcgcccactagaggggcacccaccagttgctgctgccccactacaggccccacacctgccctgggcatgcccagcccctggtggtgggggcttctctgctgagaaggcaaactgaggcagcatgcacggaggcggggtcaggggagacgaggccaagctgaggaggtgctgcaggtcccgtctggctccagcccttgtcagattcacccagggtgaagccttcaaagctttttgctaccaaagcccactcaccctttgagctacagaacactttgctaggagatactcttctgcctcctagacctgttctttccatctttagaaacatcagtttttgtatggaagccaccgggagatttctggatggtggtgcatccgtgaatgcgctgatcgtttcttccagttagagtcttcatctgtccgacaagttcactcgcctcggttgcggacctaggaccatttctctgcaggccacttaccttcccctgagtcaggcttactaatgctgccctcactgcctctttgcagtaggggagagagcagagaagtacaggtcatctgctgggatctagttttccaagtaacattttgtggtgacagaagcctaaaaaaagctaaaatcaggaaagaaaaggaaaaatacgaattgaaaattaaggaaatgttagtaaaatagatgagtgttaaactagattgtattcattactagataa

SEQ ID NO: 4572 - DNA, 177 bp, Homo sapiens
  source 1..177: mol_type = genomic DNA
atgtgcagcgatggtgagaaggcagaaaaaagaagcatagctggtatagaccagtggctagaggtgttctgtgagcaggaggaaaagtgggtatgtgtagactgtcggtgtggtgggccagcctctgacctgttacaagtacgccaccaagcccatgacctatgtggtgggcattga

SEQ ID NO: 4573 - DNA, 569 bp, Homo sapiens
  source 1..569: mol_type = genomic DNA
aagccctcctccagcgaggaagatgagggcccaggagacaagcaggagaaggcaacccagcgacgtccgcatggccgggagcggcgggtggcctccagggtgtcttataaagaggagagtgggagtgatgaggctggcagcggctctgattttgagctctccagtggagaagcctctgatccctctgatgaggattccgaacctggccctccaaagcagaggaaagcccccgctcctcagaggacaaaggctgggtccaagagtgcctccaggacccatcgtgggagccatcgtaaggacccaagcttgccagcggcatcctcaagctcttcaagcagtaaaagaggcaagaaaatgtgcagcgatggtgagaaggcagaaaaaagaagcatagctggtatagaccagtggctagaggtgttctgtgagcaggaggaaaagtggtgacggctgggtccgagatgtcacacagaggtacgacccagtctggatgacagtgacccgcaagtgccgggttgatgctgagtggtgggccgagaccttgagaccataccagagcccatttatgg

SEQ ID NO: 4574 - DNA, 3565 bp, Homo sapiens
  source 1..3565: mol_type = genomic DNA
ggtagatgcggctgtgacagcagcaaagaatgacggccaagggcgacagcaggggctggccatgctgtaaaggggcttcttgggagggtccagcctcaggaatcaaggggaactcctgagccgagaattctgaagatctcctccctccctgaagctgtgggctgggccatcggaaaactttcagttttgtttccttgcctgcaagaaacgaaactcaaccgaaagcctgcagagagcagaacatggaaggagacttctcggtgtgcaggaactgtaaaagacatgtagtctctgccaacttcaccctccatgaggcttactgcctgcggttcctggtcctgtgtccggagtgtgaggagcctgtccccaaggaaaccatggaggagcactgcaagcttgagcaccagcaggccaatgagtgccaggagcgccctgttgagtgtaagttctgcaaactggacatgcagctcagcaagctggagctccacgagtcctactgtggcagccggacagagctctgccaaggctgtggccagttcatcatgcaccgcatgctcgcccagcacagagatgtctgtcgcagtgaacaggcccagctcgggaaaggggaaagaatttcagctcctgaaagggaaatctactgtcattattgcaaccaaatgattccagaaaataagtatttccaccatatgggtaaatgttgtccagactcagagtttaagaaacactttcctgttggaaatccagaaattcttccttcatctcttccaagtcaagctgctgaaaatcaaacttccacgatggagaaagatgttcgtccaaagacaagaagtataaacagatttcctcttcattctgaaagttcatcaaagaaagcaccaagaagcaaaaacaaaaccttggatccacttttgatgtcagagcccaagcccaggaccagctcccctagaggagataaagcagcctatgacattctgaggagatgttctcagtgtggcatcctgcttcccctgccgatcctaaatcaacatcaggagaaatgccggtggttagcttcatcaaaaggaaaacaagtgagaaatttcagctagatttggaaaaggaaaggtactacaaattcaaaagatttcacttttaacactggcattcctgcctacttgctgtggtggtcttgtgaaaggtgatgggttttattcgttgggctttaaaagaaaaggtttggcagaactaaaaacaaaactcacgtatcatctcaatagatacagaaaaggcttttgataaaattcaacttgacttcatgttaaaaaccctcaacaaaccaggcgtcgaaggaacatacctcaaaataataagagccatctatgacaaaaccacagccaacatcatactgaatgagcaaaagctggagcattactcttgagaagtagaacaaggcacttcagtcctattcaacatagtactggaagtcctcgccacagcaatcaggcaagagaaagaaataaaaggcaaccaaaaagaaaggaagtcgaagtatctctgtttgcagacgatatgattctatatctagaaaaccccatgatcttggcccaaaagctcctagatctgataaacaacttcagctaactttcaggagacaaaatcaatatacaaaatatggtagcatttttatacaccaacgacatccaagctgagagccaaatcaagaatgcaatcctattcacaattgccacaaaaagaataaaatacctaggaatacagctaaccagggagatgaaagatctctacaacaaaaattacaaaacactgctgaaagaaatcagagatgacacaaatggaaaaacattccatacttatggataggaagaatcaatattgttaaaatggccatactacccaaagcaatttatagattcaatgctattcctatcaaactaccaataacattcttcacagaatcagaaaaaaaaagcattaaaatttatttgaaaccaaaaaagagcccaaaaagccaaagcaatcctaagcaaaaagaacaaagctggaggcatcgcattacccaacttcaaactatactacagggctacagtaaccaaaactgcatgatactggtacaaaagcatggtgctggtacaaaagcagacacatagatcaatggaacagaatagagggcccagaaataaagctacacacctacaaccatctaatctttgacaaagttgacaaaaatacgcaatggggaaagaattccccattcagtaagtggtactgggataactagctagccatatgcagaggattgaaactgaaccacttccttacaccatatgcaaaaatcaactcaagatggattaaagacttaaatgtaaaaccccaaactataaaaactctggaagataacctaggcaataccattctggacataggaacggaaaaagatttcatgacaaagatcccaaaaataattgtaacgaaagcaaaaattgacaaatgggacatgattaaacagaattaccatttgactcagcaatcccattattggttatatacccaaaggaatctaaatcattctgtcataaagacatatatacacaaatgttcacggcagcactatacacaatcgcaaagtcagggaatcaaactaaatgtccatcagtggtagaaaggataaagaaaatgtggtggcagggagtggtggctcatgtctgtaatcccagcactttgggaggctgaggcgggtggttcacctgaggtcaggagtttgagaccagcctggccaacatggagaaactccgtctccgctaaaaatacgaaaattagccaggcgtggtggcgagcacctgtcatcccagctacttgggaggcctaggcgtgagaatcgcttgaacctggaaggtggtggttgcagtgagccgagatcctgccactgcactccagcctgggcaaccaagcgagactctgccttaaaaaaaaaaaaaagaaaatgtggcacatatacaccatggaatactatgcagccataaaaaagaatgggatcatgtcctgtgcagcaacgtggatggagctggaagccattatcctaaatgaactcactcagaaacagaaaaccaaataccacatgttctcacttataagtagaagctaaacattgagtacacatggatacaaagaagggaaccgcagacactggggcctacctgaggtcggagcatggaaggagggtgaggatcaaaaaactacctatctggtactatgctttttatctggatgatgaaataatctgtacaacaaaccctggtgacatgcaatttacctatatagcaagcctacacatgtgcccctgaacctaaaaaaaaagttaaaagaaaaacgtttggattattttccctctttcgaacaaagacattggtttgcccaaggactacaaataaaccaacgggaaaaaagaaaggttccagttttgtctgaaaattctgattaagcctctgggccctacagcctggagaacctggagaatcctacacccacagaacccggctttgtccccaaagaataaaaacacctctct

SEQ ID NO: 4575 - DNA, 3622 bp, Homo sapiens
  source 1..3622: mol_type = genomic DNA
ggtagatgcggctgtgacagcagcaaagaatgacggccaagggcgacagcaggggctggccatgctgtaaaggggcttcttgggagggtccagcctcaggaatcaaggggaactcctgagccgagaattctgaagatctcctccctccctgaagctgtgggctgggccatcggaaaactttcagttttgtttccttgcctgcaagaaacgaaactcaaccgaaagcctgcagagagcagaacatggaaggagacttctcggtgtgcaggaactgtaaaagacatgtagtctctgccaacttcaccctccatgaggcttactgcctgcggttcctggtcctgtgtccggagtgtgaggagcctgtccccaaggaaaccatggaggagcactgcaagcttgagcaccagcaggttgggtgtacgatgtgtcagcagagcatgcagaagtcctcgctggagtttcataaggccaatgagtgccaggagcgccctgttgagtgtaagttctgcaaactggacatgcagctcagcaagctggagctccacgagtcctactgtggcagccggacagagctctgccaaggctgtggccagttcatcatgcaccgcatgctcgcccagcacagagatgtctgtcgcagtgaacaggcccagctcgggaaaggggaaagaatttcagctcctgaaagggaaatctactgtcattattgcaaccaaatgattccagaaaataagtatttccaccatatgggtaaatgttgtccagactcagagtttaagaaacactttcctgttggaaatccagaaattcttccttcatctcttccaagtcaagctgctgaaaatcaaacttccacgatggagaaagatgttcgtccaaagacaagaagtataaacagatttcctcttcattctgaaagttcatcaaagaaagcaccaagaagcaaaaacaaaaccttggatccacttttgatgtcagagcccaagcccaggaccagctcccctagaggagataaagcagcctatgacattctgaggagatgttctcagtgtggcatcctgcttcccctgccgatcctaaatcaacatcaggagaaatgccggtggttagcttcatcaaaaggaaaacaagtgagaaatttcagctagatttggaaaaggaaaggtactacaaattcaaaagatttcacttttaacactggcattcctgcctacttgctgtggtggtcttgtgaaaggtgatgggttttattcgttgggctttaaaagaaaaggtttggcagaactaaaaacaaaactcacgtatcatctcaatagatacagaaaaggcttttgataaaattcaacttgacttcatgttaaaaaccctcaacaaaccaggcgtcgaaggaacatacctcaaaataataagagccatctatgacaaaaccacagccaacatcatactgaatgagcaaaagctggagcattactcttgagaagtagaacaaggcacttcagtcctattcaacatagtactggaagtcctcgccacagcaatcaggcaagagaaagaaataaaaggcaaccaaaaagaaaggaagtcgaagtatctctgtttgcagacgatatgattctatatctagaaaaccccatgatcttggcccaaaagctcctagatctgataaacaacttcagctaactttcaggagacaaaatcaatatacaaaatatggtagcatttttatacaccaacgacatccaagctgagagccaaatcaagaatgcaatcctattcacaattgccacaaaaagaataaaatacctaggaatacagctaaccagggagatgaaagatctctacaacaaaaattacaaaacactgctgaaagaaatcagagatgacacaaatggaaaaacattccatacttatggataggaagaatcaatattgttaaaatggccatactacccaaagcaatttatagattcaatgctattcctatcaaactaccaataacattcttcacagaatcagaaaaaaaaagcattaaaatttatttgaaaccaaaaaagagcccaaaaagccaaagcaatcctaagcaaaaagaacaaagctggaggcatcgcattacccaacttcaaactatactacagggctacagtaaccaaaactgcatgatactggtacaaaagcatggtgctggtacaaaagcagacacatagatcaatggaacagaatagagggcccagaaataaagctacacacctacaaccatctaatctttgacaaagttgacaaaaatacgcaatggggaaagaattccccattcagtaagtggtactgggataactagctagccatatgcagaggattgaaactgaaccacttccttacaccatatgcaaaaatcaactcaagatggattaaagacttaaatgtaaaaccccaaactataaaaactctggaagataacctaggcaataccattctggacataggaacggaaaaagatttcatgacaaagatcccaaaaataattgtaacgaaagcaaaaattgacaaatgggacatgattaaacagaattaccatttgactcagcaatcccattattggttatatacccaaaggaatctaaatcattctgtcataaagacatatatacacaaatgttcacggcagcactatacacaatcgcaaagtcagggaatcaaactaaatgtccatcagtggtagaaaggataaagaaaatgtggtggcagggagtggtggctcatgtctgtaatcccagcactttgggaggctgaggcgggtggttcacctgaggtcaggagtttgagaccagcctggccaacatggagaaactccgtctccgctaaaaatacgaaaattagccaggcgtggtggcgagcacctgtcatcccagctacttgggaggcctaggcgtgagaatcgcttgaacctggaaggtggtggttgcagtgagccgagatcctgccactgcactccagcctgggcaaccaagcgagactctgccttaaaaaaaaaaaaaagaaaatgtggcacatatacaccatggaatactatgcagccataaaaaagaatgggatcatgtcctgtgcagcaacgtggatggagctggaagccattatcctaaatgaactcactcagaaacagaaaaccaaataccacatgttctcacttataagtagaagctaaacattgagtacacatggatacaaagaagggaaccgcagacactggggcctacctgaggtcggagcatggaaggagggtgaggatcaaaaaactacctatctggtactatgctttttatctggatgatgaaataatctgtacaacaaaccctggtgacatgcaatttacctatatagcaagcctacacatgtgcccctgaacctaaaaaaaaagttaaaagaaaaacgtttggattattttccctctttcgaacaaagacattggtttgcccaaggactacaaataaaccaacgggaaaaaagaaaggttccagttttgtctgaaaattctgattaagcctctgggccctacagcctggagaacctggagaatcctacacccacagaacccggctttgtccccaaagaataaaaacacctctct

SEQ ID NO: 4576 - DNA, 3074 bp, Homo sapiens
  source 1..3074: mol_type = genomic DNA
atgtctctccattacggttgctgctgccctgagtgcacatctgtggccataaaggaaatgatgtgggtgattcggccaagagttgcctgtgtggtcaaggatgccggcagcgcaggggaaagaatttcagctcctgaaagggaaatctactgtcattattgcaaccaaatgattccagaaaataagtatttccaccatatgggtaaatgttgtccagactcagagtttaagaaacactttcctgttggaaatccagaaattcttccttcatctcttccaagtcaagctgctgaaaatcaaacttccacgatggagaaagatgttcgtccaaagacaagaagtataaacagatttcctcttcattctgaaagttcatcaaagaaagcaccaagaagcaaaaacaaaaccttggatccacttttgatgtcagagcccaagcccaggaccagctcccctagaggagataaagcagcctatgacattctgaggagatgttctcagtgtggcatcctgcttcccctgccgatcctaaatcaacatcaggagaaatgccggtggttagcttcatcaaaaggaaaacaagtgagaaatttcagctagatttggaaaaggaaaggtactacaaattcaaaagatttcacttttaacactggcattcctgcctacttgctgtggtggtcttgtgaaaggtgatgggttttattcgttgggctttaaaagaaaaggtttggcagaactaaaaacaaaactcacgtatcatctcaatagatacagaaaaggcttttgataaaattcaacttgacttcatgttaaaaaccctcaacaaaccaggcgtcgaaggaacatacctcaaaataataagagccatctatgacaaaaccacagccaacatcatactgaatgagcaaaagctggagcattactcttgagaagtagaacaaggcacttcagtcctattcaacatagtactggaagtcctcgccacagcaatcaggcaagagaaagaaataaaaggcaaccaaaaagaaaggaagtcgaagtatctctgtttgcagacgatatgattctatatctagaaaaccccatgatcttggcccaaaagctcctagatctgataaacaacttcagctaactttcaggagacaaaatcaatatacaaaatatggtagcatttttatacaccaacgacatccaagctgagagccaaatcaagaatgcaatcctattcacaattgccacaaaaagaataaaatacctaggaatacagctaaccagggagatgaaagatctctacaacaaaaattacaaaacactgctgaaagaaatcagagatgacacaaatggaaaaacattccatacttatggataggaagaatcaatattgttaaaatggccatactacccaaagcaatttatagattcaatgctattcctatcaaactaccaataacattcttcacagaatcagaaaaaaaaagcattaaaatttatttgaaaccaaaaaagagcccaaaaagccaaagcaatcctaagcaaaaagaacaaagctggaggcatcgcattacccaacttcaaactatactacagggctacagtaaccaaaactgcatgatactggtacaaaagcatggtgctggtacaaaagcagacacatagatcaatggaacagaatagagggcccagaaataaagctacacacctacaaccatctaatctttgacaaagttgacaaaaatacgcaatggggaaagaattccccattcagtaagtggtactgggataactagctagccatatgcagaggattgaaactgaaccacttccttacaccatatgcaaaaatcaactcaagatggattaaagacttaaatgtaaaaccccaaactataaaaactctggaagataacctaggcaataccattctggacataggaacggaaaaagatttcatgacaaagatcccaaaaataattgtaacgaaagcaaaaattgacaaatgggacatgattaaacagaattaccatttgactcagcaatcccattattggttatatacccaaaggaatctaaatcattctgtcataaagacatatatacacaaatgttcacggcagcactatacacaatcgcaaagtcagggaatcaaactaaatgtccatcagtggtagaaaggataaagaaaatgtggtggcagggagtggtggctcatgtctgtaatcccagcactttgggaggctgaggcgggtggttcacctgaggtcaggagtttgagaccagcctggccaacatggagaaactccgtctccgctaaaaatacgaaaattagccaggcgtggtggcgagcacctgtcatcccagctacttgggaggcctaggcgtgagaatcgcttgaacctggaaggtggtggttgcagtgagccgagatcctgccactgcactccagcctgggcaaccaagcgagactctgccttaaaaaaaaaaaaaagaaaatgtggcacatatacaccatggaatactatgcagccataaaaaagaatgggatcatgtcctgtgcagcaacgtggatggagctggaagccattatcctaaatgaactcactcagaaacagaaaaccaaataccacatgttctcacttataagtagaagctaaacattgagtacacatggatacaaagaagggaaccgcagacactggggcctacctgaggtcggagcatggaaggagggtgaggatcaaaaaactacctatctggtactatgctttttatctggatgatgaaataatctgtacaacaaaccctggtgacatgcaatttacctatatagcaagcctacacatgtgcccctgaacctaaaaaaaaagttaaaagaaaaacgtttggattattttccctctttcgaacaaagacattggtttgcccaaggactacaaataaaccaacgggaaaaaagaaaggttccagttttgtctgaaaattctgattaagcctctgggccctacagcctggagaacctggagaatcctacacccacagaacccggctttgtccccaaagaataaaaacacctctct

SEQ ID NO: 4577 - DNA, 737 bp, Homo sapiens
  source 1..737: mol_type = genomic DNA
ggtagatgcggctgtgacagcagcaaagaatgacggccaagggcgacagcaggggctggccatgctgtaaaggggcttcttgggagggtccagcctcaggaatcaaggggaactcctgagccgagaattctgaagatctcctccctccctgaagctgtgggctgggccatcggaaaactttcagttttgtttccttgcctgcaagaaacgaaactcaaccgaaagcctgcagagagcagaacatggaaggagacttctcggtgtgcaggaactgtaaaagacatgtagtctctgccaacttcaccctccatgaggcttactgcctgcggttcctggtcctgtgtccggagtgtgaggagcctgtccccaaggaaaccatggaggagcactgcaagcttgagcaccagcaggttgggtgtacgatgtgtcagcagagcatgcagaagtcctcgctggagtttcataaggccaatgagtgccaggagcgccctgttgagtgtaagttctgcaaactggacatgcagctcagcaagctggagctccacgagtcctactgtggcagccggacagagctctgccaaggctgtggccagttcatcatgcaccgcatgctcgcccagcacagagatgtctgtcgcagtgaacaggcccagctcgggaaagaaaccagtcctgatccaggaaaatgtctctccattacggttgctgctgccctgagtgcacatctgtggccataa

SEQ ID NO: 4578 - DNA, 3622 bp, Homo sapiens
  source 1..3622: mol_type = genomic DNA
ggtagatgcggctgtgacagcagcaaagaatgacggccaagggcgacagcaggggctggccatgctgtaaaggggcttcttgggagggtccagcctcaggaatcaaggggaactcctgagccgagaattctgaagatctcctccctccctgaagctgtgggctgggccatcggaaaactttcagttttgtttccttgcctgcaagaaacgaaactcaaccgaaagcctgcagagagcagaacatggaaggagacttctcggtgtgcaggaactgtaaaagacatgtagtctctgccaacttcaccctccatgaggcttactgcctgcggttcctggtcctgtgtccggagtgtgaggagcctgtccccaaggaaaccatggaggagcactgcaagcttgagcaccagcaggtgagtgagatggggtctgggaggggcaagtgttccatcctccctgcaagaaagaaggccaatgagtgccaggagcgccctgttgagtgtaagttctgcaaactggacatgcagctcagcaagctggagctccacgagtcctactgtggcagccggacagagctctgccaaggctgtggccagttcatcatgcaccgcatgctcgcccagcacagagatgtctgtcgcagtgaacaggcccagctcgggaaaggggaaagaatttcagctcctgaaagggaaatctactgtcattattgcaaccaaatgattccagaaaataagtatttccaccatatgggtaaatgttgtccagactcagagtttaagaaacactttcctgttggaaatccagaaattcttccttcatctcttccaagtcaagctgctgaaaatcaaacttccacgatggagaaagatgttcgtccaaagacaagaagtataaacagatttcctcttcattctgaaagttcatcaaagaaagcaccaagaagcaaaaacaaaaccttggatccacttttgatgtcagagcccaagcccaggaccagctcccctagaggagataaagcagcctatgacattctgaggagatgttctcagtgtggcatcctgcttcccctgccgatcctaaatcaacatcaggagaaatgccggtggttagcttcatcaaaaggaaaacaagtgagaaatttcagctagatttggaaaaggaaaggtactacaaattcaaaagatttcacttttaacactggcattcctgcctacttgctgtggtggtcttgtgaaaggtgatgggttttattcgttgggctttaaaagaaaaggtttggcagaactaaaaacaaaactcacgtatcatctcaatagatacagaaaaggcttttgataaaattcaacttgacttcatgttaaaaaccctcaacaaaccaggcgtcgaaggaacatacctcaaaataataagagccatctatgacaaaaccacagccaacatcatactgaatgagcaaaagctggagcattactcttgagaagtagaacaaggcacttcagtcctattcaacatagtactggaagtcctcgccacagcaatcaggcaagagaaagaaataaaaggcaaccaaaaagaaaggaagtcgaagtatctctgtttgcagacgatatgattctatatctagaaaaccccatgatcttggcccaaaagctcctagatctgataaacaacttcagctaactttcaggagacaaaatcaatatacaaaatatggtagcatttttatacaccaacgacatccaagctgagagccaaatcaagaatgcaatcctattcacaattgccacaaaaagaataaaatacctaggaatacagctaaccagggagatgaaagatctctacaacaaaaattacaaaacactgctgaaagaaatcagagatgacacaaatggaaaaacattccatacttatggataggaagaatcaatattgttaaaatggccatactacccaaagcaatttatagattcaatgctattcctatcaaactaccaataacattcttcacagaatcagaaaaaaaaagcattaaaatttatttgaaaccaaaaaagagcccaaaaagccaaagcaatcctaagcaaaaagaacaaagctggaggcatcgcattacccaacttcaaactatactacagggctacagtaaccaaaactgcatgatactggtacaaaagcatggtgctggtacaaaagcagacacatagatcaatggaacagaatagagggcccagaaataaagctacacacctacaaccatctaatctttgacaaagttgacaaaaatacgcaatggggaaagaattccccattcagtaagtggtactgggataactagctagccatatgcagaggattgaaactgaaccacttccttacaccatatgcaaaaatcaactcaagatggattaaagacttaaatgtaaaaccccaaactataaaaactctggaagataacctaggcaataccattctggacataggaacggaaaaagatttcatgacaaagatcccaaaaataattgtaacgaaagcaaaaattgacaaatgggacatgattaaacagaattaccatttgactcagcaatcccattattggttatatacccaaaggaatctaaatcattctgtcataaagacatatatacacaaatgttcacggcagcactatacacaatcgcaaagtcagggaatcaaactaaatgtccatcagtggtagaaaggataaagaaaatgtggtggcagggagtggtggctcatgtctgtaatcccagcactttgggaggctgaggcgggtggttcacctgaggtcaggagtttgagaccagcctggccaacatggagaaactccgtctccgctaaaaatacgaaaattagccaggcgtggtggcgagcacctgtcatcccagctacttgggaggcctaggcgtgagaatcgcttgaacctggaaggtggtggttgcagtgagccgagatcctgccactgcactccagcctgggcaaccaagcgagactctgccttaaaaaaaaaaaaaagaaaatgtggcacatatacaccatggaatactatgcagccataaaaaagaatgggatcatgtcctgtgcagcaacgtggatggagctggaagccattatcctaaatgaactcactcagaaacagaaaaccaaataccacatgttctcacttataagtagaagctaaacattgagtacacatggatacaaagaagggaaccgcagacactggggcctacctgaggtcggagcatggaaggagggtgaggatcaaaaaactacctatctggtactatgctttttatctggatgatgaaataatctgtacaacaaaccctggtgacatgcaatttacctatatagcaagcctacacatgtgcccctgaacctaaaaaaaaagttaaaagaaaaacgtttggattattttccctctttcgaacaaagacattggtttgcccaaggactacaaataaaccaacgggaaaaaagaaaggttccagttttgtctgaaaattctgattaagcctctgggccctacagcctggagaacctggagaatcctacacccacagaacccggctttgtccccaaagaataaaaacacctctct

SEQ ID NO: 4579 - DNA, 8584 bp, Homo sapiens
  source 1..8584: mol_type = genomic DNA
tcgggccggctgtcctggcgcggtgggtacagcttgtgtaggctttcccctcccccgctttccctccttcccctctcctccctcccctcttcttttcccctccacttccctcgggccggcgctgctggggagggcgggaaggccgcgccagcccatcaggggtggcccggccccggctgcttgcccgggttcctcggactgccgacggcaggcgtgggtgggtgggtgacttcaggcctgcaggattgccttcctaaaccctgtgacacctaagaaaaggtggacaagtcctattttcaagagaagatgacttttaacagttttgaaggatctaaaacttgtgtacctgcagacatcaataaggaagaagaatttgtagaagagtttaatagattaaaaacttttgctaattttccaagtggtagtcctgtttcagcatcaacactggcacgagcagggtttctttatactggtgaaggagataccgtgcggtgctttagttgtcatgcagctgtagatagatggcaatatggagactcagcagttggaagacacaggaaagtatccccaaattgcagatttatcaacggcttttatcttgaaaatagtgccacgcagtctacaaattctggtatccagaatggtcagtacaaagttgaaaactatctgggaagcagagatcattttgccttagacaggccatctgagacacatgcagactatcttttgagaactgggcaggttgtagatatatcagacaccatatacccgaggaaccctgccatgtatagtgaagaagctagattaaagtcctttcagaactggccagactatgctcacctaaccccaagagagttagcaagtgctggactctactacacaggtattggtgaccaagtgcagtgcttttgttgtggtggaaaactgaaaaattgggaaccttgtgatcgtgcctggtcagaacacaggcgacactttcctaattgcttctttgttttgggccggaatcttaatattcgaagtgaatctgatgctgtgagttctgataggaatttcccaaattcaacaaatcttccaagaaatccatccatggcagattatgaagcacggatctttacttttgggacatggatatactcagttaacaaggagcagcttgcaagagctggattttatgctttaggtgaaggtgataaagtaaagtgctttcactgtggaggagggctaactgattggaagcccagtgaagacccttgggaacaacatgctaaatggtatccagggtgcaaatatctgttagaacagaagggacaagaatatataaacaatattcatttaactcattcacttgaggagtgtctggtaagaactactgagaaaacaccatcactaactagaagaattgatgataccatcttccaaaatcctatggtacaagaagctatacgaatggggttcagtttcaaggacattaagaaaataatggaggaaaaaattcagatatctgggagcaactataaatcacttgaggttctggttgcagatctagtgaatgctcagaaagacagtatgcaagatgagtcaagtcagacttcattacagaaagagattagtactgaagagcagctaaggcgcctgcaagaggagaagctttgcaaaatctgtatggatagaaatattgctatcgtttttgttccttgtggacatctagtcacttgtaaacaatgtgctgaagcagttgacaagtgtcccatgtgctacacagtcattactttcaagcaaaaaatttttatgtcttaatctaactctatagtaggcatgttatgttgttcttattaccctgattgaatgtgtgatgtgaactgactttaagtaatcaggattgaattccattagcatttgctaccaagtaggaaaaaaaatgtacatggcagtgttttagttggcaatataatctttgaatttcttgatttttcagggtattagctgtattatccattttttttactgttatttaattgaaaccatagactaagaataagaagcatcatactataactgaacacaatgtgtattcatagtatactgatttaatttctaagtgtaagtgaattaatcatctggattttttattcttttcagataggcttaacaaatggagctttctgtatataaatgtggagattagagttaatctccccaatcacataatttgttttgtgtgaaaaaggaataaattgttccatgctggtggaaagatagagattgtttttagaggttggttgttgtgttttaggattctgtccattttcttttaaagttataaacacgtacttgtgcgaattatttttttaaagtgatttgccatttttgaaagcgtatttaatgatagaatactatcgagccaacatgtactgacatggaaagatgtcaaagatatgttaagtgtaaaatgcaagtggcaaaacactatgtatagtctgagccagatcaaagtatgtatgtttttaatatgcatagaacaaaagatttggaaagatatacaccaaactgttaaatgtggtttctcttcggggagggggggattgggggaggggccccagaggggttttataggggccttttcactttctacttttttcattttgttctgttcgaattttttataagtatgtattacttttgtaatcagaatttttagaaagtattttgctgatttaaaggcttaggcatgttcaaacgcctgcaaaactacttatcactcagctttagtttttctaatccaagaaggcagggcagttaacctttttggtgccaatgtgaaatgtaaatgattttatgtttttcctgctttgtggatgaaaaatatttctgagtggtagttttttgacaggtagaccatgtcttatcttgtttcaaaataagtatttctgattttgtaaaatgaaatataaaatatgtctcagatcttccaattaattagtaaggattcatccttaatccttgctagtttaagcctgcctaagtcactttactaaaagatctttgttaactcagtattttaaacatctgtcagcttatgtaggtaaaagtagaagcatgtttgtacactgcttgtagttatagtgacagctttccatgttgagattctcatatcatcttgtatcttaaagtttcatgtgagtttttaccgttaggatgattaagatgtatataggacaaaatgttaagtctttcctctacctacatttgttttcttggctagtaatagtagtagatacttctgaaataaatgttctctcaagatccttaaaacctcttggaaattataaaaatattggcaagaaaagaagaatagttgtttaaatattttttaaaaaacacttgaataagaatcagtagggtataaactagaagtttaaaaatgcttcatagaacgtccagggtttacattacaagattctcacaacaaacctattgtagaggtgagtaaggcatgttactacagaggaaagtttgagagtaaaactgtaaaaaattatatttttgttgtactttctaagagaaagagtattgttatgttctcctaacttctgttgattactactttaagtgatattcatttaaaacattgcaaatttattttatttatttaattttctttttgagatggagtcttgcttgtcacccaggctggagtgcagtggagtgatctctgctcactgcaacctccgccttctgggttcaagcgattctcgtgcctcagcttcctgagtagctggaattacaggcaggtgccaccatgcccgactaatttttttttatttttagtagagacggggtttcaccatgttggccaggctggtatcaaactcctgacctcaagagatccactcgccttgccctcccaaagtgctgggattacaggcttgagccaccacgcccggctaaaacattgcaaatttaaatgagagttttaaaaattaaataatgactgccctgtttctgttttagtatgtaaatcctcagttcttcacctttgcactgtctgccacttagtttggttatatagtcattaacttgaatttggtctgtatagtctagactttaaatttaaagttttctacaaggggagaaaagtgttaaaatttttaaaatatgttttccaggacacttcacttccaagtcaggtaggtagttcaatctagttgttagccaaggactcaaggactgaattgttttaacataaggcttttcctgttctgggagccgcacttcattaaaattcttctaaaacttgtatgtttagagttaagcaagactttttttcttcctctccatgagttgtgaaatttaatgcacaacgctgatgtggctaacaagtttattttaagaattgtttagaaatgctgttgcttcaggttcttaaaatcactcagcactccaacttctaatcaaatttttggagacttaacagcatttgtctgtgtttgaactataaaaagcaccggatcttttccatctaattccgcaaaaattgatcatttgcaaagtcaaaactatagccatatccaaatcttttccccctcccaagagttctcagtgtctacatgtagactattccttttctgtataaagttcactctaggatttcaagtcaccacttattttacattttagtcatgcaaagattcaagtagttttgcaataagtacttatctttatttgtaataatttagtctgctgatcaaaagcattgtcttaatttttgagaactggttttagcatttacaaactaaattccagttaattaattaatagctttatattgcctttcctgctacatttggttttttcccctgtccctttgattacgggctaaggtagggtagagtgggtgtagtgagtgtatataatgtgatttggccctgtgtattatgatattttgttatttttgttgttatattatttacatttcagtagttgttttttgtgtttccattttagtggataaaatttgtattttgaactatgaatggagactaccgccccagcattagtttcacatgatataccctttaaacccgaatcattgttttatttcctgattacacaggtgttgaatggggaaaggggctagtatatcagtaggatatactatgggatgtatatatatcattgctgttagagaaatgaaataaaatggggctgggctcagtggctcacgcctgtaatcccagcactttgggaggctgaggcaggtggatcacgaggtcaggagatcgagaccatcctggctaacacggtgaaaccccgtctctactaaaaaacagaaaattagccgggcgtggtggcgggcgcctgtagtcccagctactcgggaggctgaggcaggagaatggtgtgaacccgggaggcagagcttgcagtgagccgagatctcgccactgcactccagcctgggcaacagagcaagactctgtctcaaaaaaaaaaaaaaaagaaataagaaaatgggaagcaatatttgacatagttctttttagtcaaatctacttgttaaaaaaagggtagcagtttattcatctgtgaaaggaaaataatacttatcttacaaggttgcaagagctcaaggagaccatgtatgtaaagttcctgctgtaaatatgaactcccatcctaatacccttttacctctctgtgggtttgtcttgacctggaaatttgggctaaaacttagaaaaaattcttacatgataactcagtgatgcttactcatagtttttggtgtttctcatagataagatataaatcagctgggcgcggtggctcatgcctgtaatcccagcactttgggaggccgaggcgggcagatcacctgaggtcgggaggtcgagaccagcctgaccaacatggagaaaccccgtctctactaaaaatacaaaattagctgggcgtggtggctcatgcctgtaatcccagctacttgggaggctgaggcaggagaatcgcttgaacccaggaggcggaggttgtggtgagcgaagatcgtgccattgcactccagcctgggcaacaagagcaaaactctgtctcaaaaaaaaaaaaagatataaatcacaataaataaataggtcaatacaaatgttagccaggcgtggtggcacatgcccatagtcgcagctactctggaggcagaggcaggaggatcacttgagcccatgaatttgaggcagcagtgagctatgattgtgccactgtactccagtctgggtgacagagtgagaccccatctctaaataaataggtcaaacccttaaaaatatttaaattcttaaaaaattgaaaagattattcttctcaaatttagttgagctttctaagagaagcaattggctttttcccacttcaataatcattttcagtttgactcatacagttaacacaatgtgaatttcttcctcagcataacagagttatagaatgacagggctggaagtgaccttagagagtatccagttctttcattttacaggtgaggcaactgagactcaaaggtgatgtaatttgtgcaaagattatagctaattagtagcagagccctgactgggacatagtttgaaggtgaaaaacttcaccaagctacctttcttgaaaggtccaaatgtttatgttttcaactactctttccactgtaccataactttcactacatattaaatgacactttataactaatataataggacaatcatcaatgcatatatagccagcccttcatatctgtgggttttgcatccatggattcaaccaaggaggaattgaaaacactgagaaaaaaaaaaaagaccacacaataaaaaaaaaaaatacaaaataatacaaagaaaaagccaaaattgtcatactgttgttaagcaacagtataacaactatttacatagcattaaggttggtgcaaaaatgcaaaaaaaaaaaaagcaattatttttaaaccaacctaatatattgtattaggtattaaagtcatctggacatgaattaaagtatatgatgccagcctggacaaaaggcaaaaccctgtctctacaaaaaatacaaaaattagctgggcatggtggtgtgtgcctgtagtcctggctactccggagcctgaggtgggaggatcgcttgagtctgggaggcagaggctgcattgagctatgatcatggcactgcattccagcctgggtgacagtgcaagaccttgtctcagaataaataaagtatgtgatgaagatgtgcatacattatatgcaaatactgttttttttttttttaatttaaacagtctcactgtgttgcccaggatggagtgcaatggcacaatcttggctcatggcaaactctgcctcgcaagcagctgggactacaggcatgctccacggtgcccagttaattttttttgtattcttagtagagacagggtttcaccatgttggccaggctagtcttgaatttctgacctcaagtgattcatctcccaaagtgctgggattacaggcgtgagccaccacggccggctaatttttgtattttttagtagtgactggtttcgcggtgttgaccaggctggtctcgaactcctgatctcaggtgatctgcctgcctcggcctcacaaagtgctgggattacaggtgtgaaccactgctcccggccttgtgtgattttatctaagggacttaagcgtcctcaggtcctagggggtcgtgaaaccaaaaccccagggatagcaagggacaattgtatcttcaaagtagacaaatggcgccgggcacggtggctcacgcctgtaatcccagcagtttccgaggctgaggcaggcggctcacctgaggtcaggagttggagaccagcctggccaacatgctgaaaccctgtctgtacaaaaatacaaaaatagctgggcatggtggcgcatgcctgtagtcccagctactagagcgactgaggcaggagaattgcttgaacctgggaggcggaggttgcagggagccaagatggcgccaccgcactccagcctaggtgatagagtgagactccctctcaaaaacaaaacaaaacaaaaaaattagacaaatgctacattaatgtttgggtggtcagattctactttgaatctgaagtttgcagatatgcctatagatttttggagtttaccactttcttattctgtatcattaatgtaatattttaaattactatatatgttaccatttttctggatttagtaagaaatttgcagttttggtttgatgtaacaagggttttaatgtaatttatgttagattttgcatttttttcattactgttatattttaacctgactgactgatctaattgtattagtattgtgaataatcatgtgaaatgttttgagacagagtactatatttgtgaatataattttatggtttttttcacttagaacctttctgtgtggaaaactaagaaaattgctttctgctgtataatctggcattcattgtagattaaagcttatttttctgtgaataaaacgtattcaataaaatactattcttt

SEQ ID NO: 4580 - DNA, 8591 bp, Homo sapiens
  source 1..8591: mol_type = genomic DNA
tgacggaccgcgcccggtgtctctttgaggccctgacgtggacacacttcgggtttcacgactccgggtttctccaggggatgggccggccggtagaggcgcgtgagggagacgaagggacttccgtttccttcacctaggctggggccaagccgcagagcggagttggcatttccagattggggctcgggccgcgcctcctccgggaccctccccttggaccgagccgatcgccgcggggcagttcgggccggctgtcctggcgcgaaaaggtggacaagtcctattttcaagagaagatgacttttaacagttttgaaggatctaaaacttgtgtacctgcagacatcaataaggaagaagaatttgtagaagagtttaatagattaaaaacttttgctaattttccaagtggtagtcctgtttcagcatcaacactggcacgagcagggtttctttatactggtgaaggagataccgtgcggtgctttagttgtcatgcagctgtagatagatggcaatatggagactcagcagttggaagacacaggaaagtatccccaaattgcagatttatcaacggcttttatcttgaaaatagtgccacgcagtctacaaattctggtatccagaatggtcagtacaaagttgaaaactatctgggaagcagagatcattttgccttagacaggccatctgagacacatgcagactatcttttgagaactgggcaggttgtagatatatcagacaccatatacccgaggaaccctgccatgtatagtgaagaagctagattaaagtcctttcagaactggccagactatgctcacctaaccccaagagagttagcaagtgctggactctactacacaggtattggtgaccaagtgcagtgcttttgttgtggtggaaaactgaaaaattgggaaccttgtgatcgtgcctggtcagaacacaggcgacactttcctaattgcttctttgttttgggccggaatcttaatattcgaagtgaatctgatgctgtgagttctgataggaatttcccaaattcaacaaatcttccaagaaatccatccatggcagattatgaagcacggatctttacttttgggacatggatatactcagttaacaaggagcagcttgcaagagctggattttatgctttaggtgaaggtgataaagtaaagtgctttcactgtggaggagggctaactgattggaagcccagtgaagacccttgggaacaacatgctaaatggtatccagggtgcaaatatctgttagaacagaagggacaagaatatataaacaatattcatttaactcattcacttgaggagtgtctggtaagaactactgagaaaacaccatcactaactagaagaattgatgataccatcttccaaaatcctatggtacaagaagctatacgaatggggttcagtttcaaggacattaagaaaataatggaggaaaaaattcagatatctgggagcaactataaatcacttgaggttctggttgcagatctagtgaatgctcagaaagacagtatgcaagatgagtcaagtcagacttcattacagaaagagattagtactgaagagcagctaaggcgcctgcaagaggagaagctttgcaaaatctgtatggatagaaatattgctatcgtttttgttccttgtggacatctagtcacttgtaaacaatgtgctgaagcagttgacaagtgtcccatgtgctacacagtcattactttcaagcaaaaaatttttatgtcttaatctaactctatagtaggcatgttatgttgttcttattaccctgattgaatgtgtgatgtgaactgactttaagtaatcaggattgaattccattagcatttgctaccaagtaggaaaaaaaatgtacatggcagtgttttagttggcaatataatctttgaatttcttgatttttcagggtattagctgtattatccattttttttactgttatttaattgaaaccatagactaagaataagaagcatcatactataactgaacacaatgtgtattcatagtatactgatttaatttctaagtgtaagtgaattaatcatctggattttttattcttttcagataggcttaacaaatggagctttctgtatataaatgtggagattagagttaatctccccaatcacataatttgttttgtgtgaaaaaggaataaattgttccatgctggtggaaagatagagattgtttttagaggttggttgttgtgttttaggattctgtccattttcttttaaagttataaacacgtacttgtgcgaattatttttttaaagtgatttgccatttttgaaagcgtatttaatgatagaatactatcgagccaacatgtactgacatggaaagatgtcaaagatatgttaagtgtaaaatgcaagtggcaaaacactatgtatagtctgagccagatcaaagtatgtatgtttttaatatgcatagaacaaaagatttggaaagatatacaccaaactgttaaatgtggtttctcttcggggagggggggattgggggaggggccccagaggggttttataggggccttttcactttctacttttttcattttgttctgttcgaattttttataagtatgtattacttttgtaatcagaatttttagaaagtattttgctgatttaaaggcttaggcatgttcaaacgcctgcaaaactacttatcactcagctttagtttttctaatccaagaaggcagggcagttaacctttttggtgccaatgtgaaatgtaaatgattttatgtttttcctgctttgtggatgaaaaatatttctgagtggtagttttttgacaggtagaccatgtcttatcttgtttcaaaataagtatttctgattttgtaaaatgaaatataaaatatgtctcagatcttccaattaattagtaaggattcatccttaatccttgctagtttaagcctgcctaagtcactttactaaaagatctttgttaactcagtattttaaacatctgtcagcttatgtaggtaaaagtagaagcatgtttgtacactgcttgtagttatagtgacagctttccatgttgagattctcatatcatcttgtatcttaaagtttcatgtgagtttttaccgttaggatgattaagatgtatataggacaaaatgttaagtctttcctctacctacatttgttttcttggctagtaatagtagtagatacttctgaaataaatgttctctcaagatccttaaaacctcttggaaattataaaaatattggcaagaaaagaagaatagttgtttaaatattttttaaaaaacacttgaataagaatcagtagggtataaactagaagtttaaaaatgcttcatagaacgtccagggtttacattacaagattctcacaacaaacctattgtagaggtgagtaaggcatgttactacagaggaaagtttgagagtaaaactgtaaaaaattatatttttgttgtactttctaagagaaagagtattgttatgttctcctaacttctgttgattactactttaagtgatattcatttaaaacattgcaaatttattttatttatttaattttctttttgagatggagtcttgcttgtcacccaggctggagtgcagtggagtgatctctgctcactgcaacctccgccttctgggttcaagcgattctcgtgcctcagcttcctgagtagctggaattacaggcaggtgccaccatgcccgactaatttttttttatttttagtagagacggggtttcaccatgttggccaggctggtatcaaactcctgacctcaagagatccactcgccttgccctcccaaagtgctgggattacaggcttgagccaccacgcccggctaaaacattgcaaatttaaatgagagttttaaaaattaaataatgactgccctgtttctgttttagtatgtaaatcctcagttcttcacctttgcactgtctgccacttagtttggttatatagtcattaacttgaatttggtctgtatagtctagactttaaatttaaagttttctacaaggggagaaaagtgttaaaatttttaaaatatgttttccaggacacttcacttccaagtcaggtaggtagttcaatctagttgttagccaaggactcaaggactgaattgttttaacataaggcttttcctgttctgggagccgcacttcattaaaattcttctaaaacttgtatgtttagagttaagcaagactttttttcttcctctccatgagttgtgaaatttaatgcacaacgctgatgtggctaacaagtttattttaagaattgtttagaaatgctgttgcttcaggttcttaaaatcactcagcactccaacttctaatcaaatttttggagacttaacagcatttgtctgtgtttgaactataaaaagcaccggatcttttccatctaattccgcaaaaattgatcatttgcaaagtcaaaactatagccatatccaaatcttttccccctcccaagagttctcagtgtctacatgtagactattccttttctgtataaagttcactctaggatttcaagtcaccacttattttacattttagtcatgcaaagattcaagtagttttgcaataagtacttatctttatttgtaataatttagtctgctgatcaaaagcattgtcttaatttttgagaactggttttagcatttacaaactaaattccagttaattaattaatagctttatattgcctttcctgctacatttggttttttcccctgtccctttgattacgggctaaggtagggtagagtgggtgtagtgagtgtatataatgtgatttggccctgtgtattatgatattttgttatttttgttgttatattatttacatttcagtagttgttttttgtgtttccattttagtggataaaatttgtattttgaactatgaatggagactaccgccccagcattagtttcacatgatataccctttaaacccgaatcattgttttatttcctgattacacaggtgttgaatggggaaaggggctagtatatcagtaggatatactatgggatgtatatatatcattgctgttagagaaatgaaataaaatggggctgggctcagtggctcacgcctgtaatcccagcactttgggaggctgaggcaggtggatcacgaggtcaggagatcgagaccatcctggctaacacggtgaaaccccgtctctactaaaaaacagaaaattagccgggcgtggtggcgggcgcctgtagtcccagctactcgggaggctgaggcaggagaatggtgtgaacccgggaggcagagcttgcagtgagccgagatctcgccactgcactccagcctgggcaacagagcaagactctgtctcaaaaaaaaaaaaaaaagaaataagaaaatgggaagcaatatttgacatagttctttttagtcaaatctacttgttaaaaaaagggtagcagtttattcatctgtgaaaggaaaataatacttatcttacaaggttgcaagagctcaaggagaccatgtatgtaaagttcctgctgtaaatatgaactcccatcctaatacccttttacctctctgtgggtttgtcttgacctggaaatttgggctaaaacttagaaaaaattcttacatgataactcagtgatgcttactcatagtttttggtgtttctcatagataagatataaatcagctgggcgcggtggctcatgcctgtaatcccagcactttgggaggccgaggcgggcagatcacctgaggtcgggaggtcgagaccagcctgaccaacatggagaaaccccgtctctactaaaaatacaaaattagctgggcgtggtggctcatgcctgtaatcccagctacttgggaggctgaggcaggagaatcgcttgaacccaggaggcggaggttgtggtgagcgaagatcgtgccattgcactccagcctgggcaacaagagcaaaactctgtctcaaaaaaaaaaaaagatataaatcacaataaataaataggtcaatacaaatgttagccaggcgtggtggcacatgcccatagtcgcagctactctggaggcagaggcaggaggatcacttgagcccatgaatttgaggcagcagtgagctatgattgtgccactgtactccagtctgggtgacagagtgagaccccatctctaaataaataggtcaaacccttaaaaatatttaaattcttaaaaaattgaaaagattattcttctcaaatttagttgagctttctaagagaagcaattggctttttcccacttcaataatcattttcagtttgactcatacagttaacacaatgtgaatttcttcctcagcataacagagttatagaatgacagggctggaagtgaccttagagagtatccagttctttcattttacaggtgaggcaactgagactcaaaggtgatgtaatttgtgcaaagattatagctaattagtagcagagccctgactgggacatagtttgaaggtgaaaaacttcaccaagctacctttcttgaaaggtccaaatgtttatgttttcaactactctttccactgtaccataactttcactacatattaaatgacactttataactaatataataggacaatcatcaatgcatatatagccagcccttcatatctgtgggttttgcatccatggattcaaccaaggaggaattgaaaacactgagaaaaaaaaaaaagaccacacaataaaaaaaaaaaatacaaaataatacaaagaaaaagccaaaattgtcatactgttgttaagcaacagtataacaactatttacatagcattaaggttggtgcaaaaatgcaaaaaaaaaaaaagcaattatttttaaaccaacctaatatattgtattaggtattaaagtcatctggacatgaattaaagtatatgatgccagcctggacaaaaggcaaaaccctgtctctacaaaaaatacaaaaattagctgggcatggtggtgtgtgcctgtagtcctggctactccggagcctgaggtgggaggatcgcttgagtctgggaggcagaggctgcattgagctatgatcatggcactgcattccagcctgggtgacagtgcaagaccttgtctcagaataaataaagtatgtgatgaagatgtgcatacattatatgcaaatactgttttttttttttttaatttaaacagtctcactgtgttgcccaggatggagtgcaatggcacaatcttggctcatggcaaactctgcctcgcaagcagctgggactacaggcatgctccacggtgcccagttaattttttttgtattcttagtagagacagggtttcaccatgttggccaggctagtcttgaatttctgacctcaagtgattcatctcccaaagtgctgggattacaggcgtgagccaccacggccggctaatttttgtattttttagtagtgactggtttcgcggtgttgaccaggctggtctcgaactcctgatctcaggtgatctgcctgcctcggcctcacaaagtgctgggattacaggtgtgaaccactgctcccggccttgtgtgattttatctaagggacttaagcgtcctcaggtcctagggggtcgtgaaaccaaaaccccagggatagcaagggacaattgtatcttcaaagtagacaaatggcgccgggcacggtggctcacgcctgtaatcccagcagtttccgaggctgaggcaggcggctcacctgaggtcaggagttggagaccagcctggccaacatgctgaaaccctgtctgtacaaaaatacaaaaatagctgggcatggtggcgcatgcctgtagtcccagctactagagcgactgaggcaggagaattgcttgaacctgggaggcggaggttgcagggagccaagatggcgccaccgcactccagcctaggtgatagagtgagactccctctcaaaaacaaaacaaaacaaaaaaattagacaaatgctacattaatgtttgggtggtcagattctactttgaatctgaagtttgcagatatgcctatagatttttggagtttaccactttcttattctgtatcattaatgtaatattttaaattactatatatgttaccatttttctggatttagtaagaaatttgcagttttggtttgatgtaacaagggttttaatgtaatttatgttagattttgcatttttttcattactgttatattttaacctgactgactgatctaattgtattagtattgtgaataatcatgtgaaatgttttgagacagagtactatatttgtgaatataattttatggtttttttcacttagaacctttctgtgtggaaaactaagaaaattgctttctgctgtataatctggcattcattgtagattaaagcttatttttctgtgaataaaacgtattcaataaaatactattctttaaaattatatcata

SEQ ID NO: 4581 - DNA, 390 bp, Homo sapiens
  source 1..390: mol_type = genomic DNA
atgtgcgcgcgctaggtcagcttctcggttccagccgggcgggggggtcgggtgggggtgggggtaggggttgcaagggcctcattttttcttactgcccccatccggttcggggaggtggcgggaccttggcggcgcccggagccggcgtggcgctcatcgagggacgcccggcccaagtggctggggccaagccgcagagcggagttggcatttccagattggggctcgggccgcgcctcctccgggaccctccccttggaccgagccgatcgccgcggggcagttcgggccggctgtcctggcgcgaaaaggtggacaagtcctattttcaagagaagatgacttttaacagttttgaaggatctaaaacttgtgtacctgcagaca

SEQ ID NO: 4582 - DNA, 528 bp, Homo sapiens
  source 1..528: mol_type = genomic DNA
gctcatcgagggacgcccggcccaagtgaaaaggtggacaagtcctattttcaagagaagatgacttttaacagttttgaaggatctaaaacttgtgtacctgcagacatcaataaggaagaagaatttgtagaagagtttaatagattaaaaacttttgctaattttccaagtggtagtcctgtttcagcatcaacactggcacgagcagggtttctttatactggtgaaggagataccgtgcggtgctttagttgtcatgcagctgtagatagatggcaatatggagactcagcagttggaagacacaggaaagtatccccaaattgcagatttatcaacggcttttatcttgaaaatagtgccacgcagtctacaaattctggtatccagaatggtcagtacaaagttgaaaactatctgggaagcagagatcattttgccttagacaggccatctgagacacatgcagactatcttttgagaactgggcaggttgtagatatatcagacaccatatacccgagg

SEQ ID NO: 4583 - DNA, 1620 bp, Homo sapiens
  source 1..1620: mol_type = genomic DNA
ttcttactgcccccatccggttcggggaggtggcgggaccttggcggcgcccggagccggcgtggcgctcatcgagggacgcccggcccaagtgaaaaggtggacaagtcctattttcaagagaagatgacttttaacagttttgaaggatctaaaacttgtgtacctgcagacatcaataaggaagaagaatttgtagaagagtttaatagattaaaaacttttgctaattttccaagtggtagtcctgtttcagcatcaacactggcacgagcagggtttctttatactggtgaaggagataccgtgcggtgctttagttgtcatgcagctgtagatagatggcaatatggagactcagcagttggaagacacaggaaagtatccccaaattgcagatttatcaacggcttttatcttgaaaatagtgccacgcagtctacaaattctggtatccagaatggtcagtacaaagttgaaaactatctgggaagcagagatcattttgccttagacaggccatctgagacacatgcagactatcttttgagaactgggcaggttgtagatatatcagacaccatatacccgaggaaccctgccatgtatagtgaagaagctagattaaagtcctttcagaactggccagactatgctcacctaaccccaagagagttagcaagtgctggactctactacacaggtattggtgaccaagtgcagtgcttttgttgtggtggaaaactgaaaaattgggaaccttgtgatcgtgcctggtcagaacacaggcgacactttcctaattgcttctttgttttgggccggaatcttaatattcgaagtgaatctgatgctgtgagttctgataggaatttcccaaattcaacaaatcttccaagaaatccatccatggcagattatgaagcacggatctttacttttgggacatggatatactcagttaacaaggagcagcttgcaagagctggattttatgctttaggtgaaggtgataaagtaaagtgctttcactgtggaggagggctaactgattggaagcccagtgaagacccttgggaacaacatgctaaatggtatccagggtgcaaatatctgttagaacagaagggacaagaatatataaacaatattcatttaactcattcacttgaggagtgtctggtaagaactactgagaaaacaccatcactaactagaagaattgatgataccatcttccaaaatcctatggtacaagaagctatacgaatggggttcagtttcaaggacattaagaaaataatggaggaaaaaattcagatatctgggagcaactataaatcacttgaggttctggttgcagatctagtgaatgctcagaaagacagtatgcaagatgagtcaagtcagacttcattacagaaagagattagtactgaagagcagctaaggcgcctgcaagaggagaagctttgcaaaatctgtatggatagaaatattgctatcgtttttgttccttgtggacatctagtcacttgtaaacaatgtgctgaagcagttgacaagtgtcccatgtgctacacagtcattactttcaagcaaaaaatttttatgtcttaa

SEQ ID NO: 4584 - DNA, 2654 bp, Homo sapiens
  source 1..2654: mol_type = genomic DNA
tctcctgtacctgggcatccagaaaaatggtggtgatggcgcgactctcgcggcccgagcggccggaccttgtcttcgaggaagaggacctcccctatgaggaggaaatcatgcggaaccaattctctgtcaaatgctggcttcgctacatcgagttcaaacagggcgccccgaagcccaggctcaatcagctatacgagcgggcactcaagctgctgccctgcagctacaaactctggtaccgatacctgaaggcgcgtcgggcacaggtgaagcatcgctgtgtgaccgaccctgcctatgaagatgtcaacaactgtcatgagagggcctttgtgttcatgcacaagatgcctcgtctgtggctagattactgccagttcctcatggaccaggggcgcgtcacacacacccgccgcaccttcgaccgtgccctccgggcactgcccatcacgcagcactctcgaatttggcccctgtatctgcgcttcctgcgctcacacccactgcctgagacagctgtgcgaggctatcggcgcttcctcaagctgagtcctgagagtgcagaggagtacattgagtacctcaagtcaagtgaccggctggatgaggccgcccagcgcctggccaccgtggtgaacgacgagcgtttcgtgtctaaggccggcaagtccaactaccagctgtggcacgagctgtgcgacctcatctcccagaatccggacaaggtacagtccctcaatgtggacgccatcatccgcgggggcctcacccgcttcaccgaccagctgggcaagctctggtgttctctcgccgactactacatccgcagcggccatttcgagaaggctcgggacgtgtacgaggaggccatccggacagtgatgaccgtgcgggacttcacacaggtgtttgacagctacgcccagttcgaggagagcatgatcgctgcaaagatggagaccgcctcggagctggggcgcgaggaggaggatgatgtggacctggagctgcgcctggcccgcttcgagcagctcatcagccggcggcccctgctcctcaacagcgtcttgctgcgccaaaacccacaccacgtgcacgagtggcacaagcgtgtcgccctgcaccagggccgcccccgggagatcatcaacacctacacagaggctgtgcagacggtggaccccttcaaggccacaggcaagccccacactctgtgggtggcgtttgccaagttttatgaggacaacggacagctggacgatgcccgtgtcatcctggagaaggccaccaaggtgaacttcaagcaggtggatgacctggcaagcgtgtggtgtcagtgcggagagctggagctccgacacgagaactacgatgaggccttgcggctgctgcgaaaggccacggcgctgcctgcccgccgggccgagtactttgatggttcagagcccgtgcagaaccgcgtgtacaagtcactgaaggtctggtccatgctcgccgacctggaggagagcctcggcaccttccagtccaccaaggccgtgtacgaccgcatcctggacctgcgtatcgcaacaccccagatcgtcatcaactatgccatgttcctggaggagcacaagtacttcgaggagagcttcaaggcgtacgagcgcggcatctcgctgttcaagtggcccaacgtgtccgacatctggagcacctacctgaccaaattcattgcccgctatgggggccgcaagctggagcgggcacgggacctgtttgaacaggctctggacggctgccccccaaaatatgccaagaccttgtacctgctgtacgcacagctggaggaggagtggggcctggcccggcatgccatggccgtgtacgagcgtgccaccagggccgtggagcccgcccagcagtatgacatgttcaacatctacatcaagcgggcggccgagatctatggggtcacccacacccgcggcatctaccagaaggccattgaggtgctgtcggacgagcacgcgcgtgagatgtgcctgcggtttgcagacatggagtgcaagctcggggagattgaccgcgcccgggccatctacagcttctgctcccagatctgtgacccccggacgaccggcgcgttctggcagacgtggaaggactttgaggtccggcatggcaatgaggacaccatcaaggaaatgctgcgtatccggcgcagcgtgcaggccacgtacaacacgcaggtcaacttcatggcctcgcagatgctcaaggtctcgggcagtgccacgggcaccgtgtctgacctggcccctgggcagagtggcatggacgacatgaagctgctggaacagcgggcagagcagctggcggctgaggcggagcgtgaccagcccttgcgcgcccagagcaagatcctgttcgtgaggagtgacgcctcccgggaggagctggcagagctggcacagcaggtcaaccccgaggagatccagctgggcgaggacgaggacgaggacgagatggacctggagcccaacgaggttcggctggagcagcagagcgtgccagccgcagtgtttgggagcctgaaggaagactgacccgtccctcccccatcccccctccccaccccctccccaatacagctacgtttgtacatc

SEQ ID NO: 4585 - DNA, 2661 bp, Homo sapiens
  source 1..2661: mol_type = genomic DNA
agcgcgcgactctctcctgtacctgggcatccagaaaaatggtggtgatggcgcgactctcgcggcccgagcggccggaccttgtcttcgaggaagaggacctcccctatgaggaggaaatcatgcggaaccaattctctgtcaaatgctggcttcgctacatcgagttcaaacagggcgccccgaagcccaggctcaatcagctatacgagcgggcactcaagctgctgccctgcagctacaaactctggtaccgatacctgaaggcgcgtcgggcacaggtgaagcatcgctgtgtgaccgaccctgcctatgaagatgtcaacaactgtcatgagagggcctttgtgttcatgcacaagatgcctcgtctgtggctagattactgccagttcctcatggaccaggggcgcgtcacacacacccgccgcaccttcgaccgtgccctccgggcactgcccatcacgcagcactctcgaatttggcccctgtatctgcgcttcctgcgctcacacccactgcctgagacagctgtgcgaggctatcggcgcttcctcaagctgagtcctgagagtgcagaggagtacattgagtacctcaagtcaagtgaccggctggatgaggccgcccagcgcctggccaccgtggtgaacgacgagcgtttcgtgtctaaggccggcaagtccaactaccagctgtggcacgagctgtgcgacctcatctcccagaatccggacaaggtacagtccctcaatgtggacgccatcatccgcgggggcctcacccgcttcaccgaccagctgggcaagctctggtgttctctcgccgactactacatccgcagcggccatttcgagaaggctcgggacgtgtacgaggaggccatccggacagtgatgaccgtgcgggacttcacacaggtgtttgacagctacgcccagttcgaggagagcatgatcgctgcaaagatggagaccgcctcggagctggggcgcgaggaggaggatgatgtggacctggagctgcgcctggcccgcttcgagcagctcatcagccggcggcccctgctcctcaacagcgtcttgctgcgccaaaacccacaccacgtgcacgagtggcacaagcgtgtcgccctgcaccagggccgcccccgggagatcatcaacacctacacagaggctgtgcagacggtggaccccttcaaggccacaggcaagccccacactctgtgggtggcgtttgccaagttttatgaggacaacggacagctggacgatgcccgtgtcatcctggagaaggccaccaaggtgaacttcaagcaggtggatgacctggcaagcgtgtggtgtcagtgcggagagctggagctccgacacgagaactacgatgaggccttgcggctgctgcgaaaggccacggcgctgcctgcccgccgggccgagtactttgatggttcagagcccgtgcagaaccgcgtgtacaagtcactgaaggtctggtccatgctcgccgacctggaggagagcctcggcaccttccagtccaccaaggccgtgtacgaccgcatcctggacctgcgtatcgcaacaccccagatcgtcatcaactatgccatgttcctggaggagcacaagtacttcgaggagagcttcaaggcgtacgagcgcggcatctcgctgttcaagtggcccaacgtgtccgacatctggagcacctacctgaccaaattcattgcccgctatgggggccgcaagctggagcgggcacgggacctgtttgaacaggctctggacggctgccccccaaaatatgccaagaccttgtacctgctgtacgcacagctggaggaggagtggggcctggcccggcatgccatggccgtgtacgagcgtgccaccagggccgtggagcccgcccagcagtatgacatgttcaacatctacatcaagcgggcggccgagatctatggggtcacccacacccgcggcatctaccagaaggccattgaggtgctgtcggacgagcacgcgcgtgagatgtgcctgcggtttgcagacatggagtgcaagctcggggagattgaccgcgcccgggccatctacagcttctgctcccagatctgtgacccccggacgaccggcgcgttctggcagacgtggaaggactttgaggtccggcatggcaatgaggacaccatcaaggaaatgctgcgtatccggcgcagcgtgcaggccacgtacaacacgcaggtcaacttcatggcctcgcagatgctcaaggtctcgggcagtgccacgggcaccgtgtctgacctggcccctgggcagagtggcatggacgacatgaagctgctggaacagcgggcagagcagctggcggctgaggcggagcgtgaccagcccttgcgcgcccagagcaagatcctgttcgtgaggagtgacgcctcccgggaggagctggcagagctggcacagcaggtcaaccccgaggagatccagctgggcgaggacgaggacgaggacgagatggacctggagcccaacgaggttcggctggagcagcagagcgtgccagccgcagtgtttgggagcctgaaggaagactgacccgtccctcccccatcccccctccccaccccctccccaatacagctacgtttgt

SEQ ID NO: 4586 - DNA, 2102 bp, Homo sapiens
  source 1..2102: mol_type = genomic DNA
ctcgcgcgcttgcgcactttagccagcgcagggcgcaccccgccccctcccactctccctgcccctcggaccccatactctacctcatccttctggccaggcgaagcccacgacgttgacatgccggagatccgcctccgccatgtcgtgtcctgcagcagccaggactcgactcactgtgcagaaaatcttctcaaggcagacacttaccgaaaatggcgggcagccaaggcaggcgagaagaccatctctgtggtcctacagttggagaaggaggagcagatacacagtgtggacattgggaatgatggctcagctttcgtggaggtgctggtgggcagttcagctggaggcgctggggagcaagactatgaggtccttctggtcacctcatctttcatgtccccttccgagagccgcagtggctcaaaccccaaccgcgttcgcatgtttgggcctgacaagctggtccgggcagccgccgagaagcgctgggaccgggtcaaaattgtttgcagccagccctacagcaaggactccccctttggcttgagttttgtacggtttcatagccccccagacaaagatgaggcagaggccccgtcccagaaggtgacagtgaccaagcttggccagttccgtgtgaaggaggaggatgagagcgccaactctctgaggccgggggctctcttcttcagccggatcaacaagacatccccagtcacagccagcgacccagcaggacctagctatgcagctgctaccctccaggcttctagtgctgcctcctcagcctctccagtctccagggccataggcagcacctccaagccccaggagtctcccaaagggaagaggaagttggatttgaaccaagaagaaaagaagacccccagcaaaccaccagcccagctgtcgccatctgttcccaagagacctaaattgccagctccaactcgtaccccagccacagccccagtccctgcccgagcacagggggcagtgacaggcaaaccccgaggagaaggcaccgagcccagacgaccccgagctggcccagaggagctggggaagatccttcagggtgtggtagtggtgctgagtggcttccagaaccccttccgctccgagctgcgagataaggccctagagcttggggccaagtatcggccagactggacccgggacagcacgcacctcatctgtgcctttgccaacacccccaagtacagccaggtcctaggcctgggaggccgcatcgtgcgtaaggagtgggtgctggactgtcaccgcatgcgtcggcggctgccctcccagaggtacctcatggcagggccaggttccagcagtgaggaggatgaggcctctcacagcggtggcagcggagatgaagcccccaagcttcctcagaagcaaccccagaccaaaaccaagcccactcaggcagctggacccagctcaccccagaagcccccaacccctgaagagaccaaagcagcctcaccagtgctccaggaagatatagacattgagggggtacagtcagaaggacaggacaatggggcggaagattctggggacacagaggatgagctgaggagggtggcagagcagaaggaacacagactgccccctggccaggaggagaatggggaagacccgtatgcaggctccacggatgagaacacggacagtgaggaacaccaggagcctcctgatctgccagtccctgagctcccagatttcttccagggcaagcacttctttctttacggggagttccctggggacgagcggcggaaactcatccgatacgtcacagccttcaatggggagctcgaggacaatatgagtgaccgggttcagtttgtgatcacagcacaggaatgggatcccagctttgaggaggccctgatggacaacccctccctggcattcgttcgtccccgatggatctacagttgcaatgagaagcagaagttacttcctcaccagctctatggggtggtgccgcaagcctgaagtatgtgctatacacacacacacacacacacacacacacacacacacacgatgcatttaataaagatgagttggttctc

SEQ ID NO: 4587 - DNA, 2102 bp, Homo sapiens; identical to SEQ ID NO: 4586
  source 1..2102: mol_type = genomic DNA

SEQ ID NO: 4588 - DNA, 1485 bp, Homo sapiens
  source 1..1485: mol_type = genomic DNA
ccagcgcagggcgcaccccgccccctcccactctccctgcccctcggaccccatactctacctcatccttctggccaggcgaagcccacgacgttgacatgccggagatccgcctccgccatgtcgtgtcctgcagcagccaggactcgactcactgtgcagaaaatcttctcaaggcagacacttaccgaaaatggcgggcagccaaggcaggcgagaagaccatctctgtggtcctacagttggagaaggaggagcagatacacagtgtggacattgggaatgatggctcagctttcgtggaggtgctggtgggcagttcagctggaggcgctggggagcaagactatgaggtccttctggtcacctcatctttcatgtccccttccgagagccgcagtggctcaaaccccaaccgcgttcgcatgtttgggcctgacaagctggtccgggcagccgccgagaagcgctgggaccgggtcaaaattgtttgcagccagccctacagcaaggactccccctttggcttgagttttgtacggtttcatagccccccagacaaagatgaggcagaggccccgtcccagaaggtgacagtgaccaagcttggccagttccgtgtgaaggaggaggatgagagcgccaactctctgaggccgggggctctcttcttcagccggatcaacaagacatccccagtcacagccagcgacccagcaggacctagctatgcagctgctaccctccaggcttctagtgctgcctcctcagcctctccagtctccagggccataggcagcacctccaagccccaggagtctcccaaagggaagaggaagttggatttgaaccaagaagaaaagaagacccccagcaaaccaccagcccagctgtcgccatctgttcccaagagacctaaattgccagctccaactcgtaccccagccacagccccagtccctgcccgagcacagggggcagtgacaggcaaaccccgaggagaaggcaccgagcccagacgaccccgagctggcccagaggagctggggaagatccttcagggtgtggtagtggtgctgagtggcttccagaaccccttccgctccgagctgcgagataaggccctagagcttggggccaagtatcggccagactggacccgggacagcacgcacctcatctgtgcctttgccaacacccccaagcttcctcagaaggtacccccccaacacaccccagaccaaaaccaagcccactcaggcagctggacccagctcaccccagaagcccccaacccctgaagagaccaaagcagcctcaccagtgctccaggaagatatagacattgagggggtacagtcagaaggacaggacaatggggcggaagattctggggacacagaggatgagctgaggagggtggcagagcagaaggaacacagactgccccctggccaggaggagaatggggaagacccgtatgca

SEQ ID NO: 4589 - DNA, 1994 bp, Homo sapiens
  source 1..1994: mol_type = genomic DNA
actttagccagcgcagggcgcaccccgccccctcccactctccctgcccctcggaccccatactctacctcatccttctggccaggcgaagcccacgacgttgacatgccggagatccgcctccgccatgtcgtgtcctgcagcagccaggactcgttggagaaggaggagcagatacacagtgtggacattgggaatgatggctcagctttcgtggaggtgctggtgggcagttcagctggaggcgctggggagcaagactatgaggtccttctggtcacctcatctttcatgtccccttccgagagccgcagtggctcaaaccccaaccgcgttcgcatgtttgggcctgacaagctggtccgggcagccgccgagaagcgctgggaccgggtcaaaattgtttgcagccagccctacagcaaggactccccctttggcttgagttttgtacggtttcatagccccccagacaaagatgaggcagaggccccgtcccagaaggtgacagtgaccaagcttggccagttccgtgtgaaggaggaggatgagagcgccaactctctgaggccgggggctctcttcttcagccggatcaacaagacatccccagtcacagccagcgacccagcaggacctagctatgcagctgctaccctccaggcttctagtgctgcctcctcagcctctccagtctccagggccataggcagcacctccaagccccaggagtctcccaaagggaagaggaagttggatttgaaccaagaagaaaagaagacccccagcaaaccaccagcccagctgtcgccatctgttcccaagagacctaaattgccagctccaactcgtaccccagccacagccccagtccctgcccgagcacagggggcagtgacaggcaaaccccgaggagaaggcaccgagcccagacgaccccgagctggcccagaggagctggggaagatccttcagggtgtggtagtggtgctgagtggcttccagaaccccttccgctccgagctgcgagataaggccctagagcttggggccaagtatcggccagactggacccgggacagcacgcacctcatctgtgcctttgccaacacccccaagtacagccaggtcctaggcctgggaggccgcatcgtgcgtaaggagtgggtgctggactgtcaccgcatgcgtcggcggctgccctcccagaggtacctcatggcagggccaggttccagcagtgaggaggatgaggcctctcacagcggtggcagcggagatgaagcccccaagcttcctcagaagcaaccccagaccaaaaccaagcccactcaggcagctggacccagctcaccccagaagcccccaacccctgaagagaccaaagcagcctcaccagtgctccaggaagatatagacattgagggggtacagtcagaaggacaggacaatggggcggaagattctggggacacagaggatgagctgaggagggtggcagagcagaaggaacacagactgccccctggccaggaggagaatggggaagacccgtatgcaggctccacggatgagaacacggacagtgaggaacaccaggagcctcctgatctgccagtccctgagctcccagatttcttccagggcaagcacttctttctttacggggagttccctggggacgagcggcggaaactcatccgatacgtcacagccttcaatggggagctcgaggacaatatgagtgaccgggttcagtttgtgatcacagcacaggaatgggatcccagctttgaggaggccctgatggacaacccctccctggcattcgttcgtccccgatggatctacagttgcaatgagaagcagaagttacttcctcaccagctctatggggtggtgccgcaagcctgaagtatgtgctatacacacacacacacacacacacacacacacacacacacgatgcatttaataaagatgagttggttctc

SEQ ID NO: 4590 - DNA, 3067 bp, Homo sapiens
  source 1..3067: mol_type = genomic DNA
tttgactggccgtagagtctgcgcagttggtgaatggcgttggtggcgggaaagttgagtctctcctgcgccgagccttcggggcgatgtgtagtgccttccatagggctgagtctgggaccgagctccttgcccgacttgaaggtagaagttccttgaaagaaatagaaccaaatctgtttgctgatgaagattcacctgtgcatggtgatattcttgaatttcatggcccagaaggaacaggaaaaacagaaatgctttatcacctaacagcacgatgtatacttcccaaatcagaaggtggcctggaagtagaagtcttatttattgatacagattaccactttgatatgctccggctagttacaattcttgagcacagactatcccaaagctctgaagaaataatcaaatactgcctgggaagattttttttggtgtactgcagtagtagcacccacttacttcttacactttactcactagaaagtatgttttgtagtcacccatctctctgccttttgattttggatagcctgtcagctttttactggatagaccgcgtcaatggaggagaaagtgtgaacttacaggagtctactctgaggaaatgttctcagtgcttagagaagcttgtaaatgactatcgcctggttctttttgcaacgacacaaactataatgcagaaagcctcgagctcatcagaagaaccttctcatgcctctcgacgactgtgtgatgtggacatagactacagaccttatctctgtaaggcatggcagcaactggtgaagcacaggatgtttttctccaaacaagatgattctcaaagcagcaaccaattttcattagtttcacgttgtttaaaaagtaacagtttaaaaaaacatttttttattattggagaaagtggggttgaattttgttgatatacatcataaaatagtcttttgcagggtactacgcaagccttaaaatttttcttaagacagagtcttgctctgtctcccaggctggagtgcagtggcacaatcatggctcactgcagccttgaactcctggcctcaagggatcctcctatgtgtgcctcctagagtgcagggattacaggcgtgagccactgctcgtggccaaaagttttctttttttttttttttctttttgaaacagtcttactctgtctcccaggctgctggagtgcagtggcacaatctcggcccgctgcagcctctgcctcttgggttcaagtgattcttccacctcagcctcccaggtagctgggattacaggcacccaccaccacgcctggctaatttttgtatttttaatagagacggggtttcaccatgttggccaggctggtctcgaactcctgacctcaagtgatccacccacctcggcctcccaaagtgctaggattacaggcccgtgcccagccctaaagttttaaactctaggggaattaacagtatttctttacagaatggatttgttaaactagcacagtaaaagtaaagactattctgtttctaggctgttgaatcaaagtgattttagcaattaaactttgtattaatttaccaccaatatttcttcacaaaggaacttttaaaagattatctcagaaagtaaatctgagaggtaagaagtaataatgagtaaatggtaagtacttgagtaaatctaaagaaatattgatagtaaggcaatcctaagcaaaaagaacaaagctggaggcatcacgctacccagcttcaaactatactacaaggctacagtaaccaaaacagcatagtactggcacaaaaacacacgtagactgatggaacagaatagagaatttagaaatgagaccacacacctataatttttttgatcttcgatgaacctgacaaaaacaagcaatgggcaatggattctctattcaataaatcgtgctgggataactggccagccatatggaaaagattgaaaatggacgccttccttatgccatatacaaaaattaactcaagatggattaaagacttaatgtaaaacccaaaacagtaaaaatcctggaagacaacccaggcagtaccattcaggacataggcacaggcaaagatttcatgacgaagacgccaaaaacaattgcaacagaagcaaaaattcacaaatgggatctaattaaactaaagagctgcacagcaaaagaaactatcaagagagtaaacagacagcttacagaatgggagaaaattgttgcaaactatgcatctgagaaaggtctgaaatccagcatctatacgtaatttaaacaaatttagaagaaaaaaccaccccattaaaaagtgggcaaaggacatgaacagacacttttcaaaagaagacatctgtggccaacaatcctatggaaaaaagcccagcatcactgatcattagagaaatgcaaatcgaaacaacaacgagataccatctcacaccagtccaaatggctattataaaaatgtcagaaaataacagatgctggtgaggttgtggagaaaaagatatgcttatacactgttggtggaaatgtaaattaaattagttcagccattgtggaagacagtgtggggataaagacagagataccattcaacccagcaatctcattactgggtatatacccaaaggaatagaaatcattgttataaagacacatgcacgcgtatgttcgttgcagcactgcccatcagtgacagactggattaaaaaaatgtggtacatacacaccagggaatactatacagccataaaaaggaacaagactgactgggcgtggtggctcatgcctgtgatcctagcactttgcgaggccgaggtgggtggattgcccgcgctcaggaggtcaagaccagcctgggcaacacggtgaaaccccatctctattaaaatacaaaaaattagctgggcatggtggtgcgtgcctgtagtgccagctactcaggaggccgaggcaggagaattgctggaacccaggaggtggaggttgcagtgagctgagatcgcgccattgcactcccgcctgggcgactccatctct

SEQ ID NO: 4591 - DNA, 2563 bp, Homo sapiens
  source 1..2563: mol_type = genomic DNA
actcagggtgctaggcgcctattggaggagaaggccgagaggagcaggacggcgggaagaggagtgcggaacccgcgggagagtccccagggagacacttaagggaaattaaactgcagagtgcaagagatgcctcagtcaagtcagccaaaaacacgcgggtcatccccaagccccagagagtgacagagccccgatgacacggacacctcggctgctgtcacttccctggttcgggcctcccacaggctttgaattgaaggcgagtgcctcagaatttgcatccattgttctgtctttcctgggaagttattcatcctggtggccagcccaccgacaaaatggatttggatctactggacctgaatcccagaattattgctgcaattaagaaagccaaactgaaatcggtaaaggaggttttacacttttctggaccagacttgaagagactgaccaacctctccagccccgaggtctggcacttgctgagaacggcctccttacacttgcggggaagcagcatccttacagcactgcagctgcaccagcagaaggagcggttccccacgcagcaccagcgcctgagcctgggctgcccggtgctggacgcgctgctccgcggtggcctgcccctggacggcatcactgagctggccggacgcagctcggcagggaagacccagctggcgctgcagctctgcctggctgtgcagttcccgcggcagcacggaggcctggaggctggagccgtctacatctgcacggaagacgccttcccgcacaagcgcctgcagcagctcatggcccagcagccgcggctgcgcactgacgttccaggagagctgcttcagaagctccgatttggcagccagatcttcatcgagcacgtggccgatgtggacaccttgttggagtgtgtgaataagaaggtccccgtactgctgtctcggggcatggctcgcctggtggtcatcgactcggtggcagccccattccgctgtgaatttgacagccaggcctccgcccccagggccaggcatctgcagtccctgggggccacgctgcgtgagctgagcagtgccttccagagccctgtgctgtgcatcaaccaggtgacagaggccatggaggagcagggcgcagcacacgggccgctggggttctgggacgaacgtgtttccccagcccttggcataacctgggctaaccagctcctggtgagactgctggctgaccggctccgcgaggaagaggctgccctcggctgcccagcccggaccctgcgggtgctctctgccccccacctgcccccctcctcctgttcctacacgatcagtgccgaaggggtgcgagggacacctgggacccagtcccactgacacggtggcggctgcacaacagccctgcctgagaagccccgacacacggggctcgggcctttaaaacgcgtctgcctgggccgtggcacagctgggagcctggttcagacacagctcttccagggcagcggctccactttctcatccgaagatggtggccacagactgacccccatctgagctggggggatgttctgcctctccctgggtctggggacaggcccgcttgctgggtacctggtccccactgctgagctggcccttggggagaggtgattctcagggctggagcctggggtgtcctacagtgactccctgggagccgcctgcttcttctctccacatggaagcccaactggggttgcgtctgaggcctgccccctgggctggggcctcagaccccctcagccttgggaccgtgcccacgagggtctcccctcctgcacacagggcagtccttactcccccaccactcaggccacagtggggctgcaggcaggcggctcctcctcacccacctctgggtccttggctcccgggggccccacctcggcacacactgtgccccacaaaacttcagtgtggtacaaggtggagaaagcatatcccaccaacctccagtgtcagggtccaggagagcctgggggtggggggactgccttgtctctagtagtgtggcctgtgccagcaccacagccggtcagaggagcgcaggcagcgcagggctggcacgtgacaggctcgtcagccacctgggaacacagttctgggcaaagaggatccgaggttgagaggaaggagggtcccggtgtatcctggccctgggggtctgggcgtccagctcagccctggcctggctgggtggtattctggtagggatatggcaggactcctggcagggccacctgcaggaccctgtcctgcagtcccacactgtgcagacccagtcccacactgtggccaggccttacatctggctggaaagcagagcctcctgggaacacatctggctgcacaggctgaaatatccacccagcaggcagagtggcgtggcctccccatgggcacagtggtgacccccttgattcccaccgtacaaccccctccaccccccactcagtgcctccacatgctgcctggcacagaccaggcctttgacaaataaatgttcaatggatgca

SEQ ID NO: 4592 - DNA, 2622 bp, Homo sapiens
  source 1..2622: mol_type = genomic DNA
ctattggaggagaaggccgagaggagcaggacggcgggaagaggagtgcggaacccgcgggaggtgaggcccgccgagccgggctgcgagccgggctgcgagccgggcggcagcggggtcggaggtcgtgggcggcagcggagtccccagggagacacttaagggaaattaaactgcagagtgcaagagatgcctcagtcaagtcagccaaaaacacgcgggtcatccccaagccccagagagtgacagagccccgatgacacggacacctcggctgctgtcacttccctggttcgggcctcccacaggctttgaattgaaggcgagtgcctcagaatttgcatccattgttctgtctttcctgggaagttattcatcctggtggccagcccaccgacaaaatggatttggatctactggacctgaatcccagaattattgctgcaattaagaaagccaaactgaaatcggtaaaggaggttttacacttttctggaccagacttgaagagactgaccaacctctccagccccgaggtctggcacttgctgagaacggcctccttacacttgcggggaagcagcatccttacagcactgcagctgcaccagcagaaggagcggttccccacgcagcaccagcgcctgagcctgggctgcccggtgctggacgcgctgctccgcggtggcctgcccctggacggcatcactgagctggccggacgcagctcggcagggaagacccagctggcgctgcagctctgcctggctgtgcagttcccgcggcagcacggaggcctggaggctggagccgtctacatctgcacggaagacgccttcccgcacaagcgcctgcagcagctcatggcccagcagccgcggctgcgcactgacgttccaggagagctgcttcagaagctccgatttggcagccagatcttcatcgagcacgtggccgatgtggacaccttgttggagtgtgtgaataagaaggtccccgtactgctgtctcggggcatggctcgcctggtggtcatcgactcggtggcagccccattccgctgtgaatttgacagccaggcctccgcccccagggccaggcatctgcagtccctgggggccacgctgcgtgagctgagcagtgccttccagagccctgtgctgtgcatcaaccaggtgacagaggccatggaggagcagggcgcagcacacgggccgctggggttctgggacgaacgtgtttccccagcccttggcataacctgggctaaccagctcctggtgagactgctggctgaccggctccgcgaggaagaggctgccctcggctgcccagcccggaccctgcgggtgctctctgccccccacctgcccccctcctcctgttcctacacgatcagtgccgaaggggtgcgagggacacctgggacccagtcccactgacacggtggcggctgcacaacagccctgcctgagaagccccgacacacggggctcgggcctttaaaacgcgtctgcctgggccgtggcacagctgggagcctggttcagacacagctcttccagggcagcggctccactttctcatccgaagatggtggccacagactgacccccatctgagctggggggatgttctgcctctccctgggtctggggacaggcccgcttgctgggtacctggtccccactgctgagctggcccttggggagaggtgattctcagggctggagcctggggtgtcctacagtgactccctgggagccgcctgcttcttctctccacatggaagcccaactggggttgcgtctgaggcctgccccctgggctggggcctcagaccccctcagccttgggaccgtgcccacgagggtctcccctcctgcacacagggcagtccttactcccccaccactcaggccacagtggggctgcaggcaggcggctcctcctcacccacctctgggtccttggctcccgggggccccacctcggcacacactgtgccccacaaaacttcagtgtggtacaaggtggagaaagcatatcccaccaacctccagtgtcagggtccaggagagcctgggggtggggggactgccttgtctctagtagtgtggcctgtgccagcaccacagccggtcagaggagcgcaggcagcgcagggctggcacgtgacaggctcgtcagccacctgggaacacagttctgggcaaagaggatccgaggttgagaggaaggagggtcccggtgtatcctggccctgggggtctgggcgtccagctcagccctggcctggctgggtggtattctggtagggatatggcaggactcctggcagggccacctgcaggaccctgtcctgcagtcccacactgtgcagacccagtcccacactgtggccaggccttacatctggctggaaagcagagcctcctgggaacacatctggctgcacaggctgaaatatccacccagcaggcagagtggcgtggcctccccatgggcacagtggtgacccccttgattcccaccgtacaaccccctccaccccccactcagtgcctccacatgctgcctggcacagaccaggcctttgacaaataaatgttcaatggatgc

SEQ ID NO: 4593 - DNA, 3018 bp, Homo sapiens
  source 1..3018: mol_type = genomic DNA
ctccctgagcaggctgaacatgggcatacgagtgaccagcgtgatcgtgtccaggccagtgccgcattctgtgtggtccaagggaaaaccttctccaagtccacggcccgccctttcctctgctgggttacggccaagggcgccaggcctcactggaggacatggatcctggacccggccctcgaggctgctgccttccagtttccccatgtcctggacactcttggtctcaccatttgggaggccgacaggggatgcagagtggcctgttggaaaggccttatgtgaccccaggctgagtccctgagcagcctgctgaggccggaggggagaagagctgagcttctcccttgctgggccaggctcgggctgtggaatggctgccagctcccttcctgggagaggctgggtggggtccacagcaccttcctcccgtcccacaggaagctgtcttctgctgttggctgctgggggcgactgatgtttggatccctgagcaccctgccaatcccagactcaccttcccactctttccagagtccccagggagacacttaagggaaattaaactgcagagtgcaagagatgcctcagtcaagtcagccaaaaacacgcgggtcatccccaagccccagagagtgacagagccccgatgacacggacacctcggctgctgtcacttccctggttcgggcctcccacaggctttgaattgaaggcgagtgcctcagaatttgcatccattgttctgtctttcctgggaagttattcatcctggtggccagcccaccgacaaaatggatttggatctactggacctgaatcccagaattattgctgcaattaagaaagccaaactgaaatcggtaaaggaggttttacacttttctggaccagacttgaagagactgaccaacctctccagccccgaggtctggcacttgctgagaacggcctccttacacttgcggggaagcagcatccttacagcactgcagctgcaccagcagaaggagcggttccccacgcagcaccagcgcctgagcctgggctgcccggtgctggacgcgctgctccgcggtggcctgcccctggacggcatcactgagctggccggacgcagctcggcagggaagacccagctggcgctgcagctctgcctggctgtgcagttcccgcggcagcacggaggcctggaggctggagccgtctacatctgcacggaagacgccttcccgcacaagcgcctgcagcagctcatggcccagcagccgcggctgcgcactgacgttccaggagagctgcttcagaagctccgatttggcagccagatcttcatcgagcacgtggccgatgtggacaccttgttggagtgtgtgaataagaaggtccccgtactgctgtctcggggcatggctcgcctggtggtcatcgactcggtggcagccccattccgctgtgaatttgacagccaggcctccgcccccagggccaggcatctgcagtccctgggggccacgctgcgtgagctgagcagtgccttccagagccctgtgctgtgcatcaaccaggtgacagaggccatggaggagcagggcgcagcacacgggccgctggggttctgggacgaacgtgtttccccagcccttggcataacctgggctaaccagctcctggtgagactgctggctgaccggctccgcgaggaagaggctgccctcggctgcccagcccggaccctgcgggtgctctctgccccccacctgcccccctcctcctgttcctacacgatcagtgccgaaggggtgcgagggacacctgggacccagtcccactgacacggtggcggctgcacaacagccctgcctgagaagccccgacacacggggctcgggcctttaaaacgcgtctgcctgggccgtggcacagctgggagcctggttcagacacagctcttccagggcagcggctccactttctcatccgaagatggtggccacagactgacccccatctgagctggggggatgttctgcctctccctgggtctggggacaggcccgcttgctgggtacctggtccccactgctgagctggcccttggggagaggtgattctcagggctggagcctggggtgtcctacagtgactccctgggagccgcctgcttcttctctccacatggaagcccaactggggttgcgtctgaggcctgccccctgggctggggcctcagaccccctcagccttgggaccgtgcccacgagggtctcccctcctgcacacagggcagtccttactcccccaccactcaggccacagtggggctgcaggcaggcggctcctcctcacccacctctgggtccttggctcccgggggccccacctcggcacacactgtgccccacaaaacttcagtgtggtacaaggtggagaaagcatatcccaccaacctccagtgtcagggtccaggagagcctgggggtggggggactgccttgtctctagtagtgtggcctgtgccagcaccacagccggtcagaggagcgcaggcagcgcagggctggcacgtgacaggctcgtcagccacctgggaacacagttctgggcaaagaggatccgaggttgagaggaaggagggtcccggtgtatcctggccctgggggtctgggcgtccagctcagccctggcctggctgggtggtattctggtagggatatggcaggactcctggcagggccacctgcaggaccctgtcctgcagtcccacactgtgcagacccagtcccacactgtggccaggccttacatctggctggaaagcagagcctcctgggaacacatctggctgcacaggctgaaatatccacccagcaggcagagtggcgtggcctccccatgggcacagtggtgacccccttgattcccaccgtacaaccccctccaccccccactcagtgcctccacatgctgcctggcacagaccaggcctttgacaaataaatgttcaatggatgc

SEQ ID NO: 4594 - DNA, 560 bp, Homo sapiens
  source 1..560: mol_type = genomic DNA
ctattggaggagaaggccgagaggagcaggacggcgggaagaggagtgcggaacccgcgggaggaagctgtcttctgctgttggctgctgggggcgactgatgtttggatccctgagcaccctgccaatcccagactcaccttcccactctttccagagtccccagggagacacttaagggaaattaaactgcagagtgcaagagatgcctcagtcaagtcagccaaaaacacgcgggtcatccccaagccccagagagtgacagagccccgatgacacggacacctcggctgctgtcacttccctggttcgggcctcccacaggctttgaattgaaggcgagtgcctcagaatttgcatccattgttctgtctttcctgggaagttattcatcctggtggccagcccaccgacaaaatggatttggatctactggacctgaatcccagaattattgctgcaattaagaaagccaaactgaaatcggtaaaggaggttttacacttttctggaccagacttgaagagactgaccaacctctccagccccgaggtctggca

SEQ ID NO: 4595 - DNA, 572 bp, Homo sapiens
  source 1..572: mol_type = genomic DNA
agatttgttctcgggttcacagtgctcagaggggaggagaggggaggaggtgaagacacctggcagggaagcagggcctccatggatggggtgcattcacggcagggagttctcagcaggatgtgcacagagggcccaggaggagcctcaggagccggactgccgttggccaaccgagtccccagggagacacttaagggaaattaaactgcagagtgcaagagatgcctcagtcaagtcagccaaaaacacgcgggtcatccccaagccccagagagtgacagagccccgatgacacggacacctcggctgctgtcacttccctggttcgggcctcccacaggctttgaattgaaggcgagtgcctcagaatttgcatccattgttctgtctttcctgggaagttattcatcctggtggccagcccaccgacaaaatggatttggatctactggacctgaatcccagaattattgctgcaattaagaaagccaaactgaaatcggtaaaggaggttttacacttttctggaccagacttgaagagactgaccaacctctccagccccgagg

SEQ ID NO: 4596 - DNA, 2539 bp, Homo sapiens
  source 1..2539: mol_type = genomic DNA
gagtgcggaacccgcgggagactttgagccaggcctgttaaaccaagttctcagcaggatgtgcacagagggcccaggaggagcctcaggagccggactgccgttggccaaccgagtccccagggagacacttaagggaaattaaactgcagagtgcaagagatgcctcagtcaagtcagccaaaaacacgcgggtcatccccaagccccagagaggctttgaattgaaggcgagtgcctcagaatttgcatccattgttctgtctttcctgggaagttattcatcctggtggccagcccaccgacaaaatggatttggatctactggacctgaatcccagaattattgctgcaattaagaaagccaaactgaaatcggtaaaggaggttttacacttttctggaccagacttgaagagactgaccaacctctccagccccgaggtctggcacttgctgagaacggcctccttacacttgcggggaagcagcatccttacagcactgcagctgcaccagcagaaggagcggttccccacgcagcaccagcgcctgagcctgggctgcccggtgctggacgcgctgctccgcggtggcctgcccctggacggcatcactgagctggccggacgcagctcggcagggaagacccagctggcgctgcagctctgcctggctgtgcagttcccgcggcagcacggaggcctggaggctggagccgtctacatctgcacggaagacgccttcccgcacaagcgcctgcagcagctcatggcccagcagccgcggctgcgcactgacgttccaggagagctgcttcagaagctccgatttggcagccagatcttcatcgagcacgtggccgatgtggacaccttgttggagtgtgtgaataagaaggtccccgtactgctgtctcggggcatggctcgcctggtggtcatcgactcggtggcagccccattccgctgtgaatttgacagccaggcctccgcccccagggccaggcatctgcagtccctgggggccacgctgcgtgagctgagcagtgccttccagagccctgtgctgtgcatcaaccaggtgacagaggccatggaggagcagggcgcagcacacgggccgctggggttctgggacgaacgtgtttccccagcccttggcataacctgggctaaccagctcctggtgagactgctggctgaccggctccgcgaggaagaggctgccctcggctgcccagcccggaccctgcgggtgctctctgccccccacctgcccccctcctcctgttcctacacgatcagtgccgaaggggtgcgagggacacctgggacccagtcccactgacacggtggcggctgcacaacagccctgcctgagaagccccgacacacggggctcgggcctttaaaacgcgtctgcctgggccgtggcacagctgggagcctggttcagacacagctcttccagggcagcggctccactttctcatccgaagatggtggccacagactgacccccatctgagctggggggatgttctgcctctccctgggtctggggacaggcccgcttgctgggtacctggtccccactgctgagctggcccttggggagaggtgattctcagggctggagcctggggtgtcctacagtgactccctgggagccgcctgcttcttctctccacatggaagcccaactggggttgcgtctgaggcctgccccctgggctggggcctcagaccccctcagccttgggaccgtgcccacgagggtctcccctcctgcacacagggcagtccttactcccccaccactcaggccacagtggggctgcaggcaggcggctcctcctcacccacctctgggtccttggctcccgggggccccacctcggcacacactgtgccccacaaaacttcagtgtggtacaaggtggagaaagcatatcccaccaacctccagtgtcagggtccaggagagcctgggggtggggggactgccttgtctctagtagtgtggcctgtgccagcaccacagccggtcagaggagcgcaggcagcgcagggctggcacgtgacaggctcgtcagccacctgggaacacagttctgggcaaagaggatccgaggttgagaggaaggagggtcccggtgtatcctggccctgggggtctgggcgtccagctcagccctggcctggctgggtggtattctggtagggatatggcaggactcctggcagggccacctgcaggaccctgtcctgcagtcccacactgtgcagacccagtcccacactgtggccaggccttacatctggctggaaagcagagcctcctgggaacacatctggctgcacaggctgaaatatccacccagcaggcagagtggcgtggcctccccatgggcacagtggtgacccccttgattcccaccgtacaaccccctccaccccccactcagtgcctccacatgctgcctggcacagaccaggcctttgacaaataaatgttcaatggatgcagttccagg

SEQ ID NO: 4597 - DNA, 2584 bp, Homo sapiens
  source 1..2584: mol_type = genomic DNA
cgagaggagcaggacggcgggaagaggagtgcggaacccgcgggaggatgtgcacagagggcccaggaggagcctcaggagccggactgccgttggccaaccgagtccccagggagacacttaagggaaattaaactgcagagtgcaagagatgcctcagtcaagtcagccaaaaacacgcgggtcatccccaagccccagagagtgacagagccccgatgacacggacacctcggctgctgtcacttccctggttcgggcctcccacaggctttgaattgaaggcgagtgcctcagaatttgcatccattgttctgtctttcctgggaagttattcatcctggtggccagcccaccgacaaaatggatttggatctactggacctgaatcccagaattattgctgcaattaagaaagccaaactgaaatcggtaaaggaggttttacacttttctggaccagacttgaagagactgaccaacctctccagccccgaggtctggcacttgctgagaacggcctccttacacttgcggggaagcagcatccttacagcactgcagctgcaccagcagaaggagcggttccccacgcagcaccagcgcctgagcctgggctgcccggtgctggacgcgctgctccgcggtggcctgcccctggacggcatcactgagctggccggacgcagctcggcagggaagacccagctggcgctgcagctctgcctggctgtgcagttcccgcggcagcacggaggcctggaggctggagccgtctacatctgcacggaagacgccttcccgcacaagcgcctgcagcagctcatggcccagcagccgcggctgcgcactgacgttccaggagagctgcttcagaagctccgatttggcagccagatcttcatcgagcacgtggccgatgtggacaccttgttggagtgtgtgaataagaaggtccccgtactgctgtctcggggcatggctcgcctggtggtcatcgactcggtggcagccccattccgctgtgaatttgacagccaggcctccgcccccagggccaggcatctgcagtccctgggggccacgctgcgtgagctgagcagtgccttccagagccctgtgctgtgcatcaaccaggtgacagaggccatggaggagcagggcgcagcacacgggccgctggggttctgggacgaacgtgtttccccagcccttggcataacctgggctaaccagctcctggtgagactgctggctgaccggctccgcgaggaagaggctgccctcggctgcccagcccggaccctgcgggtgctctctgccccccacctgcccccctcctcctgttcctacacgatcagtgccgaaggggtgcgagggacacctgggacccagtcccactgacacggtggcggctgcacaacagccctgcctgagaagccccgacacacggggctcgggcctttaaaacgcgtctgcctgggccgtggcacagctgggagcctggttcagacacagctcttccagggcagcggctccactttctcatccgaagatggtggccacagactgacccccatctgagctggggggatgttctgcctctccctgggtctggggacaggcccgcttgctgggtacctggtccccactgctgagctggcccttggggagaggtgattctcagggctggagcctggggtgtcctacagtgactccctgggagccgcctgcttcttctctccacatggaagcccaactggggttgcgtctgaggcctgccccctgggctggggcctcagaccccctcagccttgggaccgtgcccacgagggtctcccctcctgcacacagggcagtccttactcccccaccactcaggccacagtggggctgcaggcaggcggctcctcctcacccacctctgggtccttggctcccgggggccccacctcggcacacactgtgccccacaaaacttcagtgtggtacaaggtggagaaagcatatcccaccaacctccagtgtcagggtccaggagagcctgggggtggggggactgccttgtctctagtagtgtggcctgtgccagcaccacagccggtcagaggagcgcaggcagcgcagggctggcacgtgacaggctcgtcagccacctgggaacacagttctgggcaaagaggatccgaggttgagaggaaggagggtcccggtgtatcctggccctgggggtctgggcgtccagctcagccctggcctggctgggtggtattctggtagggatatggcaggactcctggcagggccacctgcaggaccctgtcctgcagtcccacactgtgcagacccagtcccacactgtggccaggccttacatctggctggaaagcagagcctcctgggaacacatctggctgcacaggctgaaatatccacccagcaggcagagtggcgtggcctccccatgggcacagtggtgacccccttgattcccaccgtacaaccccctccaccccccactcagtgcctccacatgctgcctggcacagaccaggcctttgacaaataaatgttcaatggatgc

SEQ ID NO: 4598 - DNA, 562 bp, Homo sapiens
  source 1..562: mol_type = genomic DNA
attggaggagaaggccgagaggagcaggacggcgggaagaggagtgcggaacccgcgggagagtccccagggagacacttaagggaaattaaactgcagagtgcaagagatgcctcagtcaagtcagccaaaaacacgcgggtcatccccaagccccagagaggctttgaattgaaggcgagtgcctcagaatttgcatccattgttctgtctttcctgggaagttattcatcctggtggccagcccaccgacaaaatggatttggatctactggacctgaatcccagaattattgctgcaattaagaaagccaaactgaaatcggtaaaggaggttttacacttttctggaccagacttgaagagactgaccaacctctccagccccgaggtctggcacttgctgagaacggcctccttacacttgcggggaagcagcatccttacagcactgcagctgcaccagcagaaggagcggttccccacgcagcaccagcgcctgagcctgggctgcccggtgctggacgcgctgctccgcggtggcctgcccctggacggcatc

SEQ ID NO: 4599 - DNA, 535 bp, Homo sapiens
  source 1..535: mol_type = genomic DNA
attggaggagaaggccgagaggagcaggacggcgggaagaggagtgcggaacccgcgggaggaagctgtcttctgctgttggctgctgggggcgactgatgtttggatccctgagcaccctgccaatcccagactcaccttcccactctttccagagtccccagggagacacttaagggaaattaaactgcagagtgcaagagatgcctcagtcaagtcagccaaaaacacgcgggtcatccccaagccccagagaggctttgaattgaaggcgagtgcctcagaatttgcatccattgttctgtctttcctgggaagttattcatcctggtggccagcccaccgacaaaatggatttggatctactggacctgaatcccagaattattgctgcaattaagaaagccaaactgaaatcggtaaaggaggttttacacttttctggaccagacttgaagagactgaccaacctctccagccccgaggtctggcacttgctgagaacggcctccttacacttgcggggaagcagcat

SEQ ID NO: 4600 - DNA, 801 bp, Homo sapiens
  source 1..801: mol_type = genomic DNA
gtatgattccacgaatcacacggtttattgtcaaagaagatttgttctcgggttcacagtgctcagaggggaggagaggggaggaggtgaagacacctggcagggaagcagggcctccatggatggggtgcattcacggcagggaggatgtgcacagagggcccaggaggagcctcaggagccggactgccgttggccaaccgagtccccagggagacacttaagggaaattaaactgcagagtgcaagagatgcctcagtcaagtcagccaaaaacacgcgggtcatccccaagccccagagagtgacagagccccgatgacacggacacctcggctgctgtcacttccctggttcgggcctcccacaggctttgaattgaaggcgagtgcctcagaatttgcatccattgttctgtctttcctgggaagttattcatcctggtggccagcccaccgacaaaatggatttggatctactggacctgaatcccagaattattgctgcaattaagaaagccaaactgaaatcggtaaaggaggttttacacttttctggaccagacttgaagagactgaccaacctctccagccccgaggtctggcacttgctgagaacggcctccttacacttgcggggaagcagcatccttacagcactgcagctgcaccagcagaaggagcggttccccacgcagcaccagcgcctgagcctgggctgcccggtgctggacgcgctgctccgcggtggcctgcccctggacggcatcactgagctggccggacgcagctcggcagggaa

SEQ ID NO: 4601 - DNA, 1696 bp, Homo sapiens
  source 1..1696: mol_type = genomic DNA
cgggatttagatcacgtcccgcaggccggcggaagtagctgatactctcattggttgcaaaaccttgatctgtgaaagcgggcgttttggaagataccggaagtagagtcacggagaggtaggatccggaagtggggctgcctctttaaataacaaaaatctgaggtattaagaaatggagagaaaaataagcagaatccaccttgtttctgaacccagtataactcattttctacaagtatcttgggagaaaacactggaatctggttttgttattacacttactgatggtcattcagcatggactgggacagtttctgaatcagagatttcccaagaagctgatgacatggcaatggaaaaagggaaatatgttggtgaactgagaaaagcattgttgtcaggagcaggaccagctgatgtatacacgtttaatttttctaaagagtcttgttatttcttctttgagaaaaacctgaaagatgtctcattcagacttggttccttcaacctagagaaagttgaaaacccagctgaagtcattagagaacttatttgttattgcttggacaccattgcagaaaatcaagccaaaaatgagcacctgcagaaagaaaatgaaaggcttctgagagattggaatgatgttcaaggacgatttgaaaaatgtgtgagtgctaaggaagctttggagactgatctttataagcggtttattctggtgttgaatgagaagaaaacaaaaatcagaagtttgcataataaattattaaatgcagctcaagaacgagaaaaggacatcaaacaagaaggggaaactgcaatctgttctgaaatgactgctgaccgagatccagtctatgatgagagtactgatgaggaaagtgaaaaccaaactgatctctctgggttggcttcagctgctgtaagtaaagatgattccattatttcaagtcttgatgtcactgatattgcaccaagtagaaaaaggagacagcgaatgcaaagaaatcttgggacagaacctaaaatggctcctcaggagaatcagcttcaagaaaaggaaaagcctgattcttcactacctgagacgtctaaaaaggagcacatctcagctgaaaacatgtctttagaaactctgagaaacagcagcccagaagacctctttgatgagatttaacagtctcaaaaaatactttgatgttcactagactatgttttctattcatttctttaaaatgaaaaaggagaatttcaagtcagcagccgctattaccgtatcttacaatttaattacatacacagtgaattgaaaccattgtgcaaaatggattacacatgtatacaaagatacgatttgatgatgacactggcacattattctaaactattcattcagcatgcctataattacataaattgtatgagactttttgttgcaaaggacacatttatcatattcattcacacatattatatgtgatagctgtccaacatcctgtctgggaagattttgaaaacaggacaaagaaaacatcattttaaaatgtcttcagctttttttgaatagacgtattcaaacatattctgaacattgatgtttgaacattttaatttgtgtgatgatgtagaaaatataattttagtttgtacataaacattgtgaaaatctgataataaaatttttgatacattg

SEQ ID NO: 4602 - DNA, 1579 bp, Homo sapiens
  source 1..1579: mol_type = genomic DNA
cggaagtagctgatactctcattggttgcaaaaccttgatctgtgaaagcgggcgttttggaagataccggaagtagagtcacggagaggtattaagaaatggagagaaaaataagcagaatccaccttgtttctgaacccagtataactcattttctacaagtatcttgggagaaaacactggaatctggttttgttattacacttactgatggtcattcagcatggactgggacagtttctgaatcagagatttcccaagaagctgatgacatggcaatggaaaaagggaaatatgttggtgaactgagaaaagcattgttgtcaggagcaggaccagctgatgtatacacgtttaatttttctaaagagtcttgttatttcttctttgagaaaaacctgaaagatgtctcattcagacttggttccttcaacctagagaaagttgaaaacccagctgaagtcattagagaacttatttgttattgcttggacaccattgcagaaaatcaagccaaaaatgagcacctgcagaaagaaaatgaaaggcttctgagagattggaatgatgttcaaggacgatttgaaaaatgtgtgagtgctaaggaagctttggagactgatctttataagcggtttattctggtgttgaatgagaagaaaacaaaaatcagaagtttgcataataaattattaaatgcagctcaagaacgagaaaaggacatcaaacaagaaggggaaactgcaatctgttctgaaatgactgctgaccgagatccagtctatgatgagagtactgatgaggaaagtgaaaaccaaactgatctctctgggttggcttcagctgctgtaagtaaagatgattccattatttcaagtcttgatgtcactgatattgcaccaagtagaaaaaggagacagcgaatgcaaagaaatcttgggacagaacctaaaatggctcctcaggagaatcagcttcaagaaaaggaaaattctaggcctgattcttcactacctgagacgtctaaaaaggagcacatctcagctgaaaacatgtctttagaaactctgagaaacagcagcccagaagacctctttgatgagatttaacagtctcaaaaaatactttgatgttcactagactatgttttctattcatttctttaaaatgaaaaaggagaatttcaagtcagcagccgctattaccgtatcttacaatttaattacatacacagtgaattgaaaccattgtgcaaaatggattacacatgtatacaaagatacgatttgatgatgacactggcacattattctaaactattcattcagcatgcctataattacataaattgtatgagactttttgttgcaaaggacacatttatcatattcattcacacatattatatgtgatagctgtccaacatcctgtctgggaagattttgaaaacaggacaaagaaaacatcattttaaaatgtcttcagctttttttgaatagacgtattcaaacatattctgaacattgatgtttgaacattttaatttgtgtgatgatgtagaaaatataattttagttt

SEQ ID NO: 4603 - DNA, 1530 bp, Homo sapiens
  source 1..1530: mol_type = genomic DNA
tgaaagcgggcgttttggaagataccggaagtagagtcacggagaggtattaagaaatggagagaaaaataagcagaatccaccttgtttctgaacccagtataactcattttctacaagtatcttgggagaaaacactggaatctggttttgttattacacttactgatggtcattcagcatggactgggacagtttctgaatcagagatttcccaagaagctgatgacatggcaatggaaaaagggaaatatgttggtgaactgagaaaagcattgttgtcaggagcaggaccagctgatgtatacacgtttaatttttctaaagagtcttgttatttcttctttgagaaaaacctgaaagatgtctcattcagacttggttccttcaacctagagaaagttgaaaacccagctgaagtcattagagaacttatttgttattgcttggacaccattgcagaaaatcaagccaaaaatgagcacctgcagaaagaaaatgaaaggcttctgagagattggaatgatgttcaaggacgatttgaaaaatgtgtgagtgctaaggaagctttggagactgatctttataagcggtttattctggtgttgaatgagaagaaaacaaaaatcagaagtttgcataataaattattaaatgcagctcaagaacgagaaaaggacatcaaacaagaaggggaaactgcaatctgttctgaaatgactgctgaccgagatccagtctatgatgagagtactgatgaggaaagtgaaaaccaaactgatctctctgggttggcttcagctgctgtaagtaaagatgattccattatttcaagtcttgatgtcactgatattgcaccaagtagaaaaaggagacagcgaatgcaaagaaatcttgggacagaacctaaaatggctcctcaggagaatcagcttcaagaaaaggaaaagcctgattcttcactacctgagacgtctaaaaaggagcacatctcagctgaaaacatgtctttagaaactctgagaaacagcagcccagaagacctctttgatgagatttaacagtctcaaaaaatactttgatgttcactagactatgttttctattcatttctttaaaatgaaaaaggagaatttcaagtcagcagccgctattaccgtatcttacaatttaattacatacacagtgaattgaaaccattgtgcaaaatggattacacatgtatacaaagatacgatttgatgatgacactggcacattattctaaactattcattcagcatgcctataattacataaattgtatgagactttttgttgcaaaggacacatttatcatattcattcacacatattatatgtgatagctgtccaacatcctgtctgggaagattttgaaaacaggacaaagaaaacatcattttaaaatgtcttcagctttttttgaatagacgtattcaaacatattctgaacattgatgtttgaacattttaatttgtgtgatgatgtagaaaatataattttagttt

SEQ ID NO: 4604 - DNA, 1636 bp, Homo sapiens
  source 1..1636: mol_type = genomic DNA
accggaagtagagtcacggagaggtaggatccggaagtggggctgcctctttaaataacaaaaatctgaggtattaagaaatggagagaaaaataagcagaatccaccttgtttctgaacccagtataactcattttctacaagtatcttgggagaaaacactggaatctggttttgttattacacttactgatggtcattcagcatggactgggacagtttctgaatcagagatttcccaagaagctgatgacatggcaatggaaaaagggaaatatgttggtgaactgagaaaagcattgttgtcaggagcaggaccagctgatgtatacacgtttaatttttctaaagagtcttgttatttcttctttgagaaaaacctgaaagatgtctcattcagacttggttccttcaacctagagaaagttgaaaacccagctgaagtcattagagaacttatttgttattgcttggacaccattgcagaaaatcaagccaaaaatgagcacctgcagaaagaaaatgaaaggcttctgagagattggaatgatgttcaaggacgatttgaaaaatgtgtgagtgctaaggaagctttggagactgatctttataagcggtttattctggtgttgaatgagaagaaaacaaaaatcagaagtttgcataataaattattaaatgcagctcaagaacgagaaaaggacatcaaacaagaaggggaaactgcaatctgttctgaaatgactgctgaccgagatccagtctatgatgagagtactgatgaggaaagtgaaaaccaaactgatctctctgggttggcttcagctgctgtaagtaaagatgattccattatttcaagtcttgatgtcactgatattgcaccaagtagaaaaaggagacagcgaatgcaaagaaatcttgggacagaacctaaaatggctcctcaggagaatcagcttcaagaaaaggaaaattctaggcctgattcttcactacctgagacgtctaaaaaggagcacatctcagctgaaaacatgtctttagaaactctgagaaacagcagcccagaagacctctttgatgagatttaacagtctcaaaaaatactttgatgttcactagactatgttttctattcatttctttaaaatgaaaaaggagaatttcaagtcagcagccgctattaccgtatcttacaatttaattacatacacagtgaattgaaaccattgtgcaaaatggattacacatgtatacaaagatacgatttgatgatgacactggcacattattctaaactattcattcagcatgcctataattacataaattgtatgagactttttgttgcaaaggacacatttatcatattcattcacacatattatatgtgatagctgtccaacatcctgtctgggaagattttgaaaacaggacaaagaaaacatcattttaaaatgtcttcagctttttttgaatagacgtattcaaacatattctgaacattgatgtttgaacattttaatttgtgtgatgatgtagaaaatataattttagtttgtacataaacattgtgaaaatctgataataaaatttttgatacattgaagattttgtgtttttaataaaatgtgtt

SEQ ID NO: 4605 - DNA, 1088 bp, Homo sapiens
  source 1..1088: mol_type = genomic DNA
accggaagtagagtcacggagaggtaggatccggaagtggggctgcctctttaaataacaaaaatctgaggtattaagaaatggagagaaaaataagcagaatccaccttgtttctgaacccagtataactcattttctacaagtatcttgggagaaaacactggaatctggttttgttattacacttactgatggtcattcagcatggactgggacagtttctgaatcagagatttcccaagaagctgatgacatggcaatggaaaaagggaaatatgttggtgaactgagaaaagcattgttgtcaggagcaggaccagctgatgtatacacgtttaatttttctaaagagtcttgttatttcttctttgagaaaaacctgaaagatgtctcattcagacttggttccttcaacctagagaaagttgaaaacccagctgaagtcattagagaacttatttgttattgcttggacaccattgcagaaaatcaagccaaaaatgagcacctgcagaaagaaaatgaaaggcttctgagagattggaatgatgttcaaggacgatttgaaaaatgtgtgagtgctaaggaagctttggagactgatctttataagcggtttattctggtgttgaatgagaagaaaacaaaaatcagaagtttgcataataaattattaaatgcagctcaagaacgagaaaaggacatcaaacaagaaggggaaactgcaatctgttctgaaatgactgctgaccgagatccagtctatgatgagagtactgatgaggaaagtgaaaaccaaactgatctctctgggttggcttcagctgctgtaagtaaagatgattccattatttcaagtcttgatgtcactgatattgcaccaagtagaaaaaggagacagcgaatgcaaagaaatcttgggacagaacctaaaatggctcctcaggagaatcagcttcaagaaaaggaaaattctaggcctgattcttcactacctgagacgtctaaaaaggagcacatctcagctgaaaacatgtctttagaaactctgagaaacagcagcccagaagacctctttgtgtctata

SEQ ID NO: 4606 - DNA, 3428 bp, Homo sapiens
  source 1..3428: mol_type = genomic DNA
acggtttccccgcccctttcaggcctagcaggaaacgaagcggctctttccgctatctgccgcttgtccaccggaagcgagttgcgacacggcaggttcccgcccggaagaagcgaccaaagcgcctgaggaccggcaacatggtgcggtcggggaataaggcagctgttgtgctgtgtatggacgtgggctttaccatgagtaactccattcctggtatagaatccccatttgaacaagcaaagaaggtgataaccatgtttgtacagcgacaggtgtttgctgagaacaaggatgagattgctttagtcctgtttggtacagatggcactgacaatcccctttctggtggggatcagtatcagaacatcacagtgcacagacatctgatgctaccagattttgatttgctggaggacattgaaagcaaaatccaaccaggttctcaacaggctgacttcctggatgcactaatcgtgagcatggatgtgattcaacatgaaacaataggaaagaagtttgagaagaggcatattgaaatattcactgacctcagcagccgattcagcaaaagtcagctggatattataattcatagcttgaagaaatgtgacatctccctgcaattcttcttgcctttctcacttggcaaggaagatggaagtggggacagaggagatggcccctttcgcttaggtggccatgggccttcctttccactaaaaggaattaccgaacagcaaaaagaaggtcttgagatagtgaaaatggtgatgatatctttagaaggtgaagatgggttggatgaaatttattcattcagtgagagtctgagaaaactgtgcgtcttcaagaaaattgagaggcattccattcactggccctgccgactgaccattggctccaatttgtctataaggattgcagcctataaatcgattctacaggagagagttaaaaagacttggacagttgtggatgcaaaaaccctaaaaaaagaagatatacaaaaagaaacagtttattgcttaaatgatgatgatgaaactgaagttttaaaagaggatattattcaagggttccgctatggaagtgatatagttcctttctctaaagtggatgaggaacaaatgaaatataaatcggaggggaagtgcttctctgttttgggattttgtaaatcttctcaggttcagagaagattcttcatgggaaatcaagttctaaaggtctttgcagcaagagatgatgaggcagctgcagttgcactttcctccctgattcatgctttggatgacttagacatggtggccatagttcgatatgcttatgacaaaagagctaatcctcaagtcggcgtggcttttcctcatatcaagcataactatgagtgtttagtgtatgtgcagctgcctttcatggaagacttgcggcaatacatgttttcatccttgaaaaacagtaagaaatatgctcccaccgaggcacagttgaatgctgttgatgctttgattgactccatgagcttggcaaagaaagatgagaagacagacacccttgaagacttgtttccaaccaccaaaatcccaaatcctcgatttcagagattatttcagtgtctgctgcacagagctttacatccccgggagcctctacccccaattcagcagcatatttggaatatgctgaatcctcccgctgaggtgacaacaaaaagtcagattcctctctctaaaataaagaccctttttcctctgattgaagccaagaaaaaggatcaagtgactgctcaggaaattttccaagacaaccatgaagatggacctacagctaaaaaattaaagactgagcaagggggagcccacttcagcgtctccagtctggctgaaggcagtgtcacctctgttggaagtgtgaatcctgctgaaaacttccgtgttctagtgaaacagaagaaggccagctttgaggaagcgagtaaccagctcataaatcacatcgaacagtttttggatactaatgaaacaccgtattttatgaagagcatagactgcatccgagccttccgggaagaagccattaagttttcagaagagcagcgctttaacaacttcctgaaagcccttcaagagaaagtggaaattaaacaattaaatcatttctgggaaattgttgtccaggatggaattactctgatcaccaaagaggaagcctctggaagttctgtcacagctgaggaagccaaaaagtttctggcccccaaagacaaaccaagtggagacacagcagctgtatttgaagaaggtggtgatgtggacgatttattggacatgatataggtcgtggatgtatggggaatctaagagagctgccatcgctgtgatgctgggagttctaacaaaacaagttggatgcggccattcaaggggagccaaaatctcaagaaattcccagcaggttacctggaggcggatcatctaattctctgtggaatgaatacacacatatatattacaagggataatttagaccccatacaagtttataaagagtcattgttattttctggttggtgtattattttttctgtggtcttactgatctttgtatattacatacatgctttgaagtttctggaaagtagatcttttcttgacctagtatatcagtgacagttgcagcccttgtgatgtgattagtgtctcatgtggaaccatggcatggttattgatgagtttcttaaccctttccagagtcctcctttgcctgatcctccaacagctgtcacaacttgtgttgagcaagcagtagcatttgcttcctcccaacaagcagctgggttaggaaaaccatgggtaaggacggactcacttctctttttagttgaggccttctagttaccacattactctgcctctgtatataggtggttttctttaagtggggtgggaaggggagcacaatttcccttcatactccttttaagcagtgagttatggtggtggtctcatgaagaaaagaccttttggcccaatctctgccatatcagtgaacctttagaaactcaaaaactgagaaatttactacagtagttagaattatatcacttcactgttctctacttgcaagcctcaaagagagaaagtttcgttatattaaaacacttaggtaacttttcggtctttcccatttctacctaagtcagctttcatctttgtggatggtgtctcctttactaaataagaaaataacaaagcccttattctctttttttcttgtcctcattcttgccttgagttccagttcctctttggtgtacagacttcttggtacccagtcacctctgtcttcagcaccctcataagtcgtcactaatacacagttttgtacatgtaacattaaaggcataaatgactcatctctctgtg

SEQ ID NO: 4607 - DNA, 3761 bp, Homo sapiens
  source 1..3761: mol_type = genomic DNA
agaaaccccacaaaaattagctgggcttggtggcacacacctgtggtcccagctacctgggaggctgagctctggatcgtacaagaagggagacaaggaccactgacaagatatgcgtttcaggcggctcaaacaccacacgctcccgactacggcggaatggagagaatgtgcgcatgctcggcgggaatctgcgcatgctcggcgggaatctgcgcatgctcggagagaatctgcgcatgctcggccggaatctgcgcgagctcggcgggaatctgcgcaagctcggcgggaatctgcgcatgctcagagttccggggcacggtttccccgcccctttcaggcctagcaggaaacgaagcggctctttccgctatctgccgcttgtccaccggaagcgagttgcgacacggcaggttcccgcccggaagaagcgaccaaagcgcctgaggaccggcaacatggtgcggtcggggaataaggcagctgttgtgctgtgtatggacgtgggctttaccatgagtaactccattcctggtatagaatccccatttgaacaagcaaagaaggtgataaccatgtttgtacagcgacaggtgtttgctgagaacaaggatgagattgctttagtcctgtttggtacagatggcactgacaatcccctttctggtggggatcagtatcagaacatcacagtgcacagacatctgatgctaccagattttgatttgctggaggacattgaaagcaaaatccaaccaggttctcaacaggctgacttcctggatgcactaatcgtgagcatggatgtgattcaacatgaaacaataggaaagaagtttgagaagaggcatattgaaatattcactgacctcagcagccgattcagcaaaagtcagctggatattataattcatagcttgaagaaatgtgacatctccctgcaattcttcttgcctttctcacttggcaaggaagatggaagtggggacagaggagatggcccctttcgcttaggtggccatgggccttcctttccactaaaaggaattaccgaacagcaaaaagaaggtcttgagatagtgaaaatggtgatgatatctttagaaggtgaagatgggttggatgaaatttattcattcagtgagagtctgagaaaactgtgcgtcttcaagaaaattgagaggcattccattcactggccctgccgactgaccattggctccaatttgtctataaggattgcagcctataaatcgattctacaggagagagttaaaaagacttggacagttgtggatgcaaaaaccctaaaaaaagaagatatacaaaaagaaacagtttattgcttaaatgatgatgatgaaactgaagttttaaaagaggatattattcaagggttccgctatggaagtgatatagttcctttctctaaagtggatgaggaacaaatgaaatataaatcggaggggaagtgcttctctgttttgggattttgtaaatcttctcaggttcagagaagattcttcatgggaaatcaagttctaaaggtctttgcagcaagagatgatgaggcagctgcagttgcactttcctccctgattcatgctttggatgacttagacatggtggccatagttcgatatgcttatgacaaaagagctaatcctcaagtcggcgtggcttttcctcatatcaagcataactatgagtgtttagtgtatgtgcagctgcctttcatggaagacttgcggcaatacatgttttcatccttgaaaaacagtaagaaatatgctcccaccgaggcacagttgaatgctgttgatgctttgattgactccatgagcttggcaaagaaagatgagaagacagacacccttgaagacttgtttccaaccaccaaaatcccaaatcctcgatttcagagattatttcagtgtctgctgcacagagctttacatccccgggagcctctacccccaattcagcagcatatttggaatatgctgaatcctcccgctgaggtgacaacaaaaagtcagattcctctctctaaaataaagaccctttttcctctgattgaagccaagaaaaaggatcaagtgactgctcaggaaattttccaagacaaccatgaagatggacctacagctaaaaaattaaagactgagcaagggggagcccacttcagcgtctccagtctggctgaaggcagtgtcacctctgttggaagtgtgaatcctgctgaaaacttccgtgttctagtgaaacagaagaaggccagctttgaggaagcgagtaaccagctcataaatcacatcgaacagtttttggatactaatgaaacaccgtattttatgaagagcatagactgcatccgagccttccgggaagaagccattaagttttcagaagagcagcgctttaacaacttcctgaaagcccttcaagagaaagtggaaattaaacaattaaatcatttctgggaaattgttgtccaggatggaattactctgatcaccaaagaggaagcctctggaagttctgtcacagctgaggaagccaaaaagtttctggcccccaaagacaaaccaagtggagacacagcagctgtatttgaagaaggtggtgatgtggacgatttattggacatgatataggtcgtggatgtatggggaatctaagagagctgccatcgctgtgatgctgggagttctaacaaaacaagttggatgcggccattcaaggggagccaaaatctcaagaaattcccagcaggttacctggaggcggatcatctaattctctgtggaatgaatacacacatatatattacaagggataatttagaccccatacaagtttataaagagtcattgttattttctggttggtgtattattttttctgtggtcttactgatctttgtatattacatacatgctttgaagtttctggaaagtagatcttttcttgacctagtatatcagtgacagttgcagcccttgtgatgtgattagtgtctcatgtggaaccatggcatggttattgatgagtttcttaaccctttccagagtcctcctttgcctgatcctccaacagctgtcacaacttgtgttgagcaagcagtagcatttgcttcctcccaacaagcagctgggttaggaaaaccatgggtaaggacggactcacttctctttttagttgaggccttctagttaccacattactctgcctctgtatataggtggttttctttaagtggggtgggaaggggagcacaatttcccttcatactccttttaagcagtgagttatggtggtggtctcatgaagaaaagaccttttggcccaatctctgccatatcagtgaacctttagaaactcaaaaactgagaaatttactacagtagttagaattatatcacttcactgttctctacttgcaagcctcaaagagagaaagtttcgttatattaaaacacttaggtaacttttcggtctttcccatttctacctaagtcagctttcatctttgtggatggtgtctcctttactaaataagaaaataacaaagcccttattctctttttttcttgtcctcattcttgccttgagttccagttcctctttggtgtacagacttcttggtacccagtcacctctgtcttcagcaccctcataagtcgtcactaatacacagttttgtacatgtaacattaaaggcataaatgactcatctctctgtgaattgctgctaa

SEQ ID NO: 4608 - DNA, 2709 bp, Homo sapiens
  source 1..2709: mol_type = genomic DNA
gcgggccgttatccatttgtgttgttcgccagctaggcctggcctcgtcccgcttcgctcggtcggtctcgcgcgcccccatagccttgctagagggttagcgttagccttaagtgtgcgaatccgaggagcagcgacagactcgagaccacgctccttcctcgggaaggaggcggcacctcgcgtttgaggcccgcctgcgtttgaggcccgcctgcgcttgcggcccgcctgcgcttgaggcctgtctgcgtttgagatctcattgggcgtgattgaggaatttggggaggtttttgggcggtattgaggacgagggggtccgttagtcagcatagaatcctggagcgggaatccctcaccgtctaaatggcgtcgggggcgggacctccgggatctggcttccgcgggccgccgccggccctgaaacgtgagggatagctgagatgaggcagctactgggatggcccccatgcgcatttacatgcagtccgactgccgagctttcgaggcagcaggatttaccgtccacattcctcactactaaccaagcttttagaacagatctcacaagaacctagaggtcggtattttttcgatttaaatttgcctgttactgacgttaacgtctttcgcctagtgagcagtagccaacatgtcagggtgggagtcatattacaaaaccgagggcgatgaagaagcagaggaagaacaagaagagaaccttgaagcaagtggagactataaatattcaggaagagatagtttgatttttttggttgatgcctccaaggctatgtttgaatctcagagtgaagatgagttgacaccttttgacatgagcatccagtgtatccaaagtgtgtacatcagtaagatcataagcagtgatcgagatctcttggctgtggtgttctatggtaccgagaaagacaaaaattcagtgaattttaaaaatatttacgtcttacaggagctggataatccaggtgcaaaacgaattctagagcttgaccagtttaaggggcagcagggacaaaaacgtttccaagacatgatgggccacggatctgactactcactcagtgaagtgctgtgggtctgtgccaacctctttagtgatgtccaattcaagatgagtcataagaggatcatgctgttcaccaatgaagacaacccccatggcaatgacagtgccaaagccagccgggccaggaccaaagccggtgatctccgagatacaggcatcttccttgacttgatgcacctgaagaaacctgggggctttgacatatccttgttctacagagatatcatcagcatagcagaggatgaggacctcagggttcactttgaggaatccagcaagctagaagacctgttgcggaaggttcgcgccaaggagaccaggaagcgagcactcagcaggttaaagctgaagctcaacaaagatatagtgatctctgtgggcatttataatctggtccagaaggctctcaagcctcctccaataaagctctatcgggaaacaaatgaaccagtgaaaaccaagacccggacctttaatacaagtacaggcggtttgcttctgcctagcgataccaagaggtctcagatctatgggagtcgtcagattatactggagaaagaggaaacagaagagctaaaacggtttgatgatccaggtttgatgctcatgggtttcaagccgttggtactgctgaagaaacaccattacctgaggccctccctgttcgtgtacccagaggagtcgctggtgattgggagctcaaccctgttcagtgctctgctcatcaagtgtctggagaaggaggttgcagcattgtgcagatacacaccccgcaggaacatccctccttattttgtggctttggtgccacaggaagaagagttggatgaccagaaaattcaggtgactcctccaggcttccagctggtctttttaccctttgctgatgataaaaggaagatgccctttactgaaaaaatcatggcaactccagagcaggtgggcaagatgaaggctatcgttgagaagcttcgcttcacatacagaagtgacagctttgagaaccccgtgctgcagcagcacttcaggaacctggaggccttggccttggatttgatggagccggaacaagcagtggacctgacattgcccaaggttgaagcaatgaataaaagactgggctccttggtggatgagtttaaggagcttgtttacccaccagattacaatcctgaagggaaagttaccaagagaaaacacgataatgaaggttctggaagcaaaaggcccaaggtggagtattcagaagaggagctgaagacccacatcagcaagggtacgctgggcaagttcactgtgcccatgctgaaagaggcctgccgggcttacgggctgaagagtgggctgaagaagcaggagctgctggaagccctcaccaagcacttccaggactgaccagaggccgcgcgtccagctgcccttccgcagtgtggccaggctgcctggccttgtcctcagccagttaaaatgtgtttctcctgagctaggaagagtctacccgacataagtcgagggactttatgtttttgaggctttctgttgccatggtgatggtgtagccctcccactttgctgttccttactttactgcctgaataaagagccctaagtttgtacta

SEQ ID NO: 4609 - DNA, 2296 bp, Homo sapiens
  source 1..2296: mol_type = genomic DNA
gtaggaaggggcggggctttgccgaagggggcggggctctcgctgatgggttggctttcgtcagggacataggtagaagctggttggggagtgtgcgtgccagcctgacgcgatatagtgcgcacatgcgtgatgacgtagagggcgttgattgggaccgagtacagggcccgcgcatgcgtggattgtcgtcttctgtccaagttggtcgcttccctgcgccaaagtgagcagtagccaacatgtcagggtgggagtcatattacaaaaccgagggcgatgaagaagcagaggaagaacaagaagagaaccttgaagcaagtggagactataaatattcaggaagagatagtttgatttttttggttgatgcctccaaggctatgtttgaatctcagagtgaagatgagttgacaccttttgacatgagcatccagtgtatccaaagtgtgtacatcagtaagatcataagcagtgatcgagatctcttggctgtggtgttctatggtaccgagaaagacaaaaattcagtgaattttaaaaatatttacgtcttacaggagctggataatccaggtgcaaaacgaattctagagcttgaccagtttaaggggcagcagggacaaaaacgtttccaagacatgatgggccacggatctgactactcactcagtgaagtgctgtgggtctgtgccaacctctttagtgatgtccaattcaagatgagtcataagaggatcatgctgttcaccaatgaagacaacccccatggcaatgacagtgccaaagccagccgggccaggaccaaagccggtgatctccgagatacaggcatcttccttgacttgatgcacctgaagaaacctgggggctttgacatatccttgttctacagagatatcatcagcatagcagaggatgaggacctcagggttcactttgaggaatccagcaagctagaagacctgttgcggaaggttcgcgccaaggagaccaggaagcgagcactcagcaggttaaagctgaagctcaacaaagatatagtgatctctgtgggcatttataatctggtccagaaggctctcaagcctcctccaataaagctctatcgggaaacaaatgaaccagtgaaaaccaagacccggacctttaatacaagtacaggcggtttgcttctgcctagcgataccaagaggtctcagatctatgggagtcgtcagattatactggagaaagaggaaacagaagagctaaaacggtttgatgatccaggtttgatgctcatgggtttcaagccgttggtactgctgaagaaacaccattacctgaggccctccctgttcgtgtacccagaggagtcgctggtgattgggagctcaaccctgttcagtgctctgctcatcaagtgtctggagaaggaggttgcagcattgtgcagatacacaccccgcaggaacatccctccttattttgtggctttggtgccacaggaagaagagttggatgaccagaaaattcaggtgactcctccaggcttccagctggtctttttaccctttgctgatgataaaaggaagatgccctttactgaaaaaatcatggcaactccagagcaggtgggcaagatgaaggctatcgttgagaagcttcgcttcacatacagaagtgacagctttgagaaccccgtgctgcagcagcacttcaggaacctggaggccttggccttggatttgatggagccggaacaagcagtggacctgacattgcccaaggttgaagcaatgaataaaagactgggctccttggtggatgagtttaaggagcttgtttacccaccagattacaatcctgaagggaaagttaccaagagaaaacacgataatgaaggttctggaagcaaaaggcccaaggtggagtattcagaagaggagctgaagacccacatcagcaagggtacgctgggcaagttcactgtgcccatgctgaaagaggcctgccgggcttacgggctgaagagtgggctgaagaagcaggagctgctggaagccctcaccaagcacttccaggactgaccagaggccgcgcgtccagctgcccttccgcagtgtggccaggctgcctggccttgtcctcagccagttaaaatgtgtttctcctgagctaggaagagtctacccgacataagtcgagggactttatgtttttgaggctttctgttgccatggtgatggtgtagccctcccactttgctgttccttactttactgcctgaataaagagccctaagtttgtacta

SEQ ID NO: 4610 - DNA, 2025 bp, Homo sapiens
  source 1..2025: mol_type = genomic DNA
tcgcctagtgagcagtagccaacatgtcagggtgggagtcatattacaaaaccgagggcgatgaagaagcagaggaagaacaagaagagaaccttgaagcaagtggagactataaatattcaggaagagatagtttgatttttttggttgatgcctccaaggctatgtttgaatctcagagtgaagatgagttgacaccttttgacatgagcatccagtgtatccaaagtgtgtacatcagtaagatcataagcagtgatcgagatctcttggctgtggtgttctatggtaccgagaaagacaaaaattcagtgaattttaaaaatatttacgtcttacaggagctggataatccaggtgcaaaacgaattctagagcttgaccagtttaaggggcagcagggacaaaaacgtttccaagacatgatgggccacggatctgactactcactcagtgaagtgctgtgggtctgtgccaacctctttagtgatgtccaattcaagatgagtcataagaggatcatgctgttcaccaatgaagacaacccccatggcaatgacagtgccaaagccagccgggccaggaccaaagccggtgatctccgagatacaggcatcttccttgacttgatgcacctgaagaaacctgggggctttgacatatccttgttctacagagatatcatcagcatagcagaggatgaggacctcagggttcactttgaggaatccagcaagctagaagacctgttgcggaaggttcgcgccaaggagaccaggaagcgagcactcagcaggttaaagctgaagctcaacaaagatatagtgatctctgtgggcatttataatctggtccagaaggctctcaagcctcctccaataaagctctatcgggaaacaaatgaaccagtgaaaaccaagacccggacctttaatacaagtacaggcggtttgcttctgcctagcgataccaagaggtctcagatctatgggagtcgtcagattatactggagaaagaggaaacagaagagctaaaacggtttgatgatccaggtttgatgctcatgggtttcaagccgttggtactgctgaagaaacaccattacctgaggccctccctgttcgtgtacccagaggagtcgctggtgattgggagctcaaccctgttcagtgctctgctcatcaagtgtctggagaaggaggttgcagcattgtgcagatacacaccccgcaggaacatccctccttattttgtggctttggtgccacaggaagaagagttggatgaccagaaaattcaggtgactcctccaggcttccagctggtctttttaccctttgctgatgataaaaggaagatgccctttactgaaaaaatcatggcaactccagagcaggtgggcaagatgaaggctatcgttgagaagcttcgcttcacatacagaagtgacagctttgagaaccccgtgctgcagcagcacttcaggaacctggaggccttggccttggatttgatggagccggaacaagcagtggacctgacattgcccaaggttgaagcaatgaataaaagactgggctccttggtggatgagtttaaggagcttgtttacccaccagattacaatcctgaagggaaagttaccaagagaaaacacgcaaaaggcccaaggtggagtattcagaagaggagctgaagacccacatcagcaagggtacgctgggcaagttcactgtgcccatgctgaaagaggcctgccgggcttacgggctgaagagtgggctgaagaagcaggagctgctggaagccctcaccaagcacttccaggactgaccagaggccgcgcgtccagctgcccttccgcagtgtggccaggctgcctggccttgtcctcagccagttaaaatgtgtttctcctgagctaggaagagtctacccgacataagtcgagggactttatgtttttgaggctttctgttgccatggtgatggtgtagccctcccactttgctgttccttacttt

SEQ ID NO: 4611 - DNA, 1998 bp, Homo sapiens
  source 1..1998: mol_type = genomic DNA
atgcgtggattgtcgtcttctgtccaagttggtcgcttccctgcgccaaagtgagcagtagccaacatgtcagggtgggagtcatattacaaaaccgagggcgatgaagaagcagaggaagaacaagaagagaaccttgaagcaagtggagactataaatattcaggaagagatagtttgatttttttggttgatgcctccaaggctatgtttgaatctcagagtgaagatgagttgacaccttttgacatgagcatccaggagctggataatccaggtgcaaaacgaattctagagcttgaccagtttaaggggcagcagggacaaaaacgtttccaagacatgatgggccacggatctgactactcactcagtgaagtgctgtgggtctgtgccaacctctttagtgatgtccaattcaagatgagtcataagaggatcatgctgttcaccaatgaagacaacccccatggcaatgacagtgccaaagccagccgggccaggaccaaagccggtgatctccgagatacaggcatcttccttgacttgatgcacctgaagaaacctgggggctttgacatatccttgttctacagagatatcatcagcatagcagaggatgaggacctcagggttcactttgaggaatccagcaagctagaagacctgttgcggaaggttcgcgccaaggagaccaggaagcgagcactcagcaggttaaagctgaagctcaacaaagatatagtgatctctgtgggcatttataatctggtccagaaggctctcaagcctcctccaataaagctctatcgggaaacaaatgaaccagtgaaaaccaagacccggacctttaatacaagtacaggcggtttgcttctgcctagcgataccaagaggtctcagatctatgggagtcgtcagattatactggagaaagaggaaacagaagagctaaaacggtttgatgatccaggtttgatgctcatgggtttcaagccgttggtactgctgaagaaacaccattacctgaggccctccctgttcgtgtacccagaggagtcgctggtgattgggagctcaaccctgttcagtgctctgctcatcaagtgtctggagaaggaggttgcagcattgtgcagatacacaccccgcaggaacatccctccttattttgtggctttggtgccacaggaagaagagttggatgaccagaaaattcaggtgactcctccaggcttccagctggtctttttaccctttgctgatgataaaaggaagatgccctttactgaaaaaatcatggcaactccagagcaggtgggcaagatgaaggctatcgttgagaagcttcgcttcacatacagaagtgacagctttgagaaccccgtgctgcagcagcacttcaggaacctggaggccttggccttggatttgatggagccggaacaagcagtggacctgacattgcccaaggttgaagcaatgaataaaagactgggctccttggtggatgagtttaaggagcttgtttacccaccagattacaatcctgaagggaaagttaccaagagaaaacacgataatgaaggttctggaagcaaaaggcccaaggtggagtattcagaagaggagctgaagacccacatcagcaagggtacgctgggcaagttcactgtgcccatgctgaaagaggcctgccgggcttacgggctgaagagtgggctgaagaagcaggagctgctggaagccctcaccaagcacttccaggactgaccagaggccgcgcgtccagctgcccttccgcagtgtggccaggctgcctggccttgtcctcagccagttaaaatgtgtttctcctgagctaggaagagtctacccgacataagtcgagggactttatgtttttgaggctttctgttgccatggtgatggtgtagccctcccactttgctgttccttactttactgcctgaataaagagccctaagtttgtactat

SEQ ID NO: 4612 - DNA, 1958 bp, Homo sapiens
  source 1..1958: mol_type = genomic DNA
cgcctagtgagcagtagccaacatgtcagggtgggagtcatattacaaaaccgagggcgatgaagaagcagaggaagaacaagaagagaaccttgaagcaagtgtgtatccaaagtgtgtacatcagtaagatcataagcagtgatcgagatctcttggctgtggtgttctatggtaccgagaaagacaaaaattcagtgaattttaaaaatatttacgtcttacaggagctggataatccaggtgcaaaacgaattctagagcttgaccagtttaaggggcagcagggacaaaaacgtttccaagacatgatgggccacggatctgactactcactcagtgaagtgctgtgggtctgtgccaacctctttagtgatgtccaattcaagatgagtcataagaggatcatgctgttcaccaatgaagacaacccccatggcaatgacagtgccaaagccagccgggccaggaccaaagccggtgatctccgagatacaggcatcttccttgacttgatgcacctgaagaaacctgggggctttgacatatccttgttctacagagatatcatcagcatagcagaggatgaggacctcagggttcactttgaggaatccagcaagctagaagacctgttgcggaaggttcgcgccaaggagaccaggaagcgagcactcagcaggttaaagctgaagctcaacaaagatatagtgatctctgtgggcatttataatctggtccagaaggctctcaagcctcctccaataaagctctatcgggaaacaaatgaaccagtgaaaaccaagacccggacctttaatacaagtacaggcggtttgcttctgcctagcgataccaagaggtctcagatctatgggagtcgtcagattatactggagaaagaggaaacagaagagctaaaacggtttgatgatccaggtttgatgctcatgggtttcaagccgttggtactgctgaagaaacaccattacctgaggccctccctgttcgtgtacccagaggagtcgctggtgattgggagctcaaccctgttcagtgctctgctcatcaagtgtctggagaaggaggttgcagcattgtgcagatacacaccccgcaggaacatccctccttattttgtggctttggtgccacaggaagaagagttggatgaccagaaaattcaggtgactcctccaggcttccagctggtctttttaccctttgctgatgataaaaggaagatgccctttactgaaaaaatcatggcaactccagagcaggtgggcaagatgaaggctatcgttgagaagcttcgcttcacatacagaagtgacagctttgagaaccccgtgctgcagcagcacttcaggaacctggaggccttggccttggatttgatggagccggaacaagcagtggacctgacattgcccaaggttgaagcaatgaataaaagactgggctccttggtggatgagtttaaggagcttgtttacccaccagattacaatcctgaagggaaagttaccaagagaaaacacgataatgaaggttctggaagcaaaaggcccaaggtggagtattcagaagaggagctgaagacccacatcagcaagggtacgctgggcaagttcactgtgcccatgctgaaagaggcctgccgggcttacgggctgaagagtgggctgaagaagcaggagctgctggaagccctcaccaagcacttccaggactgaccagaggccgcgcgtccagctgcccttccgcagtgtggccaggctgcctggccttgtcctcagccagttaaaatgtgtttctcctgagctaggaagagtctacccgacataagtcgagggactttatgtttttgaggctttctgttgccatggtgatggtgtagccctcccactttgctgttccttactttactgcctgaataaagagccctaagtttg

SEQ ID NO: 4613 - DNA, 2200 bp, Homo sapiens
  source 1..2200: mol_type = genomic DNA
aagtgtgcgaatccgaggagcagcgacagactcgagaccacgctccttcctcgggaaggaggcggcacctcgcgtttgaggcccgcctgcgtttgaggcccgcctgcgcttgcggcccgcctgcgcttgagtgagcagtagccaacatgtcagggtgggagtcatattacaaaaccgagggcgatgaagaagcagaggaagaacaagaagagaaccttgaagcaagtggagactataaatattcaggaagagatagtttgatttttttggttgatgcctccaaggctatgtttgaatctcagagtgaagatgagttgacaccttttgacatgagcatccagtgtatccaaagtgtgtacatcagtaagatcataagcagtgatcgagatctcttggctgtggtgttctatggtaccgagaaagacaaaaattcagtgaattttaaaaatatttacgtcttacaggagctggataatccaggtgcaaaacgaattctagagcttgaccagtttaaggggcagcagggacaaaaacgtttccaagacatgatgggccacggatctgactactcactcagtgaagtgctgtgggtctgtgccaacctctttagtgatgtccaattcaagatgagtcataagaggatcatgctgttcaccaatgaagacaacccccatggcaatgacagtgccaaagccagccgggccaggaccaaagccggtgatctccgagatacaggcatcttccttgacttgatgcacctgaagaaacctgggggctttgacatatccttgttctacagagatatcatcagcatagcagaggatgaggacctcagggttcactttgaggaatccagcaagctagaagacctgttgcggaaggttcgcgccaaggagaccaggaagcgagcactcagcaggttaaagctgaagctcaacaaagatatagtgatctctgtgggcatttataatctggtccagaaggctctcaagcctcctccaataaagctctatcgggaaacaaatgaaccagtgaaaaccaagacccggacctttaatacaagtacaggcggtttgcttctgcctagcgataccaagaggtctcagatctatgggagtcgtcagattatactggagaaagaggaaacagaagagctaaaacggtttgatgatccaggtttgatgctcatgggtttcaagccgttggtactgctgaagaaacaccattacctgaggccctccctgttcgtgtacccagaggagtcgctggtgattgggagctcaaccctgttcagtgctctgctcatcaagtgtctggagaaggaggttgcagcattgtgcagatacacaccccgcaggaacatccctccttattttgtggctttggtgccacaggaagaagagttggatgaccagaaaattcaggtgactcctccaggcttccagctggtctttttaccctttgctgatgataaaaggaagatgccctttactgaaaaaatcatggcaactccagagcaggtgggcaagatgaaggctatcgttgagaagcttcgcttcacatacagaagtgacagctttgagaaccccgtgctgcagcagcacttcaggaacctggaggccttggccttggatttgatggagccggaacaagcagtggacctgacattgcccaaggttgaagcaatgaataaaagactgggctccttggtggatgagtttaaggagcttgtttacccaccagattacaatcctgaagggaaagttaccaagagaaaacacgataatgaaggttctggaagcaaaaggcccaaggtggagtattcagaagaggagctgaagacccacatcagcaagggtacgctgggcaagttcactgtgcccatgctgaaagaggcctgccgggcttacgggctgaagagtgggctgaagaagcaggagctgctggaagccctcaccaagcacttccaggactgaccagaggccgcgcgtccagctgcccttccgcagtgtggccaggctgcctggccttgtcctcagccagttaaaatgtgtttctcctgagctaggaagagtctacccgacataagtcgagggactttatgtttttgaggctttctgttgccatggtgatggtgtagccctcccactttgctgttccttactttactgcctgaataaagagccctaagtttgtacta

SEQ ID NO: 4614 - DNA, 1995 bp, Homo sapiens
  source 1..1995: mol_type = genomic DNA
gtcgtcttctgtccaagttggtcgcttccctgcgccaaagtgagcagtagccaacatgtcagggtgggagtcatattacaaaaccgagggcgatgaagaagcagaggaagaacaagaagagaaccttgaagcaagtgtgtatccaaagtgtgtacatcagtaagatcataagcagtgatcgagatctcttggctgtggtgttctatggtaccgagaaagacaaaaattcagtgaattttaaaaatatttacgtcttacaggagctggataatccaggtgcaaaacgaattctagagcttgaccagtttaaggggcagcagggacaaaaacgtttccaagacatgatgggccacggatctgactactcactcagtgaagtgctgtgggtctgtgccaacctctttagtgatgtccaattcaagatgagtcataagaggatcatgctgttcaccaatgaagacaacccccatggcaatgacagtgccaaagccagccgggccaggaccaaagccggtgatctccgagatacaggcatcttccttgacttgatgcacctgaagaaacctgggggctttgacatatccttgttctacagagatatcatcagcatagcagaggatgaggacctcagggttcactttgaggaatccagcaagctagaagacctgttgcggaaggttcgcgccaaggagaccaggaagcgagcactcagcaggttaaagctgaagctcaacaaagatatagtgatctctgtgggcatttataatctggtccagaaggctctcaagcctcctccaataaagctctatcgggaaacaaatgaaccagtgaaaaccaagacccggacctttaatacaagtacaggcggtttgcttctgcctagcgataccaagaggtctcagatctatgggagtcgtcagattatactggagaaagaggaaacagaagagctaaaacggtttgatgatccaggtttgatgctcatgggtttcaagccgttggtactgctgaagaaacaccattacctgaggccctccctgttcgtgtacccagaggagtcgctggtgattgggagctcaaccctgttcagtgctctgctcatcaagtgtctggagaaggaggttgcagcattgtgcagatacacaccccgcaggaacatccctccttattttgtggctttggtgccacaggaagaagagttggatgaccagaaaattcaggtgactcctccaggcttccagctggtctttttaccctttgctgatgataaaaggaagatgccctttactgaaaaaatcatggcaactccagagcaggtgggcaagatgaaggctatcgttgagaagcttcgcttcacatacagaagtgacagctttgagaaccccgtgctgcagcagcacttcaggaacctggaggccttggccttggatttgatggagccggaacaagcagtggacctgacattgcccaaggttgaagcaatgaataaaagactgggctccttggtggatgagtttaaggagcttgtttacccaccagattacaatcctgaagggaaagttaccaagagaaaacacgataatgaaggttctggaagcaaaaggcccaaggtggagtattcagaagaggagctgaagacccacatcagcaagggtacgctgggcaagttcactgtgcccatgctgaaagaggcctgccgggcttacgggctgaagagtgggctgaagaagcaggagctgctggaagccctcaccaagcacttccaggactgaccagaggccgcgcgtccagctgcccttccgcagtgtggccaggctgcctggccttgtcctcagccagttaaaatgtgtttctcctgagctaggaagagtctacccgacataagtcgagggactttatgtttttgaggctttctgttgccatggtgatggtgtagccctcccactttgctgttccttactttactgcctgaataaagagccctaagtttgtact

SEQ ID NO: 4615 - DNA, 1245 bp, Homo sapiens
  source 1..1245: mol_type = genomic DNA
ggctgcccttcttccctgcggagggagggcctgggcggtcgcgttggcgggagggaggttacctttcccagtctcgctctggccgcctgagccaggaggaagcagcggcgaggtctgcgggaggcatggcgggagctccggacgagcgccggcggggccccgcggcaggggagcagctgcagcagcaacacgtctcttgccaggtcttccccgagcgtctggcccaggggaatccccagcaagggttcttctccagcttcttcaccagcaaccagaagtgccagcttaggctcctgaagacgctggagacaaatccatatgtcaaacttctgcttgatgctatgaaacactcaggttgtgctgttaacaaagatagacacttttcttgcgaagactgtaatggaaatgtcagtggaggttttgatgcttcaacatctcagatagttttgtgccagaataatatccataatcaggcccatatgaacagagtggtcacacacgagcttattcatgcatttgatcattgtcgtgcccatgtcgactggttcaccaacatcagacatttggcgtgctcagaggttcgagctgctaaccttagtggagactgctcacttgtcaatgaaatattcaggttacattttggattaaaacaacaccaccagacttgtgtgcgagacagagccactctttctatcctggctgttaggaatatcagcaaagaagtagctaaaaaggctgttgatgaagtttttgaatcttgtttcaatgaccatgaaccttttggaaggatcccacataacaagacttatgcaagatatgctcacagagactttgaaaaccgtgatcggtattattcaaatatatgagcacaatgacatttttatattacagagcttccatcatcatgaagaaaaaaaaatttggttctcaagtgaacaaacatataaaatgtaaacaatccctacaatccagataaaacagagaagactgtgattctagcatattatcagaaaaagtaactatggcaaaaaatgaaactgctttaaactccaaggcagaaattgtatctttatagctaaccatttagtaaataaatacattacatttttgtattttagtcatttgtttttattacatgtgattattttaaaatttgattatgaaacctgtgaagtgtgctcttccatgatgttgataggtgaccactgttggtatttacattaaatgtaaagaaatgtgtactga

SEQ ID NO: 4616 - DNA, 5386 bp, Homo sapiens
  source 1..5386: mol_type = genomic DNA
gccgccgccagggaaaagaaagggaggaaggaaggaacaagaaaaggaaataaagagaaaggggaggcggggaaaggcaacgagctgtccggcctccgtcaagggagttggagggaaaaagttctcaggcgccgcaggtccgagtgcctcgcagcccctcccgaggcgcagccgccagaccagtggagccggggcgcagggcgggggcggaggcgccggggcgggggatgcggggccgcggcgcagccccccggccctgagagcgaggacagcgccgcccggcccgcagccgtcgccgcttctccacctcggcccgtggagccggggcgtccgggcgtagccctcgctcgcctgggtcagggggtgcgcgtcgggggaggcagaagccatggatcccgggcagcagccgccgcctcaaccggccccccagggccaagggcagccgccttcgcagcccccgcaggggcagggcccgccgtccggacccgggcaaccggcacccgcggcgacccaggcggcgccgcaggcaccccccgccgggcatcagatcgtgcacgtccgcggggactcggagaccgacctggaggcgctcttcaacgccgtcatgaaccccaagacggccaacgtgccccagaccgtgcccatgaggctccggaagctgcccgactccttcttcaagccgccggagcccaaatcccactcccgacaggccagtactgatgcaggcactgcaggagccctgactccacagcatgttcgagctcattcctctccagcttctctgcagttgggagctgtttctcctgggacactgacccccactggagtagtctctggcccagcagctacacccacagctcagcatcttcgacagtcttcttttgagatacctgatgatgtacctctgccagcaggttgggagatggcaaagacatcttctggtcagagatacttcttaaatcacatcgatcagacaacaacatggcaggaccccaggaaggccatgctgtcccagatgaacgtcacagcccccaccagtccaccagtgcagcagaatatgatgaactcggcttcaggtcctcttcctgatggatgggaacaagccatgactcaggatggagaaatttactatataaaccataagaacaagaccacctcttggctagacccaaggcttgaccctcgttttgccatgaaccagagaatcagtcagagtgctccagtgaaacagccaccacccctggctccccagagcccacagggaggcgtcatgggtggcagcaactccaaccagcagcaacagatgcgactgcagcaactgcagatggagaaggagaggctgcggctgaaacagcaagaactgcttcggcaggcaatgcggaatatcaatcccagcacagcaaattctccaaaatgtcaggagttagccctgcgtagccagttaccaacactggagcaggatggtgggactcaaaatccagtgtcttctcccgggatgtctcaggaattgagaacaatgacgaccaatagctcagatcctttccttaacagtggcacctatcactctcgagatgagagtacagacagtggactaagcatgagcagctacagtgtccctcgaaccccagatgacttcctgaacagtgtggatgagatggatacaggtgatactatcaaccaaagcaccctgccctcacagcagaaccgtttcccagactaccttgaagccattcctgggacaaatgtggaccttggaacactggaaggagatggaatgaacatagaaggagaggagctgatgccaagtctgcaggaagctttgagttctgacatccttaatgacatggagtctgttttggctgccaccaagctagataaagaaagctttcttacatggttatagagccctcaggcagactgaattctaaatctgtgaaggatctaaggagacacatgcaccggaaatttccataagccagttgcagttttcaggctaatacagaaaaagatgaacaaacgtccagcaagatactttaatcctctattttgctcttccttgtccattgctgctgttaatgtattgctgacctctttcacagttggctctaaagaatcaaaagaaaaaaactttttatttcttttgctattaaaactactgttcattttgggggctgggggaagtgagcctgtttggatgatggatgccattccttttgcccagttaaatgttcaccaatcattttaactaaatactcagacttagaagtcagatgcttcatgtcacagcatttagtttgttcaacagttgtttcttcagcttcctttgtccagtggaaaaacatgatttactggtctgacaagccaaaaatgttatatctgatattaaatacttaatgctgatttgaagagatagctgaaaccaaggctgaagactgttttactttcagtattttcttttcctcctagtgctatcattagtcacataatgaccttgattttattttaggagcttataaggcatgagacaatttccatataaatatattaattattgccacatactctaatatagattttggtggataattttgtgggtgtgcattttgttctgttttgttgggttttttgttttttttgtttttggcagggtcggtgggggggttggttggttggttggttttgtcggaacctaggcaaatgaccatattagtgaatctgttaatagttgtagcttgggatggttattgtagttgttttggtaaaatcttcatttcctggttttttttaccaccttatttaaatctcgattatctgctctctcttttatatacatacacacacccaaacataacatttataatagtgtggtagtggaatgtatccttttttaggtttccctgctttccagttaatttttaaaatggtagcgctttgtatgcatttagaatacatgactagtagtttatatttcactggtagtttaaatctggttggggcagtctgcagatgtttgaagtagtttagtgttctagaaagagctattactgtggatagtgcctaggggagtgctccacgccctctgggcatacggtagatattatctgatgaattggaaaggagcaaaccagaaatggctttattttctcccttggactaatttttaagtctcgattggaattcagtgagtaggttcataatgtgcatgacagaaataagctttatagtggtttaccttcatttagctttggaagttttctttgccttagttttggaagtaaattctagtttgtagttctcatttgtaatgaacacattaacgactagattaaaatattgccttcaagattgttcttacttacaagacttgctcctacttctatgctgaaaattgaccctggatagaatactataaggttttgagttagctggaaaagtgatcagattaataaatgtatattggtagttgaatttagcaaagaaatagagataatcatgattatacctttatttttacaggaagagatgatgtaactagagtatgtgtctacaggagtaataatggtttccaaagagtattttttaaaggaacaaaacgagcatgaattaactcttcaatataagctatgaagtaatagttggttgtgaattaaagtggcaccagctagcacctctgtgttttaagggtctttcaatgtttctagaataagcccttattttcaagggttcataacaggcataaaatctcttctcctggcaaaagctgctatgaaaagcctcagcttgggaagatagatttttttccccccaattacaaaatctaagtattttggcccttcaatttggaggagggcaaaagttggaagtaagaagttttattttaagtactttcagtgctcaaaaaaatgcaatcactgtgttgtatataatagttcataggttgatcactcataataattgactctaaggcttttattaagaaaacagcagaaagattaaatcttgaattaagtctggggggaaatggccactgcagatggagttttagagtagtaatgaaattctacctagaatgcaaaattgggtatatgaattacatagcatgttgttgggattttttttaatgtgcagaagatcaaagctacttggaaggagtgcctataatttgccagtagccacagattaagattatatcttatatatcagcagattagctttagcttagggggagggtgggaaagtttggggggggggttgtgaagatttagggggaccttgatagagaactttataaacttctttctctttaataaagacttgtcttacaccgtgctgccattaaaggcagctgttctagagtttcagtcacctaagtacacccacaaaacaatatgaatatggagatcttcctttacccctcaactttaatttgcccagttatacctcagtgttgtagcagtactgtgatacctggcacagtgctttgatcttacgatgccctctgtactgacctgaaggagacctaagagtcctttccctttttgagtttgaatcatagccttgatgtggtctcttgttttatgtccttgttcctaatgtaaaagtgcttaactgcttcttggttgtattgggtagcattgggataagattttaactgggtattcttgaattgcttttacaataaaccaattttataatctttaaatttatcaactttttacatttgtgttattttcagtcagggcttcttagatctacttatggttgatggagcacattgatttggagtttcagatcttccaaagcactatttgttgtaataacttttctaaatgtagtgcctttaaaggaaaaatgaacacagggaagtgactttgctacaaataatgttgctgtgttaagtattcatattaaatacatgccttctatatggaacatggcagaaagactgaaaaataacagtaattaattgtgtaattcagaattcataccaatcagtgttgaaactcaaacattgcaaaagtgggtggcaatattcagtgcttaacacttttctagcgttggtacatctgagaaatgagtgctcaggtggattttatcctcgcaagcatgttgttataagaattgtgggtgtgcctatcataacaattgttttctgtatcttgaaaaagtattctccacattttaaatgttttatattagagaattctttaatgcacacttgtcaaatatatatatatagtaccaatgttacctttttattttttgttttagatgtaagagcatgctcatatgttaggtacttacataaattgttacattattttttcttatgtaatacctttttgtttgtttatgtggttcaaatatattctttccttaaactctt

SEQ ID NO: 4617 - DNA, 5218 bp, Homo sapiens
  source 1..5218: mol_type = genomic DNA
aaagggaggaaggaaggaacaagaaaaggaaataaagagaaaggggaggcggggaaaggcaacgagctgtccggcctccgtcaagggagttggagggaaaaagttctcaggcgccgcaggtccgagtgcctcgcagcccctcccgaggcgcagccgccagaccagtggagccggggcgcagggcgggggcggaggcgccggggcgggggatgcggggccgcggcgcagccccccggccctgagagcgaggacagcgccgcccggcccgcagccgtcgccgcttctccacctcggcccgtggagccggggcgtccgggcgtagccctcgctcgcctgggtcagggggtgcgcgtcgggggaggcagaagccatggatcccgggcagcagccgccgcctcaaccggccccccagggccaagggcagccgccttcgcagcccccgcaggggcagggcccgccgtccggacccgggcaaccggcacccgcggcgacccaggcggcgccgcaggcaccccccgccgggcatcagatcgtgcacgtccgcggggactcggagaccgacctggaggcgctcttcaacgccgtcatgaaccccaagacggccaacgtgccccagaccgtgcccatgaggctccggaagctgcccgactccttcttcaagccgccggagcccaaatcccactcccgacaggccagtactgatgcaggcactgcaggagccctgactccacagcatgttcgagctcattcctctccagcttctctgcagttgggagctgtttctcctgggacactgacccccactggagtagtctctggcccagcagctacacccacagctcagcatcttcgacagtcttcttttgagatacctgatgatgtacctctgccagcaggttgggagatggcaaagacatcttctggtcagagatacttcttaaatcacatcgatcagacaacaacatggcaggaccccaggaaggccatgctgtcccagatgaacgtcacagcccccaccagtccaccagtgcagcagaatatgatgaactcggcttcagccatgaaccagagaatcagtcagagtgctccagtgaaacagccaccacccctggctccccagagcccacagggaggcgtcatgggtggcagcaactccaaccagcagcaacagatgcgactgcagcaactgcagatggagaaggagaggctgcggctgaaacagcaagaactgcttcggcaggtgaggccacaggagttagccctgcgtagccagttaccaacactggagcaggatggtgggactcaaaatccagtgtcttctcccgggatgtctcaggaattgagaacaatgacgaccaatagctcagatcctttccttaacagtggcacctatcactctcgagatgagagtacagacagtggactaagcatgagcagctacagtgtccctcgaaccccagatgacttcctgaacagtgtggatgagatggatacaggtgatactatcaaccaaagcaccctgccctcacagcagaaccgtttcccagactaccttgaagccattcctgggacaaatgtggaccttggaacactggaaggagatggaatgaacatagaaggagaggagctgatgccaagtctgcaggaagctttgagttctgacatccttaatgacatggagtctgttttggctgccaccaagctagataaagaaagctttcttacatggttatagagccctcaggcagactgaattctaaatctgtgaaggatctaaggagacacatgcaccggaaatttccataagccagttgcagttttcaggctaatacagaaaaagatgaacaaacgtccagcaagatactttaatcctctattttgctcttccttgtccattgctgctgttaatgtattgctgacctctttcacagttggctctaaagaatcaaaagaaaaaaactttttatttcttttgctattaaaactactgttcattttgggggctgggggaagtgagcctgtttggatgatggatgccattccttttgcccagttaaatgttcaccaatcattttaactaaatactcagacttagaagtcagatgcttcatgtcacagcatttagtttgttcaacagttgtttcttcagcttcctttgtccagtggaaaaacatgatttactggtctgacaagccaaaaatgttatatctgatattaaatacttaatgctgatttgaagagatagctgaaaccaaggctgaagactgttttactttcagtattttcttttcctcctagtgctatcattagtcacataatgaccttgattttattttaggagcttataaggcatgagacaatttccatataaatatattaattattgccacatactctaatatagattttggtggataattttgtgggtgtgcattttgttctgttttgttgggttttttgttttttttgtttttggcagggtcggtgggggggttggttggttggttggttttgtcggaacctaggcaaatgaccatattagtgaatctgttaatagttgtagcttgggatggttattgtagttgttttggtaaaatcttcatttcctggttttttttaccaccttatttaaatctcgattatctgctctctcttttatatacatacacacacccaaacataacatttataatagtgtggtagtggaatgtatccttttttaggtttccctgctttccagttaatttttaaaatggtagcgctttgtatgcatttagaatacatgactagtagtttatatttcactggtagtttaaatctggttggggcagtctgcagatgtttgaagtagtttagtgttctagaaagagctattactgtggatagtgcctaggggagtgctccacgccctctgggcatacggtagatattatctgatgaattggaaaggagcaaaccagaaatggctttattttctcccttggactaatttttaagtctcgattggaattcagtgagtaggttcataatgtgcatgacagaaataagctttatagtggtttaccttcatttagctttggaagttttctttgccttagttttggaagtaaattctagtttgtagttctcatttgtaatgaacacattaacgactagattaaaatattgccttcaagattgttcttacttacaagacttgctcctacttctatgctgaaaattgaccctggatagaatactataaggttttgagttagctggaaaagtgatcagattaataaatgtatattggtagttgaatttagcaaagaaatagagataatcatgattatacctttatttttacaggaagagatgatgtaactagagtatgtgtctacaggagtaataatggtttccaaagagtattttttaaaggaacaaaacgagcatgaattaactcttcaatataagctatgaagtaatagttggttgtgaattaaagtggcaccagctagcacctctgtgttttaagggtctttcaatgtttctagaataagcccttattttcaagggttcataacaggcataaaatctcttctcctggcaaaagctgctatgaaaagcctcagcttgggaagatagatttttttccccccaattacaaaatctaagtattttggcccttcaatttggaggagggcaaaagttggaagtaagaagttttattttaagtactttcagtgctcaaaaaaatgcaatcactgtgttgtatataatagttcataggttgatcactcataataattgactctaaggcttttattaagaaaacagcagaaagattaaatcttgaattaagtctggggggaaatggccactgcagatggagttttagagtagtaatgaaattctacctagaatgcaaaattgggtatatgaattacatagcatgttgttgggattttttttaatgtgcagaagatcaaagctacttggaaggagtgcctataatttgccagtagccacagattaagattatatcttatatatcagcagattagctttagcttagggggagggtgggaaagtttggggggggggttgtgaagatttagggggaccttgatagagaactttataaacttctttctctttaataaagacttgtcttacaccgtgctgccattaaaggcagctgttctagagtttcagtcacctaagtacacccacaaaacaatatgaatatggagatcttcctttacccctcaactttaatttgcccagttatacctcagtgttgtagcagtactgtgatacctggcacagtgctttgatcttacgatgccctctgtactgacctgaaggagacctaagagtcctttccctttttgagtttgaatcatagccttgatgtggtctcttgttttatgtccttgttcctaatgtaaaagtgcttaactgcttcttggttgtattgggtagcattgggataagattttaactgggtattcttgaattgcttttacaataaaccaattttataatctttaaatttatcaactttttacatttgtgttattttcagtcagggcttcttagatctacttatggttgatggagcacattgatttggagtttcagatcttccaaagcactatttgttgtaataacttttctaaatgtagtgcctttaaaggaaaaatgaacacagggaagtgactttgctacaaataatgttgctgtgttaagtattcatattaaatacatgccttctatatggaacatggcagaaagactgaaaaataacagtaattaattgtgtaattcagaattcataccaatcagtgttgaaactcaaacattgcaaaagtgggtggcaatattcagtgcttaacacttttctagcgttggtacatctgagaaatgagtgctcaggtggattttatcctcgcaagcatgttgttataagaattgtgggtgtgcctatcataacaattgttttctgtatcttgaaaaagtattctccacattttaaatgttttatattagagaattctttaatgcacacttgtcaaatatatatatatagtaccaatgttacctttttattttttgttttagatgtaagagcatgctcatatgttaggtacttacataaattgttacattattttttcttatgtaatacctttttgtttgtttatgtggttcaaatatattctttccttaaactctt

SEQ ID NO: 4618 - DNA, 5374 bp, Homo sapiens
  source 1..5374: mol_type = genomic DNA
aaagggaggaaggaaggaacaagaaaaggaaataaagagaaaggggaggcggggaaaggcaacgagctgtccggcctccgtcaagggagttggagggaaaaagttctcaggcgccgcaggtccgagtgcctcgcagcccctcccgaggcgcagccgccagaccagtggagccggggcgcagggcgggggcggaggcgccggggcgggggatgcggggccgcggcgcagccccccggccctgagagcgaggacagcgccgcccggcccgcagccgtcgccgcttctccacctcggcccgtggagccggggcgtccgggcgtagccctcgctcgcctgggtcagggggtgcgcgtcgggggaggcagaagccatggatcccgggcagcagccgccgcctcaaccggccccccagggccaagggcagccgccttcgcagcccccgcaggggcagggcccgccgtccggacccgggcaaccggcacccgcggcgacccaggcggcgccgcaggcaccccccgccgggcatcagatcgtgcacgtccgcggggactcggagaccgacctggaggcgctcttcaacgccgtcatgaaccccaagacggccaacgtgccccagaccgtgcccatgaggctccggaagctgcccgactccttcttcaagccgccggagcccaaatcccactcccgacaggccagtactgatgcaggcactgcaggagccctgactccacagcatgttcgagctcattcctctccagcttctctgcagttgggagctgtttctcctgggacactgacccccactggagtagtctctggcccagcagctacacccacagctcagcatcttcgacagtcttcttttgagatacctgatgatgtacctctgccagcaggttgggagatggcaaagacatcttctggtcagagatacttcttaaatcacatcgatcagacaacaacatggcaggaccccaggaaggccatgctgtcccagatgaacgtcacagcccccaccagtccaccagtgcagcagaatatgatgaactcggcttcaggtcctcttcctgatggatgggaacaagccatgactcaggatggagaaatttactatataaaccataagaacaagaccacctcttggctagacccaaggcttgaccctcgttttggtaaagccatgaaccagagaatcagtcagagtgctccagtgaaacagccaccacccctggctccccagagcccacagggaggcgtcatgggtggcagcaactccaaccagcagcaacagatgcgactgcagcaactgcagatggagaaggagaggctgcggctgaaacagcaagaactgcttcggcaggcaatgcggaatatcaatcccagcacagcaaattctccaaaatgtcaggagttagccctgcgtagccagttaccaacactggagcaggatggtgggactcaaaatccagtgtcttctcccgggatgtctcaggaattgagaacaatgacgaccaatagctcagatcctttccttaacagtggcacctatcactctcgagatgagagtacagacagtggactaagcatgagcagctacagtgtccctcgaaccccagatgacttcctgaacagtgtggatgagatggatacaggtgatactatcaaccaaagcaccctgccctcacagcagaaccgtttcccagactaccttgaagccattcctgggacaaatgtggaccttggaacactggaaggagatggaatgaacatagaaggagaggagctgatgccaagtctgcaggaagctttgagttctgacatccttaatgacatggagtctgttttggctgccaccaagctagataaagaaagctttcttacatggttatagagccctcaggcagactgaattctaaatctgtgaaggatctaaggagacacatgcaccggaaatttccataagccagttgcagttttcaggctaatacagaaaaagatgaacaaacgtccagcaagatactttaatcctctattttgctcttccttgtccattgctgctgttaatgtattgctgacctctttcacagttggctctaaagaatcaaaagaaaaaaactttttatttcttttgctattaaaactactgttcattttgggggctgggggaagtgagcctgtttggatgatggatgccattccttttgcccagttaaatgttcaccaatcattttaactaaatactcagacttagaagtcagatgcttcatgtcacagcatttagtttgttcaacagttgtttcttcagcttcctttgtccagtggaaaaacatgatttactggtctgacaagccaaaaatgttatatctgatattaaatacttaatgctgatttgaagagatagctgaaaccaaggctgaagactgttttactttcagtattttcttttcctcctagtgctatcattagtcacataatgaccttgattttattttaggagcttataaggcatgagacaatttccatataaatatattaattattgccacatactctaatatagattttggtggataattttgtgggtgtgcattttgttctgttttgttgggttttttgttttttttgtttttggcagggtcggtgggggggttggttggttggttggttttgtcggaacctaggcaaatgaccatattagtgaatctgttaatagttgtagcttgggatggttattgtagttgttttggtaaaatcttcatttcctggttttttttaccaccttatttaaatctcgattatctgctctctcttttatatacatacacacacccaaacataacatttataatagtgtggtagtggaatgtatccttttttaggtttccctgctttccagttaatttttaaaatggtagcgctttgtatgcatttagaatacatgactagtagtttatatttcactggtagtttaaatctggttggggcagtctgcagatgtttgaagtagtttagtgttctagaaagagctattactgtggatagtgcctaggggagtgctccacgccctctgggcatacggtagatattatctgatgaattggaaaggagcaaaccagaaatggctttattttctcccttggactaatttttaagtctcgattggaattcagtgagtaggttcataatgtgcatgacagaaataagctttatagtggtttaccttcatttagctttggaagttttctttgccttagttttggaagtaaattctagtttgtagttctcatttgtaatgaacacattaacgactagattaaaatattgccttcaagattgttcttacttacaagacttgctcctacttctatgctgaaaattgaccctggatagaatactataaggttttgagttagctggaaaagtgatcagattaataaatgtatattggtagttgaatttagcaaagaaatagagataatcatgattatacctttatttttacaggaagagatgatgtaactagagtatgtgtctacaggagtaataatggtttccaaagagtattttttaaaggaacaaaacgagcatgaattaactcttcaatataagctatgaagtaatagttggttgtgaattaaagtggcaccagctagcacctctgtgttttaagggtctttcaatgtttctagaataagcccttattttcaagggttcataacaggcataaaatctcttctcctggcaaaagctgctatgaaaagcctcagcttgggaagatagatttttttccccccaattacaaaatctaagtattttggcccttcaatttggaggagggcaaaagttggaagtaagaagttttattttaagtactttcagtgctcaaaaaaatgcaatcactgtgttgtatataatagttcataggttgatcactcataataattgactctaaggcttttattaagaaaacagcagaaagattaaatcttgaattaagtctggggggaaatggccactgcagatggagttttagagtagtaatgaaattctacctagaatgcaaaattgggtatatgaattacatagcatgttgttgggattttttttaatgtgcagaagatcaaagctacttggaaggagtgcctataatttgccagtagccacagattaagattatatcttatatatcagcagattagctttagcttagggggagggtgggaaagtttggggggggggttgtgaagatttagggggaccttgatagagaactttataaacttctttctctttaataaagacttgtcttacaccgtgctgccattaaaggcagctgttctagagtttcagtcacctaagtacacccacaaaacaatatgaatatggagatcttcctttacccctcaactttaatttgcccagttatacctcagtgttgtagcagtactgtgatacctggcacagtgctttgatcttacgatgccctctgtactgacctgaaggagacctaagagtcctttccctttttgagtttgaatcatagccttgatgtggtctcttgttttatgtccttgttcctaatgtaaaagtgcttaactgcttcttggttgtattgggtagcattgggataagattttaactgggtattcttgaattgcttttacaataaaccaattttataatctttaaatttatcaactttttacatttgtgttattttcagtcagggcttcttagatctacttatggttgatggagcacattgatttggagtttcagatcttccaaagcactatttgttgtaataacttttctaaatgtagtgcctttaaaggaaaaatgaacacagggaagtgactttgctacaaataatgttgctgtgttaagtattcatattaaatacatgccttctatatggaacatggcagaaagactgaaaaataacagtaattaattgtgtaattcagaattcataccaatcagtgttgaaactcaaacattgcaaaagtgggtggcaatattcagtgcttaacacttttctagcgttggtacatctgagaaatgagtgctcaggtggattttatcctcgcaagcatgttgttataagaattgtgggtgtgcctatcataacaattgttttctgtatcttgaaaaagtattctccacattttaaatgttttatattagagaattctttaatgcacacttgtcaaatatatatatatagtaccaatgttacctttttattttttgttttagatgtaagagcatgctcatatgttaggtacttacataaattgttacattattttttcttatgtaatacctttttgtttgtttatgtggttcaaatatattctttccttaaactctt

SEQ ID NO: 4619 - DNA, 1638 bp, Homo sapiens
  source 1..1638: mol_type = genomic DNA
ctgcaatgtagttagcccactcgggatgtaacttgagtggaaagaagagttaccgcccccactcccattccctctcctatttgcaggcctgttgtatagtctcctgtcggagaccaaagggttttggaactcagaaaaaatcacttaacctgatgacaaaaacccgggttaaggaggaggaaagaaggaaaaacaatttagctgcttgcctaaacacttcaatttgtcttaggccagtactgatgcaggcactgcaggagccctgactccacagcatgttcgagctcattcctctccagcttctctgcagttgggagctgtttctcctgggacactgacccccactggagtagtctctggcccagcagctacacccacagctcagcatcttcgacagtcttcttttgagatacctgatgatgtacctctgccagcaggttgggagatggcaaagacatcttctggtcagagatacttcttaaatcacatcgatcagacaacaacatggcaggaccccaggaaggccatgctgtcccagatgaacgtcacagcccccaccagtccaccagtgcagcagaatatgatgaactcggcttcaggtcctcttcctgatggatgggaacaagccatgactcaggatggagaaatttactatataaaccataagaacaagaccacctcttggctagacccaaggcttgaccctcgttttgccatgaaccagagaatcagtcagagtgctccagtgaaacagccaccacccctggctccccagagcccacagggaggcgtcatgggtggcagcaactccaaccagcagcaacagatgcgactgcagcaactgcagatggagaaggagaggctgcggctgaaacagcaagaactgcttcggcaggcaatgcggaatatcaatcccagcacagcaaattctccaaaatgtcaggagttagccctgcgtagccagttaccaacactggagcaggatggtgggactcaaaatccagtgtcttctcccgggatgtctcaggaattgagaacaatgacgaccaatagctcagatcctttccttaacagtggcacctatcactctcgagatgagagtacagacagtggactaagcatgagcagctacagtgtccctcgaaccccagatgacttcctgaacagtgtggatgagatggatacaggtgatactatcaaccaaagcaccctgccctcacagcagaaccgtttcccagactaccttgaagccattcctgggacaaatgtggaccttggaacactggaaggagatggaatgaacatagaaggagaggagctgatgccaagtctgcaggaagctttgagttctgacatccttaatgacatggagtctgttttggctgccaccaagctagataaagaaagctttcttacatggttatagagccctcaggcagactgaattctaaatctgtgaaggatctaaggagacacatgcaccggaaatttccataagccagttgcagttttcaggctaatacagaaaaagatgaacaaacgtccagcaagatactttaatcctctattttgctcttccttgtccattgctgctgttaatgtattgctgacctctttcacagttggctctaaagaatc

SEQ ID NO: 4620 - DNA, 1490 bp, Homo sapiens
  source 1..1490: mol_type = genomic DNA
atggatcccgggcagcagccgccgcctcaaccggccccccagggccaagggcagccgccttcgcagcccccgcaggggcagggcccgccgtccggacccgggcaaccggcacccgcggcgacccaggcggcgccgcaggcaccccccgccgggcatcagatcgtgcacgtccgcggggactcggagaccgacctggaggcgctcttcaacgccgtcatgaaccccaagacggccaacgtgccccagaccgtgcccatgaggctccggaagctgcccgactccttcttcaagccgccggagcccaaatcccactcccgacaggccagtactgatgcaggcactgcaggagccctgactccacagcatgttcgagctcattcctctccagcttctctgcagttgggagctgtttctcctgggacactgacccccactggagtagtctctggcccagcagctacacccacagctcagcatcttcgacagtcttcttttgagatacctgatgatgtacctctgccagcaggttgggagatggcaaagacatcttctggtcagagatacttcttaaatcacatcgatcagacaacaacatggcaggaccccaggaaggccatgctgtcccagatgaacgtcacagcccccaccagtccaccagtgcagcagaatatgatgaactcggcttcaggtcctcttcctgatggatgggaacaagccatgactcaggatggagaaatttactatataaaccataagaacaagaccacctcttggctagacccaaggcttgaccctcgttttgccatgaaccagagaatcagtcagagtgctccagtgaaacagccaccacccctggctccccagagcccacagggaggcgtcatgggtggcagcaactccaaccagcagcaacagatgcgactgcagcaactgcagatggagaaggagaggctgcggctgaaacagcaagaactgcttcggcaggagttagccctgcgtagccagttaccaacactggagcaggatggtgggactcaaaatccagtgtcttctcccgggatgtctcaggaattgagaacaatgacgaccaatagctcagatcctttccttaacagtggcacctatcactctcgagatgagagtacagacagtggactaagcatgagcagctacagtgtccctcgaaccccagatgacttcctgaacagtgtggatgagatggatacaggtgatactatcaaccaaagcaccctgccctcacagcagaaccgtttcccagactaccttgaagccattcctgggacaaatgtggaccttggaacactggaaggagatggaatgaacatagaaggagaggagctgatgccaagtctgcaggaagctttgagttctgacatccttaatgacatggagtctgttttggctgccaccaagctagataaagaaagctttcttacatggttatagagccctcaggcagactgaattct

SEQ ID NO: 4621 - DNA, 5332 bp, Homo sapiens
  source 1..5332: mol_type = genomic DNA
aaagggaggaaggaaggaacaagaaaaggaaataaagagaaaggggaggcggggaaaggcaacgagctgtccggcctccgtcaagggagttggagggaaaaagttctcaggcgccgcaggtccgagtgcctcgcagcccctcccgaggcgcagccgccagaccagtggagccggggcgcagggcgggggcggaggcgccggggcgggggatgcggggccgcggcgcagccccccggccctgagagcgaggacagcgccgcccggcccgcagccgtcgccgcttctccacctcggcccgtggagccggggcgtccgggcgtagccctcgctcgcctgggtcagggggtgcgcgtcgggggaggcagaagccatggatcccgggcagcagccgccgcctcaaccggccccccagggccaagggcagccgccttcgcagcccccgcaggggcagggcccgccgtccggacccgggcaaccggcacccgcggcgacccaggcggcgccgcaggcaccccccgccgggcatcagatcgtgcacgtccgcggggactcggagaccgacctggaggcgctcttcaacgccgtcatgaaccccaagacggccaacgtgccccagaccgtgcccatgaggctccggaagctgcccgactccttcttcaagccgccggagcccaaatcccactcccgacaggccagtactgatgcaggcactgcaggagccctgactccacagcatgttcgagctcattcctctccagcttctctgcagttgggagctgtttctcctgggacactgacccccactggagtagtctctggcccagcagctacacccacagctcagcatcttcgacagtcttcttttgagatacctgatgatgtacctctgccagcaggttgggagatggcaaagacatcttctggtcagagatacttcttaaatcacatcgatcagacaacaacatggcaggaccccaggaaggccatgctgtcccagatgaacgtcacagcccccaccagtccaccagtgcagcagaatatgatgaactcggcttcaggtcctcttcctgatggatgggaacaagccatgactcaggatggagaaatttactatataaaccataagaacaagaccacctcttggctagacccaaggcttgaccctcgttttgccatgaaccagagaatcagtcagagtgctccagtgaaacagccaccacccctggctccccagagcccacagggaggcgtcatgggtggcagcaactccaaccagcagcaacagatgcgactgcagcaactgcagatggagaaggagaggctgcggctgaaacagcaagaactgcttcggcaggtgaggccacaggagttagccctgcgtagccagttaccaacactggagcaggatggtgggactcaaaatccagtgtcttctcccgggatgtctcaggaattgagaacaatgacgaccaatagctcagatcctttccttaacagtggcacctatcactctcgagatgagagtacagacagtggactaagcatgagcagctacagtgtccctcgaaccccagatgacttcctgaacagtgtggatgagatggatacaggtgatactatcaaccaaagcaccctgccctcacagcagaaccgtttcccagactaccttgaagccattcctgggacaaatgtggaccttggaacactggaaggagatggaatgaacatagaaggagaggagctgatgccaagtctgcaggaagctttgagttctgacatccttaatgacatggagtctgttttggctgccaccaagctagataaagaaagctttcttacatggttatagagccctcaggcagactgaattctaaatctgtgaaggatctaaggagacacatgcaccggaaatttccataagccagttgcagttttcaggctaatacagaaaaagatgaacaaacgtccagcaagatactttaatcctctattttgctcttccttgtccattgctgctgttaatgtattgctgacctctttcacagttggctctaaagaatcaaaagaaaaaaactttttatttcttttgctattaaaactactgttcattttgggggctgggggaagtgagcctgtttggatgatggatgccattccttttgcccagttaaatgttcaccaatcattttaactaaatactcagacttagaagtcagatgcttcatgtcacagcatttagtttgttcaacagttgtttcttcagcttcctttgtccagtggaaaaacatgatttactggtctgacaagccaaaaatgttatatctgatattaaatacttaatgctgatttgaagagatagctgaaaccaaggctgaagactgttttactttcagtattttcttttcctcctagtgctatcattagtcacataatgaccttgattttattttaggagcttataaggcatgagacaatttccatataaatatattaattattgccacatactctaatatagattttggtggataattttgtgggtgtgcattttgttctgttttgttgggttttttgttttttttgtttttggcagggtcggtgggggggttggttggttggttggttttgtcggaacctaggcaaatgaccatattagtgaatctgttaatagttgtagcttgggatggttattgtagttgttttggtaaaatcttcatttcctggttttttttaccaccttatttaaatctcgattatctgctctctcttttatatacatacacacacccaaacataacatttataatagtgtggtagtggaatgtatccttttttaggtttccctgctttccagttaatttttaaaatggtagcgctttgtatgcatttagaatacatgactagtagtttatatttcactggtagtttaaatctggttggggcagtctgcagatgtttgaagtagtttagtgttctagaaagagctattactgtggatagtgcctaggggagtgctccacgccctctgggcatacggtagatattatctgatgaattggaaaggagcaaaccagaaatggctttattttctcccttggactaatttttaagtctcgattggaattcagtgagtaggttcataatgtgcatgacagaaataagctttatagtggtttaccttcatttagctttggaagttttctttgccttagttttggaagtaaattctagtttgtagttctcatttgtaatgaacacattaacgactagattaaaatattgccttcaagattgttcttacttacaagacttgctcctacttctatgctgaaaattgaccctggatagaatactataaggttttgagttagctggaaaagtgatcagattaataaatgtatattggtagttgaatttagcaaagaaatagagataatcatgattatacctttatttttacaggaagagatgatgtaactagagtatgtgtctacaggagtaataatggtttccaaagagtattttttaaaggaacaaaacgagcatgaattaactcttcaatataagctatgaagtaatagttggttgtgaattaaagtggcaccagctagcacctctgtgttttaagggtctttcaatgtttctagaataagcccttattttcaagggttcataacaggcataaaatctcttctcctggcaaaagctgctatgaaaagcctcagcttgggaagatagatttttttccccccaattacaaaatctaagtattttggcccttcaatttggaggagggcaaaagttggaagtaagaagttttattttaagtactttcagtgctcaaaaaaatgcaatcactgtgttgtatataatagttcataggttgatcactcataataattgactctaaggcttttattaagaaaacagcagaaagattaaatcttgaattaagtctggggggaaatggccactgcagatggagttttagagtagtaatgaaattctacctagaatgcaaaattgggtatatgaattacatagcatgttgttgggattttttttaatgtgcagaagatcaaagctacttggaaggagtgcctataatttgccagtagccacagattaagattatatcttatatatcagcagattagctttagcttagggggagggtgggaaagtttggggggggggttgtgaagatttagggggaccttgatagagaactttataaacttctttctctttaataaagacttgtcttacaccgtgctgccattaaaggcagctgttctagagtttcagtcacctaagtacacccacaaaacaatatgaatatggagatcttcctttacccctcaactttaatttgcccagttatacctcagtgttgtagcagtactgtgatacctggcacagtgctttgatcttacgatgccctctgtactgacctgaaggagacctaagagtcctttccctttttgagtttgaatcatagccttgatgtggtctcttgttttatgtccttgttcctaatgtaaaagtgcttaactgcttcttggttgtattgggtagcattgggataagattttaactgggtattcttgaattgcttttacaataaaccaattttataatctttaaatttatcaactttttacatttgtgttattttcagtcagggcttcttagatctacttatggttgatggagcacattgatttggagtttcagatcttccaaagcactatttgttgtaataacttttctaaatgtagtgcctttaaaggaaaaatgaacacagggaagtgactttgctacaaataatgttgctgtgttaagtattcatattaaatacatgccttctatatggaacatggcagaaagactgaaaaataacagtaattaattgtgtaattcagaattcataccaatcagtgttgaaactcaaacattgcaaaagtgggtggcaatattcagtgcttaacacttttctagcgttggtacatctgagaaatgagtgctcaggtggattttatcctcgcaagcatgttgttataagaattgtgggtgtgcctatcataacaattgttttctgtatcttgaaaaagtattctccacattttaaatgttttatattagagaattctttaatgcacacttgtcaaatatatatatatagtaccaatgttacctttttattttttgttttagatgtaagagcatgctcatatgttaggtacttacataaattgttacattattttttcttatgtaatacctttttgtttgtttatgtggttcaaatatattctttccttaaactctt

SEQ ID NO: 4622 - DNA, 2393 bp, Homo sapiens
  source 1..2393: mol_type = genomic DNA
gccgccgccagggaaaagaaagggaggaaggaaggaacaagaaaaggaaataaagagaaaggggaggcggggaaaggcaacgagctgtccggcctccgtcaagggagttggagggaaaaagttctcaggcgccgcaggtccgagtgcctcgcagcccctcccgaggcgcagccgccagaccagtggagccggggcgcagggcgggggcggaggcgccggggcgggggatgcggggccgcggcgcagccccccggccctgagagcgaggacagcgccgcccggcccgcagccgtcgccgcttctccacctcggcccgtggagccggggcgtccgggcgtagccctcgctcgcctgggtcagggggtgcgcgtcgggggaggcagaagccatggatcccgggcagcagccgccgcctcaaccggccccccagggccaagggcagccgccttcgcagcccccgcaggggcagggcccgccgtccggacccgggcaaccggcacccgcggcgacccaggcggcgccgcaggcaccccccgccgggcatcagatcgtgcacgtccgcggggactcggagaccgacctggaggcgctcttcaacgccgtcatgaaccccaagacggccaacgtgccccagaccgtgcccatgaggctccggaagctgcccgactccttcttcaagccgccggagcccaaatcccactcccgacaggccagtactgatgcaggcactgcaggagccctgactccacagcatgttcgagctcattcctctccagcttctctgcagttgggagctgtttctcctgggacactgacccccactggagtagtctctggcccagcagctacacccacagctcagcatcttcgacagtcttcttttgagatacctgatgatgtacctctgccagcaggttgggagatggcaaagacatcttctggtcagagatacttcttaaatcacatcgatcagacaacaacatggcaggaccccaggaaggccatgctgtcccagatgaacgtcacagcccccaccagtccaccagtgcagcagaatatgatgaactcggcttcagccatgaaccagagaatcagtcagagtgctccagtgaaacagccaccacccctggctccccagagcccacagggaggcgtcatgggtggcagcaactccaaccagcagcaacagatgcgactgcagcaactgcagatggagaaggagaggctgcggctgaaacagcaagaactgcttcggcaggagttagccctgcgtagccagttaccaacactggagcaggatggtgggactcaaaatccagtgtcttctcccgggatgtctcaggaattgagaacaatgacgaccaatagctcagatcctttccttaacagtggcacctatcactctcgagatgagagtacagacagtggactaagcatgagcagctacagtgtccctcgaaccccagatgacttcctgaacagtgtggatgagatggatacaggtgatactatcaaccaaagcaccctgccctcacagcagaaccgtttcccagactaccttgaagccattcctgggacaaatgtggaccttggaacactggaaggagatggaatgaacatagaaggagaggagctgatgccaagtctgcaggaagctttgagttctgacatccttaatgacatggagtctgttttggctgccaccaagctagataaagaaagctttcttacatggttatagagccctcaggcagactgaattctaaatctgtgaaggatctaaggagacacatgcaccggaaatttccataagccagttgcagttttcaggctaatacagaaaaagatgaacaaacgtccagcaagatactttaatcctctattttgctcttccttgtccattgctgctgttaatgtattgctgacctctttcacagttggctctaaagaatcaaaagaaaaaaactttttatttcttttgctattaaaactactgttcattttgggggctgggggaagtgagcctgtttggatgatggatgccattccttttgcccagttaaatgttcaccaatcattttaactaaatactcagacttagaagtcagatgcttcatgtcacagcatttagtttgttcaacagttgtttcttcagcttcctttgtccagtggaaaaacatgatttactggtctgacaagccaaaaatgttatatctgatattaaatacttaatgctgatttgaagagatagctgaaaccaaggctgaagactgttttactttcagtattttcttttcctcctagtgctatcattagtcacataatgaccttgattttattttaggagcttataaggcatgagacaatttccatataaatatattaattattgc

SEQ ID NO: 4623 - DNA, 3759 bp, Homo sapiens
  source 1..3759: mol_type = genomic DNA
ggctctggctgagaacatggccaatgacattgatgagctcattggcattcccttccccaaccacagcagtgaggtcctgtgcagcctcaatgagcaacggcacgatggcctgctgtgtgacgtgctcctggtggtgcaggagcaggagtatcggacccaccgctccgtcctggctgcctgcagcaagtacttcaagaagcttttcacagccggcaccctagccagccagccctacgtctatgagatcgactttgtccagcctgaggctctggctgctatcctggagttcgcctacacctccacgctcaccatcaccgctggcaatgtcaagcacatcctcaacgcagccaggatgctggagatccagtgcatcgtgaacgtgtgcctggagatcatggagcctgggggggacgggggggaggaggatgacaaggaggacgatgacgacgacgaagatgatgatgatgaggaggacgaagaggaggaggaggaagaggaggaggatgacgatgatgacacggaggactttgctgaccaagaaaacttgcctgacccccaggacatcagctgccaccaaagcccttccaagacagaccatctcacagagaaggcctattcagacacccccagggacttccctgactccttccaggctggcagtcctggccatctgggggtgatccgggacttctccatcgaatctctgctaagggagaacctgtaccccaaggccaacatccccgacaggagaccctccttgtctccattcgccccggacttctttccacacctctggccaggggacttcggtgcctttgcccagctgcctgagcagcccatggacagtgggccactggatctggtcatcaagaatcggaagatcaaggaggaggagaaggaggagctgcccccacccccaccgccacccttccctaatgacttcttcaaggacatgttccctgacctgccgggggggcctctgggacccatcaaggcggagaacgactacggtgcctatctcaacttcctgagtgccacccacctgggaggcctcttcccaccctggcccctggtagaagagcgcaagctgaagcccaaggcctctcagcagtgccccatctgccacaaagtcatcatgggggccgggaagctgccgcggcacatgaggacccataccggggagaagccatacatgtgcaccatctgcgaggtccgcttcaccaggcaggacaagctgaaaatccacatgcggaagcacacaggggagcggccctacctgtgcatccactgcaacgccaagttcgtgcacaactacgacctcaagaaccacatgcgcatccacacgggcgtgcggccctaccagtgcgagttctgctacaagagcttcacgcgctctgaccacctgcaccgccacatcaagcgccagagctgccgcatggcacggccccgacgcggccgcaagcctgctgcgtggagggccgccagcctgctcttcgggcccggcggcccggcccccgacaaggcggccttcgtgatgccccctgcgctgggcgaggtgggcggccacctgggcggcgcagctgtgtgcctcccgggccccagccccgccaagcacttcctggcagcgcccaagggcgccctgagcctgcaagagctggagcggcagttcgaggagacacagatgaagctgttcgggcgcgcgcagctggaggctgagaggaacgcggggggcctcctggccttcgcgctggccgagaacgtggcggcggcgcggccctacttcccgctgcccgacccttgggccgccggcctggccggcctccctgggctcgccggcctcaaccacgtggcctccatgtccgaagccaacaactaggctggtccctgtcggctccagcccaccagccctccagtccttctccctccaggcccactctaccctaccccatggatctgaacttttcattttaaaaacacaaagggaaaatgggaaaataataataatactatcagtgatggcattttcccgggctcctaaagcagctgcctccttttgctggtctgagacgggcatcttttcccaaaaggccaggagcccgggcctccctccctgtctctctggctctcatatagaaacttgcaccggcccatgccacaaagaactgggtgcccaggggcacttaggagctgggtgagtcatgaggggtcagggggtggttggcctggtgcccagccagccacagcaggaggaggtaggggctgggcatgcaccttggttaagccccaccccctatggcaaagtctctgccaacactcctctgagggctcattttccagtctccagtggccccggggtctttttgagaactacccacctgccacatagaaagaaatgctctgttggcagggaggcctcctggaaccagtcaggaaccaggctctggaaggcccgggccatttcttccctgacctgtcctgtgaccttgacaggtcagccctctgtagctcagtgtcacctggctatggaaggggctggtaactgaggtttccgccctccacctctaaacacatacacacctatccccccagagaatcacagagatggtagaagctttgtactccccaagtccatggggaaacagtttatctttctggacttagttttatcacatccagctctatattagcatattagcataggtgagaaatatggccagactagacagagatcaggtcatcaggggagcttccgagcttcagcaaagcccacaggtagctctgcgaactcagaatgctaccctaccttccctgcaggccgctgttcatgtctggactcctgggggcgctatttaatgtttacccccatctccagtgccccctccaaggctgtgcagtgtcttggggctctcagggccaacatcgaagagatgggggccacctcttaacacctggcaacagtctcccctcatcctgattcctgacaacagacaaaacaccggtttctagggtttatctgtttgttttttgagttgagggttcctcagggccttggcattgctagtgatggtcccctttgctgtgtgagaaccccctcaaccccttcctcctccctctggggatgaagtgggagtatttggctccccatttttgacaaaagggctcagtgcagggaggtggaggcctctgaggtttgaagggctctgtgagttagagttgtcacatgttctcctggttcttgaatttgcagcaggtcctgaaaaggaaggctctgctggccccgtgccttcctgaccttctctctccttccctcccctctcttttcttgccaagtttgctttggtttctgagcagcccagagaggaggagggttcgtccccagggagagcccagggctggagtccccaatccctgtgctatgggcacaaagagacttcagctcttcctgttgccttggctttttcctgagcaaaaacacaacaaacaaaaaggccagagaagagcacagactctgtccctctcacaactctccagaagagaccccctgattcttcacaccaccggatgccactccagccagcaggattgctacacacaccctctgttctcagaagtcatctgcctgggcagccgcctctcagattcctgtcttcgtttcagacacttttctctgaagcatgcccatgtccaccagccaacgtgcccccgtgttcccccccatcagccaagtgattggggctgaaccagactttaaaagagagg

SEQ ID NO: 4624 - DNA, 4158 bp, Homo sapiens
  source 1..4158: mol_type = genomic DNA
taaagtgaagcgtaacgcgcgagtggtgagatcgtcctgtcctgcgcttaacagtacaggtggaccaaaggggctcccggccaaatacttctggttggagggtggggagggagtgctctctcaaaaccactcctggaatggcttaactcgcccagcacgaatcaatgacaacctcccgccggctgcggcaggctcccgcgagcagcgcggccgcgtggattcccagcccgggaccctggcggcgctcaggacacggcccgggcacgagcgcggcgtccccggggcggccagggctctggctgagaacatggccaatgacattgatgagctcattggcattcccttccccaaccacagcagtgaggtcctgtgcagcctcaatgagcaacggcacgatggcctgctgtgtgacgtgctcctggtggtgcaggagcaggagtatcggacccaccgctccgtcctggctgcctgcagcaagtacttcaagaagcttttcacagccggcaccctagccagccagccctacgtctatgagatcgactttgtccagcctgaggctctggctgctatcctggagttcgcctacacctccacgctcaccatcaccgctggcaatgtcaagcacatcctcaacgcagccaggatgctggagatccagtgcatcgtgaacgtgtgcctggagatcatggagcctgggggggacgggggggaggaggatgacaaggaggacgatgacgacgacgaagatgatgatgatgaggaggacgaagaggaggaggaggaagaggaggaggatgacgatgatgacacggaggactttgctgaccaagaaaacttgcctgacccccaggacatcagctgccaccaaagcccttccaagacagaccatctcacagagaaggcctattcagacacccccagggacttccctgactccttccaggctggcagtcctggccatctgggggtgatccgggacttctccatcgaatctctgctaagggagaacctgtaccccaaggccaacatccccgacaggagaccctccttgtctccattcgccccggacttctttccacacctctggccaggggacttcggtgcctttgcccagctgcctgagcagcccatggacagtgggccactggatctggtcatcaagaatcggaagatcaaggaggaggagaaggaggagctgcccccacccccaccgccacccttccctaatgacttcttcaaggacatgttccctgacctgccgggggggcctctgggacccatcaaggcggagaacgactacggtgcctatctcaacttcctgagtgccacccacctgggaggcctcttcccaccctggcccctggtagaagagcgcaagctgaagcccaaggcctctcagcagtgccccatctgccacaaagtcatcatgggggccgggaagctgccgcggcacatgaggacccataccggggagaagccatacatgtgcaccatctgcgaggtccgcttcaccaggcaggacaagctgaaaatccacatgcggaagcacacaggggagcggccctacctgtgcatccactgcaacgccaagttcgtgcacaactacgacctcaagaaccacatgcgcatccacacgggcgtgcggccctaccagtgcgagttctgctacaagagcttcacgcgctctgaccacctgcaccgccacatcaagcgccagagctgccgcatggcacggccccgacgcggccgcaagcctgctgcgtggagggccgccagcctgctcttcgggcccggcggcccggcccccgacaaggcggccttcgtgatgccccctgcgctgggcgaggtgggcggccacctgggcggcgcagctgtgtgcctcccgggccccagccccgccaagcacttcctggcagcgcccaagggcgccctgagcctgcaagagctggagcggcagttcgaggagacacagatgaagctgttcgggcgcgcgcagctggaggctgagaggaacgcggggggcctcctggccttcgcgctggccgagaacgtggcggcggcgcggccctacttcccgctgcccgacccttgggccgccggcctggccggcctccctgggctcgccggcctcaaccacgtggcctccatgtccgaagccaacaactaggctggtccctgtcggctccagcccaccagccctccagtccttctccctccaggcccactctaccctaccccatggatctgaacttttcattttaaaaacacaaagggaaaatgggaaaataataataatactatcagtgatggcattttcccgggctcctaaagcagctgcctccttttgctggtctgagacgggcatcttttcccaaaaggccaggagcccgggcctccctccctgtctctctggctctcatatagaaacttgcaccggcccatgccacaaagaactgggtgcccaggggcacttaggagctgggtgagtcatgaggggtcagggggtggttggcctggtgcccagccagccacagcaggaggaggtaggggctgggcatgcaccttggttaagccccaccccctatggcaaagtctctgccaacactcctctgagggctcattttccagtctccagtggccccggggtctttttgagaactacccacctgccacatagaaagaaatgctctgttggcagggaggcctcctggaaccagtcaggaaccaggctctggaaggcccgggccatttcttccctgacctgtcctgtgaccttgacaggtcagccctctgtagctcagtgtcacctggctatggaaggggctggtaactgaggtttccgccctccacctctaaacacatacacacctatccccccagagaatcacagagatggtagaagctttgtactccccaagtccatggggaaacagtttatctttctggacttagttttatcacatccagctctatattagcatattagcataggtgagaaatatggccagactagacagagatcaggtcatcaggggagcttccgagcttcagcaaagcccacaggtagctctgcgaactcagaatgctaccctaccttccctgcaggccgctgttcatgtctggactcctgggggcgctatttaatgtttacccccatctccagtgccccctccaaggctgtgcagtgtcttggggctctcagggccaacatcgaagagatgggggccacctcttaacacctggcaacagtctcccctcatcctgattcctgacaacagacaaaacaccggtttctagggtttatctgtttgttttttgagttgagggttcctcagggccttggcattgctagtgatggtcccctttgctgtgtgagaaccccctcaaccccttcctcctccctctggggatgaagtgggagtatttggctccccatttttgacaaaagggctcagtgcagggaggtggaggcctctgaggtttgaagggctctgtgagttagagttgtcacatgttctcctggttcttgaatttgcagcaggtcctgaaaaggaaggctctgctggccccgtgccttcctgaccttctctctccttccctcccctctcttttcttgccaagtttgctttggtttctgagcagcccagagaggaggagggttcgtccccagggagagcccagggctggagtccccaatccctgtgctatgggcacaaagagacttcagctcttcctgttgccttggctttttcctgagcaaaaacacaacaaacaaaaaggccagagaagagcacagactctgtccctctcacaactctccagaagagaccccctgattcttcacaccaccggatgccactccagccagcaggattgctacacacaccctctgttctcagaagtcatctgcctgggcagccgcctctcagattcctgtcttcgtttcagacacttttctctgaagcatgcccatgtccaccagccaacgtgcccccgtgttcccccccatcagccaagtgattggggctgaaccagactttaaaagagaggaaaaaaaaaaaaaaaggaaacatgaataaattggaatccagtggtgttggggcttttgtttttattttgtaaaggtgatgacttcttataaactcaatttttcagatg

SEQ ID NO: 4625 - DNA, 704 bp, Homo sapiens
  source 1..704: mol_type = genomic DNA
aggaggacgccaggactgcgtcccggagccaagtgcgggaggcgcgcagggccggcggcgcgcggagatcccctctgagcagctgggagctcagaagctctgtccaaccctgaggagtgggtcagccacaagagcaagaagtgatggcgtggagtccacccagggcctgaggcatgagcagaatccacgcccattagacctggagcctgggcgtttggggctgcactgctggggagatccaagaagaatcaatgctttggcccctggtgacatgtacatggtgtaatgacaggaaatgagcagatttgcagaaaaactggtgtcctgaaatttaaaactaaggcatcggtgcttgtgccaggcagcacctggaagctctgggaaatccacgagaagcagcaggcattggctctgttttggaggagctttcagtccagttcaggaagagaagacacctgcatatgagacaaagaactttatgaccagacagagctgctctaagctgtgggccaacaggaggctgggagctctcctctaaattgctttgtgaccttggacaagaaccctccccttcctggactgcaaatttcctcctctgtaaaatgaagggttgggctctggctgagaacatggccaatgacattgatgagctcattggcattcccttccccaaccacagcagtgaggtcctgtgcagcctcaat

SEQ ID NO: 4626 - DNA, 430 bp, Homo sapiens
  source 1..430: mol_type = genomic DNA
gtgtgtgtgtgtatgtgtacacacacagaacatgaagaactacatccagaagctgcccagaaaggatgcagatcccctctgagcagctgggagctcagaagctctgtccaaccctgaggagtgggtcagccacaagagcaagaagtgatggcgtggagtccacccagggcctgaggcatgagcagaatccacgcccattagacctggagcctgggcgtttggggctgcactgctggggagatccaagaagaatcaatgctttggcccctggtgacatgtacatggtgtaatgacaggaaatgagcagatttgcagaaaaactggtgtcctgaaatttaaaactaaggcatcggtgcttggctctggctgagaacatggccaatgacattgatgagctcattggcattcccttccccaaccacagcagtga

SEQ ID NO: 4627 - DNA, 5140 bp, Homo sapiens
  source 1..5140: mol_type = genomic DNA
gtaaaccaggtgcggtggggaggggggaggggtggaggcggaggggtgggggggaagggggagggagggggaggaggtgactcgagcatttagacacaagcgagaggatcatggcggatggccccaggtgtaagcgcagaaagcaggcgaacccgcggcgcaataacgttacaaattataatactgtggtagaaacaaattcagattcagatgatgaagacaaactgcatattgtggaagaagaaagtgttacagatgcagctgactgtgaaggtgtaccagaggatgacctgccaacagaccagacagtgttaccagggaggagcagtgaaagagaagggaatgctaagaactgctgggaggatgacagaaaggaagggcaagaaatcctggggcctgaagctcaggcagatgaagcaggatgtacagtaaaagatgatgaatgcgagtcagatgcagaaaatgagcaaaaccatgatcctaatgttgaagagtttctacaacaacaagacactgctgtcatttttcctgaggcacctgaagaggaccagaggcagggcacaccagaagccagtggtcatgatgaaaatggaacaccagatgcattttcacaattactcacctgtccatattgtgatagaggctataaacgctttacctctctgaaagaacacattaaatatcgtcatgaaaagaatgaagataactttagttgctccctgtgcagttacacctttgcatacagaacccaacttgaacgtcacatgacatcacataaatcaggaagagatcaaagacatgtgacgcagtctgggtgtaatcgtaaattcaaatgcactgagtgtggaaaagctttcaaatacaaacatcacctaaaagagcacttaagaattcacagtggagagaagccatatgaatgcccaaactgcaagaaacgcttttcccattctggctcctatagctcacacataagcagtaagaaatgtatcagcttgatacctgtgaatgggcgaccaagaacaggactcaagacatctcagtgttcttcaccgtctctttcagcatcaccaggcagtcccacacgaccacagatacggcaaaagatagagaataaaccccttcaagaacaactttctgttaaccaaattaaaactgaacctgtggattatgaattcaaacccatagtggttgcttcaggaatcaactgttcaacccctttacaaaatggggttttcactggtggtggcccattacaggcaaccagttctcctcagggcatggtgcaagctgttgttctgccaacagttggtttggtgtctcccataagtatcaatttaagtgatattcagaatgtacttaaagtggcggtagatggtaatgtaataaggcaagtgttggagaataatcaagccaatcttgcatccaaagaacaagaaacaatcaatgcttcacccatacaacaaggtggccattctgttatttcagccatcagtcttcctttggttgatcaagatggaacaaccaaaattatcatcaactacagtcttgagcagcctagccaacttcaagttgttcctcaaaatttaaaaaaagaaaatccagtcgctacaaacagttgtaaaagtgaaaagttaccagaagatcttactgttaagtctgagaaggacaaaagctttgaagggggggtgaatgatagcacttgtcttctgtgtgatgattgtccaggagatattaatgcacttccagaattaaagcactatgacctaaagcagcctactcagcctcctccactccctgcagcagaagctgagaagcctgagtcctctgtttcatcagctactggagatggcaatttgtctcctagtcagccacctttaaagaacctcttgtctctcctaaaagcatattatgctttgaatgcacaaccaagtgcagaagagctctcaaaaattgctgattcagtaaacctaccactggatgtagtaaaaaagtggtttgaaaagatgcaagctggacagatttcagtgcagtcttctgaaccatcttctcctgaaccaggcaaagtaaatatccctgccaagaacaatgatcagcctcaatctgcaaatgcaaatgaaccccaggacagcacagtaaatctacaaagtcctttgaagatgactaactccccagttttaccagtgggatcaaccaccaatggttccagaagtagtacaccatccccatcacctctaaacctttcctcatccagaaatacacagggttacttgtacacagctgagggtgcacaagaagagccacaagtagaacctcttgatctttcactaccaaagcaacagggagaattattagaaaggtcaactatcactagtgtttaccagaacagtgtttattctgtccaggaagaacccttgaacttgtcttgcgcaaaaaaggagccacaaaaggacagttgtgttacagactcagaaccagttgtaaatgtaatcccaccaagtgccaaccccataaatatcgctatacctacagtcactgcccagttacccacaatcgtggccattgctgaccagaacagtgttccatgcttaagagcgctagctgccaataagcaaacgattctgattccccaggtggcatacacctactcaactacggtcagccctgcagtccaagaaccacccttgaaagtgatccagccaaatggaaatcaggatgaaagacaagatactagctcagaaggagtatcaaatgtagaggatcagaatgactctgattctacaccgcccaaaaagaaaatgcggaagacagaaaatggaatgtatgcttgtgatttgtgtgacaagatattccaaaagagtagttcattattgagacataaatatgaacacacaggtaaaagacctcatgagtgtggaatctgtaaaaaggcatttaaacacaaacatcatttgattgaacacatgcgattacattctggagaaaagccctatcaatgtgacaaatgtggaaagcgcttctcacactctgggtcttattctcaacacatgaatcatcgctactcctactgtaagagagaagcggaagaacgtgacagcacagagcaggaagaggcagggcctgaaatcctctcgaatgagcacgtgggtgccagggcgtctccctcacagggcgactcggacgagagagagagtttgacaagggaagaggatgaagacagtgaaaaagaggaagaggaggaggataaagagatggaagaattgcaggaagaaaaagaatgtgaaaaaccacaaggggatgaggaagaggaggaggaggaggaagaagtggaagaagaagaggtagaagaggcagagaatgagggagaagaagcaaaaactgaaggtctgatgaaggatgacagggctgaaagtcaagcaagcagcttaggacaaaaagtaggcgagagtagtgagcaagtgtctgaagaaaagacaaatgaagcctaatcgtttttctagaaggaaaataaattctaattgataatgaatttcgttcaatattatccttgcttttcatggaaacacagtaacctgtatgctgtgattcctgttcactactgtgtaaagtaaaaactaaaaaaatacaaaatacaaaacacacacacacacacacacacacacacacacacacacacaaaataaatccgggtgtgcctgaacctcagacctagtaatttttcatgcagttttcaaagttaggaacaagtttgtaacatgcagcagattagaaaaccttaatgactcagagagcaacaatacaagaggttaaaggaagctgattaattagatatgcatctggcattgttttatcttatcagtattatcactcttatgttggtttattcttaagctgtacaattgggagaaattttataattttttattggtaaacatatgctaaatccgcttcagtattttattatgttttttaaaatgtgagaacttctgcactacaaaattcccttcacagagaagtataatgtagttccaacccgtgctaactaccttttataaattcagtctagaaggtagtaatttctaatatttagatgtcttagtagagcgtattatcatttaaagtgtattgttagccttaagaaagcagctgatagaagaactgaagtttcttactcacgtggtttaaaatggagttcaaaagattgccattgagttctgattgcagggactaacaatgttaatctgataaggacagcaaaatcatcagaatcagtgtttgtgattgtgtttgaatatgtggtaacatatgaaggatatgacatgaagctttgtatctcctttggccttaagcaagacctgtgtgctgtaagtgccatttctcagtattttcaaggctctaacccgccttcatccaatgtgtggcctacaataactagcatttgttgatttgtctcttgtatcaaaattcccaaataaaacttaaaaccactgactctgtcagagaaactgaaacactgggacatttcatccttcaattcctcggtattgattttatgttgattgattttcagaatttctctacagaaacgaaagggaaattttctaatctgctttatccatgtacttgcatttcagacatggacatgctattgttatttggctcataactgtttccaaatgttagttattatggacccaatttattaacaacattagctgatttttacctatcagtattattttatttcttttagtttatagatctgtgcaacatttttgtactgtatgtcttcaaacctggcagtattaatacccttcttactgacatatgtacttttagttttagaaaacttttatatttatgtgtcttatttttatatttctttatttattacacagtgtagtgtataatactgtagtttgtattaatacaataatatattttagtatgaaaatttggaaagttgataagatttaaagtagagatgcaattggttctcctgcattgagatttgatttaacagtgttatgttaacatttatacttgccttggactgtagaacagaacttaaatgggaatgtattagttttacaactacaatcaagtcattttacctttacccagtttttaatataaaacttaa

SEQ ID NO: 4628 - DNA, 5990 bp, Homo sapiens
  source 1..5990: mol_type = genomic DNA
gggggggaagggggagggagggggaggaggtgactcgagcatttagacacaagcgagaggatcatggcggatggccccaggtgtaagcgcagaaagcaggcgaacccgcggcgcaataacgttacaaattataatactgtggtagaaacaaattcagattcagatgatgaagacaaactgcatattgtggaagaagaaagtgttacagatgcagctgactgtgaaggtgtaccagaggatgacctgccaacagaccagacagtgttaccagggaggagcagtgaaagagaagggaatgctaagaactgctgggaggatgacacaggaaaggaagggcaagaaatcctggggcctgaagctcaggcagatgaagcaggatgtacagtaaaagatgatgaatgcgagtcagatgcagaaaatgagcaaaaccatgatcctaatgttgaagagtttctacaacaacaagacactgctgtcatttttcctgaggcacctgaagaggaccagaggcagggcacaccagaagccagtggtcatgatgaaaatggaacaccagatgcattttcacaattactcacctgtccatattgtgatagaggctataaacgctttacctctctgaaagaacacattaaatatcgtcatgaaaagaatgaagataactttagttgctccctgtgcagttacacctttgcatacagaacccaacttgaacgtcacatgacatcacataaatcaggaagagatcaaagacatgtgacgcagtctgggtgtaatcgtaaattcaaatgcactgagtgtggaaaagctttcaaatacaaacatcacctaaaagagcacttaagaattcacagtggagagaagccatatgaatgcccaaactgcaagaaacgcttttcccattctggctcctatagctcacacataagcagtaagaaatgtatcagcttgatacctgtgaatgggcgaccaagaacaggactcaagacatctcagtgttcttcaccgtctctttcagcatcaccaggcagtcccacacgaccacagatacggcaaaagatagagaataaaccccttcaagaacaactttctgttaaccaaattaaaactgaacctgtggattatgaattcaaacccatagtggttgcttcaggaatcaactgttcaacccctttacaaaatggggttttcactggtggtggcccattacaggcaaccagttctcctcagggcatggtgcaagctgttgttctgccaacagttggtttggtgtctcccataagtatcaatttaagtgatattcagaatgtacttaaagtggcggtagatggtaatgtaataaggcaagtgttggagaataatcaagccaatcttgcatccaaagaacaagaaacaatcaatgcttcacccatacaacaaggtggccattctgttatttcagccatcagtcttcctttggttgatcaagatggaacaaccaaaattatcatcaactacagtcttgagcagcctagccaacttcaagttgttcctcaaaatttaaaaaaagaaaatccagtcgctacaaacagttgtaaaagtgaaaagttaccagaagatcttactgttaagtctgagaaggacaaaagctttgaagggggggtgaatgatagcacttgtcttctgtgtgatgattgtccaggagatattaatgcacttccagaattaaagcactatgacctaaagcagcctactcagcctcctccactccctgcagcagaagctgagaagcctgagtcctctgtttcatcagctactggagatggcaatttgtctcctagtcagccacctttaaagaacctcttgtctctcctaaaagcatattatgctttgaatgcacaaccaagtgcagaagagctctcaaaaattgctgattcagtaaacctaccactggatgtagtaaaaaagtggtttgaaaagatgcaagctggacagatttcagtgcagtcttctgaaccatcttctcctgaaccaggcaaagtaaatatccctgccaagaacaatgatcagcctcaatctgcaaatgcaaatgaaccccaggacagcacagtaaatctacaaagtcctttgaagatgactaactccccagttttaccagtgggatcaaccaccaatggttccagaagtagtacaccatccccatcacctctaaacctttcctcatccagaaatacacagggttacttgtacacagctgagggtgcacaagaagagccacaagtagaacctcttgatctttcactaccaaagcaacagggagaattattagaaaggtcaactatcactagtgtttaccagaacagtgtttattctgtccaggaagaacccttgaacttgtcttgcgcaaaaaaggagccacaaaaggacagttgtgttacagactcagaaccagttgtaaatgtaatcccaccaagtgccaaccccataaatatcgctatacctacagtcactgcccagttacccacaatcgtggccattgctgaccagaacagtgttccatgcttaagagcgctagctgccaataagcaaacgattctgattccccaggtggcatacacctactcaactacggtcagccctgcagtccaagaaccacccttgaaagtgatccagccaaatggaaatcaggatgaaagacaagatactagctcagaaggagtatcaaatgtagaggatcagaatgactctgattctacaccgcccaaaaagaaaatgcggaagacagaaaatggaatgtatgcttgtgatttgtgtgacaagatattccaaaagagtagttcattattgagacataaatatgaacacacaggtaaaagacctcatgagtgtggaatctgtaaaaaggcatttaaacacaaacatcatttgattgaacacatgcgattacattctggagaaaagccctatcaatgtgacaaatgtggaaagcgcttctcacactctgggtcttattctcaacacatgaatcatcgctactcctactgtaagagagaagcggaagaacgtgacagcacagagcaggaagaggcagggcctgaaatcctctcgaatgagcacgtgggtgccagggcgtctccctcacagggcgactcggacgagagagagagtttgacaagggaagaggatgaagacagtgaaaaagaggaagaggaggaggataaagagatggaagaattgcaggaagaaaaagaatgtgaaaaaccacaaggggatgaggaagaggaggaggaggaggaagaagtggaagaagaagaggtagaagaggcagagaatgagggagaagaagcaaaaactgaaggtctgatgaaggatgacagggctgaaagtcaagcaagcagcttaggacaaaaagtaggcgagagtagtgagcaagtgtctgaagaaaagacaaatgaagcctaatcgtttttctagaaggaaaataaattctaattgataatgaatttcgttcaatattatccttgcttttcatggaaacacagtaacctgtatgctgtgattcctgttcactactgtgtaaagtaaaaactaaaaaaatacaaaatacaaaacacacacacacacacacacacacacacacacacacacacaaaataaatccgggtgtgcctgaacctcagacctagtaatttttcatgcagttttcaaagttaggaacaagtttgtaacatgcagcagattagaaaaccttaatgactcagagagcaacaatacaagaggttaaaggaagctgattaattagatatgcatctggcattgttttatcttatcagtattatcactcttatgttggtttattcttaagctgtacaattgggagaaattttataattttttattggtaaacatatgctaaatccgcttcagtattttattatgttttttaaaatgtgagaacttctgcactacaaaattcccttcacagagaagtataatgtagttccaacccgtgctaactaccttttataaattcagtctagaaggtagtaatttctaatatttagatgtcttagtagagcgtattatcatttaaagtgtattgttagccttaagaaagcagctgatagaagaactgaagtttcttactcacgtggtttaaaatggagttcaaaagattgccattgagttctgattgcagggactaacaatgttaatctgataaggacagcaaaatcatcagaatcagtgtttgtgattgtgtttgaatatgtggtaacatatgaaggatatgacatgaagctttgtatctcctttggccttaagcaagacctgtgtgctgtaagtgccatttctcagtattttcaaggctctaacccgccttcatccaatgtgtggcctacaataactagcatttgttgatttgtctcttgtatcaaaattcccaaataaaacttaaaaccactgactctgtcagagaaactgaaacactgggacatttcatccttcaattcctcggtattgattttatgttgattgattttcagaatttctctacagaaacgaaagggaaattttctaatctgctttatccatgtacttgcatttcagacatggacatgctattgttatttggctcataactgtttccaaatgttagttattatggacccaatttattaacaacattagctgatttttacctatcagtattattttatttcttttagtttatagatctgtgcaacatttttgtactgtatgtcttcaaacctggcagtattaatacccttcttactgacatatgtacttttagttttagaaaacttttatatttatgtgtcttatttttatatttctttatttattacacagtgtagtgtataatactgtagtttgtattaatacaataatatattttagtatgaaaatttggaaagttgataagatttaaagtagagatgcaattggttctcctgcattgagatttgatttaacagtgttatgttaacatttatacttgccttggactgtagaacagaacttaaatgggaatgtattagttttacaactacaatcaagtcattttacctttacccagtttttaatataaaacttaaattttgaaattcactgtgtgactaatagcatgatgctctgcagttttattaagaaatcagcctaaccatacaactctcatttccttagtaagccaaattaggattaacttctataaacagtgttgggaacaatgtttaacattttgtgccaatttgttcctgtattcatgtatgtaagttacagatctgactcttcatttttaagttccttgttacatcatggtcattttctagttttttaccagactcccatctcacaataaaatgcatcaacaagcctgaactgctgtcattcttttcatcattatcagtattttctttggaaaactgtgaaatggggtacattgtcatcctgcatttgattcatcttgagctgaatttgggtaacactaaatgttttagacattctccactaaattatggattttcttgtggctaaatgtttctggagaggtcagagttgacaaaacctcttcacaggttgctccttcttcctgaaatccttaatcctccgcatttcatgcttcaggtcatttcagggaagcctgggtttagatgcctttctgactctcagctcctgcacttctgtcatcatacctctgatactattatttatattccttccccactaggaacaggaaccacatttgtcatagtcactctcacattcctcactgcctaacagggtgcctggcataagttgggacaacagatatttgttgaataaaaatataatttgcatgtttatggagctcagctatgttctcactttttttgcttctaattccagaatatatgttaaatgatctaataatttgattattttcttataagtcttattaaacactagtcataatagacacaataaattatgccttctttttctattgcctt

SEQ ID NO: 4629 - DNA, 887 bp, Homo sapiens
  source 1..887: mol_type = genomic DNA
agacacaagcgagaggatcatggcggatggccccaggtgtaagcgcagaaagcaggcgaacccgcggcgcaataacgttacaaattataatactgtggtagaaacaaattcagattcagatgatgaagacaaactgcatattgtggaagaagaaagtgttacagatgcagctgactgtgaaggtgtaccagaggatgacctgccaacagaccagacagtgttaccagggaggagcagtgaaagagaagggaatgctaagaactgctgggaggatgacacaggaaaggaagggcaagaaatcctggggcctgaagctcaggcagatgaagcaggatgtacagtaaaagatgatgaatgcgagtcagatgcagaaaatgagcaaaaccatgatcctaatgttgaagagtttctacaacaacaagacactgctgtcatttttcctgaggcacctgaagaggaccagaggcagggcacaccagaagccagtggtcatgatgaaaatggaacaccagatgcattttcacaattactcacctgtccatattgtgatagaggctataaacgctttacctctctgaaagaacacattaaatatcgtcatgaaaagaatgaagataactttagttgctccctgtgcagttacacctttgcatacagaacccaacttgaacgtcacatgacatcacataaatcaggaagagatcaaagacatgtgacgcagtctgggtgtaatcgtaaattcaaatgcactgagtgtggaaaagctttcaaatacaaacatcacctaaaagagcacttaagaattcacagtggagagaagccatatgaatgcccaaactgcaagaaacgcttttcccattctggctcctatagctcacacataagca

SEQ ID NO: 4630 - DNA, 6246 bp, Homo sapiens
  source 1..6246: mol_type = genomic DNA
agacacaagcgagaggatcatggcggatggccccaggtgtaagcgcagaaagcaggcgaacccgcggcgcaataacgttttcagtttaaattctcaactggcaattggccgaaaactcccatctgaagacatgatcatccaaatgtcattttgtgatttggctactgtctgcttgacataggaaagcactatcaagaaagactaatggagtgactatcaaaaggaagtcaatggacaaccttaaacttccaccacaagaggaatataaagaggtccctcctgcaccaagaaagatctgcagatctttttcagtgttcttggaggtgtggggtgtgagaacttgatcagtttgtgtcagccaccttgttctctaaagttacaaattataatactgtggtagaaacaaattcagattcagatgatgaagacaaactgcatattgtggaagaagaaagtgttacagatgcagctgactgtgaaggtgtaccagaggatgacctgccaacagaccagacagtgttaccagggaggagcagtgaaagagaagggaatgctaagaactgctgggaggatgacacaggaaaggaagggcaagaaatcctggggcctgaagctcaggcagatgaagcaggatgtacagtaaaagatgatgaatgcgagtcagatgcagaaaatgagcaaaaccatgatcctaatgttgaagagtttctacaacaacaagacactgctgtcatttttcctgaggcacctgaagaggaccagaggcagggcacaccagaagccagtggtcatgatgaaaatggaacaccagatgcattttcacaattactcacctgtccatattgtgatagaggctataaacgctttacctctctgaaagaacacattaaatatcgtcatgaaaagaatgaagataactttagttgctccctgtgcagttacacctttgcatacagaacccaacttgaacgtcacatgacatcacataaatcaggaagagatcaaagacatgtgacgcagtctgggtgtaatcgtaaattcaaatgcactgagtgtggaaaagctttcaaatacaaacatcacctaaaagagcacttaagaattcacagtggagagaagccatatgaatgcccaaactgcaagaaacgcttttcccattctggctcctatagctcacacataagcagtaagaaatgtatcagcttgatacctgtgaatgggcgaccaagaacaggactcaagacatctcagtgttcttcaccgtctctttcagcatcaccaggcagtcccacacgaccacagatacggcaaaagatagagaataaaccccttcaagaacaactttctgttaaccaaattaaaactgaacctgtggattatgaattcaaacccatagtggttgcttcaggaatcaactgttcaacccctttacaaaatggggttttcactggtggtggcccattacaggcaaccagttctcctcagggcatggtgcaagctgttgttctgccaacagttggtttggtgtctcccataagtatcaatttaagtgatattcagaatgtacttaaagtggcggtagatggtaatgtaataaggcaagtgttggagaataatcaagccaatcttgcatccaaagaacaagaaacaatcaatgcttcacccatacaacaaggtggccattctgttatttcagccatcagtcttcctttggttgatcaagatggaacaaccaaaattatcatcaactacagtcttgagcagcctagccaacttcaagttgttcctcaaaatttaaaaaaagaaaatccagtcgctacaaacagttgtaaaagtgaaaagttaccagaagatcttactgttaagtctgagaaggacaaaagctttgaagggggggtgaatgatagcacttgtcttctgtgtgatgattgtccaggagatattaatgcacttccagaattaaagcactatgacctaaagcagcctactcagcctcctccactccctgcagcagaagctgagaagcctgagtcctctgtttcatcagctactggagatggcaatttgtctcctagtcagccacctttaaagaacctcttgtctctcctaaaagcatattatgctttgaatgcacaaccaagtgcagaagagctctcaaaaattgctgattcagtaaacctaccactggatgtagtaaaaaagtggtttgaaaagatgcaagctggacagatttcagtgcagtcttctgaaccatcttctcctgaaccaggcaaagtaaatatccctgccaagaacaatgatcagcctcaatctgcaaatgcaaatgaaccccaggacagcacagtaaatctacaaagtcctttgaagatgactaactccccagttttaccagtgggatcaaccaccaatggttccagaagtagtacaccatccccatcacctctaaacctttcctcatccagaaatacacagggttacttgtacacagctgagggtgcacaagaagagccacaagtagaacctcttgatctttcactaccaaagcaacagggagaattattagaaaggtcaactatcactagtgtttaccagaacagtgtttattctgtccaggaagaacccttgaacttgtcttgcgcaaaaaaggagccacaaaaggacagttgtgttacagactcagaaccagttgtaaatgtaatcccaccaagtgccaaccccataaatatcgctatacctacagtcactgcccagttacccacaatcgtggccattgctgaccagaacagtgttccatgcttaagagcgctagctgccaataagcaaacgattctgattccccaggtggcatacacctactcaactacggtcagccctgcagtccaagaaccacccttgaaagtgatccagccaaatggaaatcaggatgaaagacaagatactagctcagaaggagtatcaaatgtagaggatcagaatgactctgattctacaccgcccaaaaagaaaatgcggaagacagaaaatggaatgtatgcttgtgatttgtgtgacaagatattccaaaagagtagttcattattgagacataaatatgaacacacaggtaaaagacctcatgagtgtggaatctgtaaaaaggcatttaaacacaaacatcatttgattgaacacatgcgattacattctggagaaaagccctatcaatgtgacaaatgtggaaagcgcttctcacactctgggtcttattctcaacacatgaatcatcgctactcctactgtaagagagaagcggaagaacgtgacagcacagagcaggaagaggcagggcctgaaatcctctcgaatgagcacgtgggtgccagggcgtctccctcacagggcgactcggacgagagagagagtttgacaagggaagaggatgaagacagtgaaaaagaggaagaggaggaggataaagagatggaagaattgcaggaagaaaaagaatgtgaaaaaccacaaggggatgaggaagaggaggaggaggaggaagaagtggaagaagaagaggtagaagaggcagagaatgagggagaagaagcaaaaactgaaggtctgatgaaggatgacagggctgaaagtcaagcaagcagcttaggacaaaaagtaggcgagagtagtgagcaagtgtctgaagaaaagacaaatgaagcctaatcgtttttctagaaggaaaataaattctaattgataatgaatttcgttcaatattatccttgcttttcatggaaacacagtaacctgtatgctgtgattcctgttcactactgtgtaaagtaaaaactaaaaaaatacaaaatacaaaacacacacacacacacacacacacacacacacacacacacaaaataaatccgggtgtgcctgaacctcagacctagtaatttttcatgcagttttcaaagttaggaacaagtttgtaacatgcagcagattagaaaaccttaatgactcagagagcaacaatacaagaggttaaaggaagctgattaattagatatgcatctggcattgttttatcttatcagtattatcactcttatgttggtttattcttaagctgtacaattgggagaaattttataattttttattggtaaacatatgctaaatccgcttcagtattttattatgttttttaaaatgtgagaacttctgcactacaaaattcccttcacagagaagtataatgtagttccaacccgtgctaactaccttttataaattcagtctagaaggtagtaatttctaatatttagatgtcttagtagagcgtattatcatttaaagtgtattgttagccttaagaaagcagctgatagaagaactgaagtttcttactcacgtggtttaaaatggagttcaaaagattgccattgagttctgattgcagggactaacaatgttaatctgataaggacagcaaaatcatcagaatcagtgtttgtgattgtgtttgaatatgtggtaacatatgaaggatatgacatgaagctttgtatctcctttggccttaagcaagacctgtgtgctgtaagtgccatttctcagtattttcaaggctctaacccgccttcatccaatgtgtggcctacaataactagcatttgttgatttgtctcttgtatcaaaattcccaaataaaacttaaaaccactgactctgtcagagaaactgaaacactgggacatttcatccttcaattcctcggtattgattttatgttgattgattttcagaatttctctacagaaacgaaagggaaattttctaatctgctttatccatgtacttgcatttcagacatggacatgctattgttatttggctcataactgtttccaaatgttagttattatggacccaatttattaacaacattagctgatttttacctatcagtattattttatttcttttagtttatagatctgtgcaacatttttgtactgtatgtcttcaaacctggcagtattaatacccttcttactgacatatgtacttttagttttagaaaacttttatatttatgtgtcttatttttatatttctttatttattacacagtgtagtgtataatactgtagtttgtattaatacaataatatattttagtatgaaaatttggaaagttgataagatttaaagtagagatgcaattggttctcctgcattgagatttgatttaacagtgttatgttaacatttatacttgccttggactgtagaacagaacttaaatgggaatgtattagttttacaactacaatcaagtcattttacctttacccagtttttaatataaaacttaaattttgaaattcactgtgtgactaatagcatgatgctctgcagttttattaagaaatcagcctaaccatacaactctcatttccttagtaagccaaattaggattaacttctataaacagtgttgggaacaatgtttaacattttgtgccaatttgttcctgtattcatgtatgtaagttacagatctgactcttcatttttaagttccttgttacatcatggtcattttctagttttttaccagactcccatctcacaataaaatgcatcaacaagcctgaactgctgtcattcttttcatcattatcagtattttctttggaaaactgtgaaatggggtacattgtcatcctgcatttgattcatcttgagctgaatttgggtaacactaaatgttttagacattctccactaaattatggattttcttgtggctaaatgtttctggagaggtcagagttgacaaaacctcttcacaggttgctccttcttcctgaaatccttaatcctccgcatttcatgcttcaggtcatttcagggaagcctgggtttagatgcctttctgactctcagctcctgcacttctgtcatcatacctctgatactattatttatattccttccccactaggaacaggaaccacatttgtcatagtcactctcacattcctcactgcctaacagggtgcctggcataagttgggacaacagatatttgttgaataaaaatataatttgcatgtttatggagctcagctatgttctcactttttttgcttctaattccagaatatatgttaaatgatctaataatttgattattttcttataagtcttattaaacactagtcataatagacacaataaattatgccttctttttctattgcctta

SEQ ID NO: 4631 - DNA, 6267 bp, Homo sapiens
  source 1..6267: mol_type = genomic DNA
tttctccctcccctctgggatgcgaaacgcgaggttttgtaacctttcctggcaattttagattttgtgtgggatttcctgtctagaagcagatacgaagatttttaagctgtttcaagatgtttccttccaatccataattatatttttaatatattcgagccatcattaaaatcactgctttcgtgattttaattattcaaataaacacttgcattttaaagacgtctgttgattataaacgaaaggtattttggtattctcattgtggagagatgacttgttatagcaaggagtggagcataggctattgcaattttaatttcctgttttagcgtcaaatagtgtgtgttccatattgagctgttgccgctgttgctgatgtggctttatgaaagttacaaattataatactgtggtagaaacaaattcagattcagatgatgaagacaaactgcatattgtggaagaagaaagtgttacagatgcagctgactgtgaaggtgtaccagaggatgacctgccaacagaccagacagtgttaccagggaggagcagtgaaagagaagggaatgctaagaactgctgggaggatgacacaggaaaggaagggcaagaaatcctggggcctgaagctcaggcagatgaagcaggatgtacagtaaaagatgatgaatgcgagtcagatgcagaaaatgagcaaaaccatgatcctaatgttgaagagtttctacaacaacaagacactgctgtcatttttcctgaggcacctgaagaggaccagaggcagggcacaccagaagccagtggtcatgatgaaaatggaacaccagatgcattttcacaattactcacctgtccatattgtgatagaggctataaacgctttacctctctgaaagaacacattaaatatcgtcatgaaaagaatgaagataactttagttgctccctgtgcagttacacctttgcatacagaacccaacttgaacgtcacatgacatcacataaatcaggaagagatcaaagacatgtgacgcagtctgggtgtaatcgtaaattcaaatgcactgagtgtggaaaagctttcaaatacaaacatcacctaaaagagcacttaagaattcacagtggagagaagccatatgaatgcccaaactgcaagaaacgcttttcccattctggctcctatagctcacacataagcagtaagaaatgtatcagcttgatacctgtgaatgggcgaccaagaacaggactcaagacatctcagtgttcttcaccgtctctttcagcatcaccaggcagtcccacacgaccacagatacggcaaaagatagagaataaaccccttcaagaacaactttctgttaaccaaattaaaactgaacctgtggattatgaattcaaacccatagtggttgcttcaggaatcaactgttcaacccctttacaaaatggggttttcactggtggtggcccattacaggcaaccagttctcctcagggcatggtgcaagctgttgttctgccaacagttggtttggtgtctcccataagtatcaatttaagtgatattcagaatgtacttaaagtggcggtagatggtaatgtaataaggcaagtgttggagaataatcaagccaatcttgcatccaaagaacaagaaacaatcaatgcttcacccatacaacaaggtggccattctgttatttcagccatcagtcttcctttggttgatcaagatggaacaaccaaaattatcatcaactacagtcttgagcagcctagccaacttcaagttgttcctcaaaatttaaaaaaagaaaatccagtcgctacaaacagttgtaaaagtgaaaagttaccagaagatcttactgttaagtctgagaaggacaaaagctttgaagggggggtgaatgatagcacttgtcttctgtgtgatgattgtccaggagatattaatgcacttccagaattaaagcactatgacctaaagcagcctactcagcctcctccactccctgcagcagaagctgagaagcctgagtcctctgtttcatcagctactggagatggcaatttgtctcctagtcagccacctttaaagaacctcttgtctctcctaaaagcatattatgctttgaatgcacaaccaagtgcagaagagctctcaaaaattgctgattcagtaaacctaccactggatgtagtaaaaaagtggtttgaaaagatgcaagctggacagatttcagtgcagtcttctgaaccatcttctcctgaaccaggcaaagtaaatatccctgccaagaacaatgatcagcctcaatctgcaaatgcaaatgaaccccaggacagcacagtaaatctacaaagtcctttgaagatgactaactccccagttttaccagtgggatcaaccaccaatggttccagaagtagtacaccatccccatcacctctaaacctttcctcatccagaaatacacagggttacttgtacacagctgagggtgcacaagaagagccacaagtagaacctcttgatctttcactaccaaagcaacagggagaattattagaaaggtcaactatcactagtgtttaccagaacagtgtttattctgtccaggaagaacccttgaacttgtcttgcgcaaaaaaggagccacaaaaggacagttgtgttacagactcagaaccagttgtaaatgtaatcccaccaagtgccaaccccataaatatcgctatacctacagtcactgcccagttacccacaatcgtggccattgctgaccagaacagtgttccatgcttaagagcgctagctgccaataagcaaacgattctgattccccaggtggcatacacctactcaactacggtcagccctgcagtccaagaaccacccttgaaagtgatccagccaaatggaaatcaggatgaaagacaagatactagctcagaaggagtatcaaatgtagaggatcagaatgactctgattctacaccgcccaaaaagaaaatgcggaagacagaaaatggaatgtatgcttgtgatttgtgtgacaagatattccaaaagagtagttcattattgagacataaatatgaacacacaggtaaaagacctcatgagtgtggaatctgtaaaaaggcatttaaacacaaacatcatttgattgaacacatgcgattacattctggagaaaagccctatcaatgtgacaaatgtggaaagcgcttctcacactctgggtcttattctcaacacatgaatcatcgctactcctactgtaagagagaagcggaagaacgtgacagcacagagcaggaagaggcagggcctgaaatcctctcgaatgagcacgtgggtgccagggcgtctccctcacagggcgactcggacgagagagagagtttgacaagggaagaggatgaagacagtgaaaaagaggaagaggaggaggataaagagatggaagaattgcaggaagaaaaagaatgtgaaaaaccacaaggggatgaggaagaggaggaggaggaggaagaagtggaagaagaagaggtagaagaggcagagaatgagggagaagaagcaaaaactgaaggtctgatgaaggatgacagggctgaaagtcaagcaagcagcttaggacaaaaagtaggcgagagtagtgagcaagtgtctgaagaaaagacaaatgaagcctaatcgtttttctagaaggaaaataaattctaattgataatgaatttcgttcaatattatccttgcttttcatggaaacacagtaacctgtatgctgtgattcctgttcactactgtgtaaagtaaaaactaaaaaaatacaaaatacaaaacacacacacacacacacacacacacacacacacacacacaaaataaatccgggtgtgcctgaacctcagacctagtaatttttcatgcagttttcaaagttaggaacaagtttgtaacatgcagcagattagaaaaccttaatgactcagagagcaacaatacaagaggttaaaggaagctgattaattagatatgcatctggcattgttttatcttatcagtattatcactcttatgttggtttattcttaagctgtacaattgggagaaattttataattttttattggtaaacatatgctaaatccgcttcagtattttattatgttttttaaaatgtgagaacttctgcactacaaaattcccttcacagagaagtataatgtagttccaacccgtgctaactaccttttataaattcagtctagaaggtagtaatttctaatatttagatgtcttagtagagcgtattatcatttaaagtgtattgttagccttaagaaagcagctgatagaagaactgaagtttcttactcacgtggtttaaaatggagttcaaaagattgccattgagttctgattgcagggactaacaatgttaatctgataaggacagcaaaatcatcagaatcagtgtttgtgattgtgtttgaatatgtggtaacatatgaaggatatgacatgaagctttgtatctcctttggccttaagcaagacctgtgtgctgtaagtgccatttctcagtattttcaaggctctaacccgccttcatccaatgtgtggcctacaataactagcatttgttgatttgtctcttgtatcaaaattcccaaataaaacttaaaaccactgactctgtcagagaaactgaaacactgggacatttcatccttcaattcctcggtattgattttatgttgattgattttcagaatttctctacagaaacgaaagggaaattttctaatctgctttatccatgtacttgcatttcagacatggacatgctattgttatttggctcataactgtttccaaatgttagttattatggacccaatttattaacaacattagctgatttttacctatcagtattattttatttcttttagtttatagatctgtgcaacatttttgtactgtatgtcttcaaacctggcagtattaatacccttcttactgacatatgtacttttagttttagaaaacttttatatttatgtgtcttatttttatatttctttatttattacacagtgtagtgtataatactgtagtttgtattaatacaataatatattttagtatgaaaatttggaaagttgataagatttaaagtagagatgcaattggttctcctgcattgagatttgatttaacagtgttatgttaacatttatacttgccttggactgtagaacagaacttaaatgggaatgtattagttttacaactacaatcaagtcattttacctttacccagtttttaatataaaacttaaattttgaaattcactgtgtgactaatagcatgatgctctgcagttttattaagaaatcagcctaaccatacaactctcatttccttagtaagccaaattaggattaacttctataaacagtgttgggaacaatgtttaacattttgtgccaatttgttcctgtattcatgtatgtaagttacagatctgactcttcatttttaagttccttgttacatcatggtcattttctagttttttaccagactcccatctcacaataaaatgcatcaacaagcctgaactgctgtcattcttttcatcattatcagtattttctttggaaaactgtgaaatggggtacattgtcatcctgcatttgattcatcttgagctgaatttgggtaacactaaatgttttagacattctccactaaattatggattttcttgtggctaaatgtttctggagaggtcagagttgacaaaacctcttcacaggttgctccttcttcctgaaatccttaatcctccgcatttcatgcttcaggtcatttcagggaagcctgggtttagatgcctttctgactctcagctcctgcacttctgtcatcatacctctgatactattatttatattccttccccactaggaacaggaaccacatttgtcatagtcactctcacattcctcactgcctaacagggtgcctggcataagttgggacaacagatatttgttgaataaaaatataatttgcatgtttatggagctcagctatgttctcactttttttgcttctaattccagaatatatgttaaatgatctaataatttgattattttcttataagtcttattaaacactagtcataatagacacaataaattatgccttctttttctattgcctt

SEQ ID NO: 4632 - DNA, 3240 bp, Homo sapiens
  source 1..3240: mol_type = genomic DNA
gggggggaagggggagggagggggaggaggtgactcgagcatttagacacaagcgagaggatcatggcggatggccccaggtgtaagcgcagaaagcaggcgaacccgcggcgcaataacgttacaaattataatactgtggtagaaacaaattcagattcagatgatgaagacaaactgcatattgtggaagaagaaagtgttacagatgcagctgactgtgaaggtgtaccagaggatgacctgccaacagaccagacagtgttaccagggaggagcagtgaaagagaagggaatgctaagaactgctgggaggatgacagaaaggaagggcaagaaatcctggggcctgaagctcaggcagatgaagcaggatgtacagtaaaagatgatgaatgcgagtcagatgcagaaaatgagcaaaaccatgatcctaatgttgaagagtttctacaacaacaagacactgctgtcatttttcctgaggcacctgaagaggaccagaggcagggcacaccagaagccagtggtcatgatgaaaatggaacaccagatgcattttcacaattactcacctgtccatattgtgatagaggctataaacgctttacctctctgaaagaacacattaaatatcgtcatgaaaagaatgaagataactttagttgctccctgtgcagttacacctttgcatacagaacccaacttgaacgtcacatgacatcacataaatcaggaagagatcaaagacatgtgacgcagtctgggtgtaatcgtaaattcaaatgcactgagtgtggaaaagctttcaaatacaaacatcacctaaaagagcacttaagaattcacagtggagagaagccatatgaatgcccaaactgcaagaaacgcttttcccattctggctcctatagctcacacataagcagtaagaaatgtatcagcttgatacctgtgaatgggcgaccaagaacaggactcaagacatctcagtgttcttcaccgtctctttcagcatcaccaggcagtcccacacgaccacagatacggcaaaagatagagaataaaccccttcaagaacaactttctgttaaccaaattaaaactgaacctgtggattatgaattcaaacccatagtggttgcttcaggaatcaactgttcaacccctttacaaaatggggttttcactggtggtggcccattacaggcaaccagttctcctcagggcatggtgcaagctgttgttctgccaacagttggtttggtgtctcccataagtatcaatttaagtgatattcagaatgtacttaaagtggcggtagatggtaatgtaataaggcaagtgttggagaataatcaagccaatcttgcatccaaagaacaagaaacaatcaatgcttcacccatacaacaaggtggccattctgttatttcagccatcagtcttcctttggttgatcaagatggaacaaccaaaattatcatcaactacagtcttgagcagcctagccaacttcaagttgttcctcaaaatttaaaaaaagaaaatccagtcgctacaaacagttgtaaaagtgaaaagttaccagaagatcttactgttaagtctgagaaggacaaaagctttgaagggggggtgaatgatagcacttgtcttctgtgtgatgattgtccaggagatattaatgcacttccagaattaaagcactatgacctaaagcagcctactcagcctcctccactccctgcagcagaagctgagaagcctgagtcctctgtttcatcagctactggagatggcaatttgtctcctagtcagccacctttaaagaacctcttgtctctcctaaaagcatattatgctttgaatgcacaaccaagtgcagaagagctctcaaaaattgctgattcagtaaacctaccactggatgtagtaaaaaagtggtttgaaaagatgcaagctggacagatttcagtgcagtcttctgaaccatcttctcctgaaccaggcaaagtaaatatccctgccaagaacaatgatcagcctcaatctgcaaatgcaaatgaaccccaggacagcacagtaaatctacaaagtcctttgaagatgactaactccccagttttaccagtgggatcaaccaccaatggttccagaagtagtacaccatccccatcacctctaaacctttcctcatccagaaatacacagggttacttgtacacagctgagggtgcacaagaagagccacaagtagaacctcttgatctttcactaccaaagcaacagggagaattattagaaaggtcaactatcactagtgtttaccagaacagtgtttattctgtccaggaagaacccttgaacttgtcttgcgcaaaaaaggagccacaaaaggacagttgtgttacagactcagaaccagttgtaaatgtaatcccaccaagtgccaaccccataaatatcgctatacctacagtcactgcccagttacccacaatcgtggccattgctgaccagaacagtgttccatgcttaagagcgctagctgccaataagcaaacgattctgattccccaggtggcatacacctactcaactacggtcagccctgcagtccaagaaccacccttgaaagtgatccagccaaatggaaatcaggatgaaagacaagatactagctcagaaggagtatcaaatgtagaggatcagaatgactctgattctacaccgcccaaaaagaaaatgcggaagacagaaaatggaatgtatgcttgtgatttgtgtgacaagatattccaaaagagtagttcattattgagacataaatatgaacacacaggtaaaagacctcatgagtgtggaatctgtaaaaaggcatttaaacacaaacatcatttgattgaacacatgcgattacattctggagaaaagccctatcaatgtgacaaatgtggaaagcgcttctcacactctgggtcttattctcaacacatgaatcatcgctactcctactgtaagagagaagcggaagaacgtgacagcacagagcaggaagaggcagggcctgaaatcctctcgaatgagcacgtgggtgccagggcgtctccctcacagggcgactcggacgagagagagagtttgacaagggaagaggatgaagacagtgaaaaagaggaagaggaggaggataaagagatggaagaattgcaggaagaaaaacataaaaagaaaaaa

SEQ ID NO: 4633 - DNA, 2312 bp, Homo sapiens
  source 1..2312: mol_type = genomic DNA
atttagacacaagcgagaggatcatggcggatggccccaggtgtaagcgcagaaagcaggcgaacccgcggcgcaataacggaacaccagatgcattttcacaattactcacctgtccatattgtgatagaggctataaacgctttacctctctgaaagaacacattaaatatcgtcatgaaaagaatgaagataactttagttgctccctgtgcagttacacctttgcatacagaacccaacttgaacgtcacatgacatcacataaatcaggaagagatcaaagacatgtgacgcagtctgggtgtaatcgtaaattcaaatgcactgagtgtggaaaagctttcaaatacaaacatcacctaaaagagcacttaagaattcacagtggagagaagccatatgaatgcccaaactgcaagaaacgcttttcccattctggctcctatagctcacacataagcagtaagaaatgtatcagcttgatacctgtgaatgggcgaccaagaacaggactcaagacatctcagtgttcttcaccgtctctttcagcatcaccaggcagtcccacacgaccacagatacggcaaaagatagagaataaaccccttcaagaacaactttctgttaaccaaattaaaactgaacctgtggattatgaattcaaacccatagtggttgcttcaggaatcaactgttcaacccctttacaaaatggggttttcactggtggtggcccattacaggcaaccagttctcctcagggcatggtgcaagctgttgttctgccaacagttggtttggtgtctcccataagtatcaatttaagtgatattcagaatgtacttaaagtggcggtagatggtaatgtaataaggcaagtgttggagaataatcaagccaatcttgcatccaaagaacaagaaacaatcaatgcttcacccatacaacaaggtggccattctgttatttcagccatcagtcttcctttggttgatcaagatggaacaaccaaaattatcatcaactacagtcttgagcagcctagccaacttcaagttgttcctcaaaatttaaaaaaagaaaatccagtcgctacaaacagttgtaaaagtgaaaagttaccagaagatcttactgttaagtctgagaaggacaaaagctttgaagggggggtgaatgatagcacttgtcttctgtgtgatgattgtccaggagatattaatgcacttccagaattaaagcactatgacctaaagcagcctactcagcctcctccactccctgcagcagaagctgagaagcctgagtcctctgtttcatcagctactggagatggcaatttgtctcctagtcagccacctttaaagaacctcttgtctctcctaaaagcatattatgctttgaatgcacaaccaagtgcagaagagctctcaaaaattgctgattcagtaaacctaccactggatgtagtaaaaaagtggtttgaaaagatgcaagctggacagatttcagtgcagtcttctgaaccatcttctcctgaaccaggcaaagtaaatatccctgccaagaacaatgatcagcctcaatctgcaaatgcaaatgaaccccaggacagcacagtaaatctacaaagtcctttgaagatgactaactccccagttttaccagtgggatcaaccaccaatggttccagaagtagtacaccatccccatcacctctaaacctttcctcatccagaaatacacagggttacttgtacacagctgagggtgcacaagaagagccacaagtagaacctcttgatctttcactaccaaagcaacagggagaagaagcaaaaactgaaggtctgatgaaggatgacagggctgaaagtcaagcaagcagcttaggacaaaaagtaggcgagagtagtgagcaagtgtctgaagaaaagacaaatgaagcctaatcgtttttctagaaggaaaataaattctaattgataatgaatttcgttcaatattatccttgcttttcatggaaacacagtaacctgtatgctgtgattcctgttcactactgtgtaaagtaaaaactaaaaaaatacaaaatacaaaacacacacacacacacacacacacacacacacacacacacaaaataaatccgggtgtgcctgaacctcagacctagtaatttttcatgcagttttcaaagttaggaacaagtttgtaacatgcagcagattagaaaaccttaatgactcagagagcaacaatacaagaggttaaaggaagctgattaattagatatgcatctggcattg

SEQ ID NO: 4634 - DNA, 3315 bp, Homo sapiens
  source 1..3315: mol_type = genomic DNA
aagcgagaggatcatggcggatggccccaggtgtaagcgcagaaagcaggcgaacccgcggcgcaataacggaaaggaagggcaagaaatcctggggcctgaagctcaggcagatgaagcaggatgtacagtaaaagatgatgaatgcgagtcagatgcagaaaatgagcaaaaccatgatcctaatgttgaagagtttctacaacaacaagacactgctgtcatttttcctgaggcacctgaagaggaccagaggcagggcacaccagaagccagtggtcatgatgaaaatggaacaccagatgcattttcacaattactcacctgtccatattgtgatagaggctataaacgctttacctctctgaaagaacacattaaatatcgtcatgaaaagaatgaagataactttagttgctccctgtgcagttacacctttgcatacagaacccaacttgaacgtcacatgacatcacataaatcaggaagagatcaaagacatgtgacgcagtctgggtgtaatcgtaaattcaaatgcactgagtgtggaaaagctttcaaatacaaacatcacctaaaagagcacttaagaattcacagtggagagaagccatatgaatgcccaaactgcaagaaacgcttttcccattctggctcctatagctcacacataagcagtaagaaatgtatcagcttgatacctgtgaatgggcgaccaagaacaggactcaagacatctcagtgttcttcaccgtctctttcagcatcaccaggcagtcccacacgaccacagatacggcaaaagatagagaataaaccccttcaagaacaactttctgttaaccaaattaaaactgaacctgtggattatgaattcaaacccatagtggttgcttcaggaatcaactgttcaacccctttacaaaatggggttttcactggtggtggcccattacaggcaaccagttctcctcagggcatggtgcaagctgttgttctgccaacagttggtttggtgtctcccataagtatcaatttaagtgatattcagaatgtacttaaagtggcggtagatggtaatgtaataaggcaagtgttggagaataatcaagccaatcttgcatccaaagaacaagaaacaatcaatgcttcacccatacaacaaggtggccattctgttatttcagccatcagtcttcctttggttgatcaagatggaacaaccaaaattatcatcaactacagtcttgagcagcctagccaacttcaagttgttcctcaaaatttaaaaaaagaaaatccagtcgctacaaacagttgtaaaagtgaaaagttaccagaagatcttactgttaagtctgagaaggacaaaagctttgaagggggggtgaatgatagcacttgtcttctgtgtgatgattgtccaggagatattaatgcacttccagaattaaagcactatgacctaaagcagcctactcagcctcctccactccctgcagcagaagctgagaagcctgagtcctctgtttcatcagctactggagatggcaatttgtctcctagtcagccacctttaaagaacctcttgtctctcctaaaagcatattatgctttgaatgcacaaccaagtgcagaagagctctcaaaaattgctgattcagtaaacctaccactggatgtagtaaaaaagtggtttgaaaagatgcaagctggacagatttcagtgcagtcttctgaaccatcttctcctgaaccaggcaaagtaaatatccctgccaagaacaatgatcagcctcaatctgcaaatgcaaatgaaccccaggacagcacagtaaatctacaaagtcctttgaagatgactaactccccagttttaccagtgggatcaaccaccaatggttccagaagtagtacaccatccccatcacctctaaacctttcctcatccagaaatacacagggttacttgtacacagctgagggtgcacaagaagagccacaagtagaacctcttgatctttcactaccaaagcaacagggagaattattagaaaggtcaactatcactagtgtttaccagaacagtgtttattctgtccaggaagaacccttgaacttgtcttgcgcaaaaaaggagccacaaaaggacagttgtgttacagactcagaaccagttgtaaatgtaatcccaccaagtgccaaccccataaatatcgctatacctacagtcactgcccagttacccacaatcgtggccattgctgaccagaacagtgttccatgcttaagagcgctagctgccaataagcaaacgattctgattccccaggtggcatacacctactcaactacggtcagccctgcagtccaagaaccacccttgaaagtgatccagccaaatggaaatcaggatgaaagacaagatactagctcagaaggagtatcaaatgtagaggatcagaatgactctgattctacaccgcccaaaaagaaaatgcggaagacagaaaatggaatgtatgcttgtgatttgtgtgacaagatattccaaaagagtagttcattattgagacataaatatgaacacacaggtaaaagacctcatgagtgtggaatctgtaaaaaggcatttaaacacaaacatcatttgattgaacacatgcgattacattctggagaaaagccctatcaatgtgacaaatgtggaaagcgcttctcacactctgggtcttattctcaacacatgaatcatcgctactcctactgtaagagagaagcggaagaacgtgacagcacagagcaggaagaggcagggcctgaaatcctctcgaatgagcacgtgggtgccagggcgtctccctcacagggcgactcggacgagagagagagtttgacaagggaagaggatgaagacagtgaaaaagaggaagaggaggaggataaagagatggaagaattgcaggaagaaaaagaatgtgaaaaaccacaaggggatgaggaagaggaggaggaggaggaagaagtggaagaagaagaggtagaagaggcagagaatgagggagaagaagcaaaaactgaaggtctgatgaaggatgacagggctgaaagtcaagcaagcagcttaggacaaaaagtaggcgagagtagtgagcaagtgtctgaagaaaagacaaatgaagcctaatcgtttttctagaaggaaaataaattctaattgataatgaatttcgttcaatattatccttgcttttcatggaaacacagtaacctgtatgctgtgattcctgttcactactgtgtaaagtaaaaact

SEQ ID NO: 4635 - DNA, 3306 bp, Homo sapiens
  source 1..3306: mol_type = genomic DNA
aagcgagaggatcatggcggatggccccaggtgtaagcgcagaaagcaggcgaacccgcggcgcaataacggaaaggaagggcaagaaatcctggggcctgaagctcaggcagatgaagcaggatgtacagtaaaagatgatgaatgcgagtcagatgcagaaaatgagcaaaaccatgatcctaatgttgaagagtttctacaacaacaagacactgctgtcatttttcctgaggcacctgaagaggaccagaggcagggcacaccagaagccagtggtcatgatgaaaatggaacaccagatgcattttcacaattactcacctgtccatattgtgataggctataaacgctttacctctctgaaagaacacattaaatatcgtcatgaaaagaatgaagataactttagttgctccctgtgcagttacacctttgcatacagaacccaacttgaacgtcacatgacatcacataaatcaggaagagatcaaagacatgtgacgcagtctgggtgtaatcgtaaattcaaatgcactgagtgtggaaaagctttcaaatacaaacatcacctaaaagagcacttaagaattcacagtggagagaagccatatgaatgcccaaactgcaagaaacgcttttcccattctggctcctatagctcacacataagcagtaagaaatgtatcagcttgatacctgtgaatgggcgaccaagaacaggactcaagacatctcagtgttcttcaccgtctctttcagcatcaccaggcagtcccacacgaccacagatacggcaaaagatagagaataaaccccttcaagaacaactttctgttaaccaaattaaaactgaacctgtggattatgaattcaaacccatagtggttgcttcaggaatcaactgttcaacccctttacaaaatggggttttcactggtggtggcccattacaggcaaccagttctcctcagggcatggtgcaagctgttgttctgccaacagttggtttggtgtctcccataagtatcaatttaagtgatattcagaatgtacttaaagtggcggtagatggtaatgtaataaggcaagtgttggagaataatcaagccaatcttgcatccaaagaacaagaaacaatcaatgcttcacccatacaacaaggtggccattctgttatttcagccatcagtcttcctttggttgatcaagatggaacaaccaaaattatcatcaactacagtcttgagcagcctagccaacttcaagttgttcctcaaaatttaaaaaaagaaaatccagtcgctacaaacagttgtaaaagtgaaaagttaccagaagatcttactgttaagtctgagaaggacaaaagctttgaagggggggtgaatgatagcacttgtcttctgtgtgatgattgtccaggagatattaatgcacttccagaattaaagcactatgacctaaagcagcctactcagcctcctccactccctgcagcagaagctgagaagcctgagtcctctgtttcatcagctactggagatggcaatttgtctcctagtcagccacctttaaagaacctcttgtctctcctaaaagcatattatgctttgaatgcacaaccaagtgcagaagagctctcaaaaattgctgattcagtaaacctaccactggatgtagtaaaaaagtggtttgaaaagatgcaagctggacagatttcagtgcagtcttctgaaccatcttctcctgaaccaggcaaagtaaatatccctgccaagaacaatgatcagcctcaatctgcaaatgcaaatgaaccccaggacagcacagtaaatctacaaagtcctttgaagatgactaactccccagttttaccagtgggatcaaccaccaatggttccagaagtagtacaccatccccatcacctctaaacctttcctcatccagaaatacacagggttacttgtacacagctgagggtgcacaagaagagccacaagtagaacctcttgatctttcactaccaaagcaacagggagaattattagaaaggtcaactatcactagtgtttaccagaacagtgtttattctgtccaggaagaacccttgaacttgtcttgcgcaaaaaaggagccacaaaaggacagttgtgttacagactcagaaccagttgtaaatgtaatcccaccaagtgccaaccccataaatatcgctatacctacagtcactgcccagttacccacaatcgtggccattgctgaccagaacagtgttccatgcttaagagcgctagctgccaataagcaaacgattctgattccccaggtggcatacacctactcaactacggtcagccctgcagtccaagaaccacccttgaaagtgatccagccaaatggaaatcaggatgaaagacaagatactagctcagaaggagtatcaaatgtagaggatcagaatgactctgattctacaccgcccaaaaagaaaatgcggaagacagaaaatggaatgtatgcttgtgatttgtgtgacaagatattccaaaagagtagttcattattgagacataaatatgaacacacaggtaaaagacctcatgagtgtggaatctgtaaaaaggcatttaaacacaaacatcatttgattgaacacatgcgattacattctggagaaaagccctatcaatgtgacaaatgtggaaagcgcttctcacactctgggtcttattctcaacacatgaatcatcgctactcctactgtaagagagaagcggaagaacgtgacagcacagagcaggaagaggcagggcctgaaatcctctcgaatgagcacgtgggtgccagggcgtctccctcacagggcgactcggacgagagagagagtttgacaagggaagaggatgaagacagtgaaaaagaggaagaggaggaggataaagagatggaagaattgcaggaagaaaaagaatgtgaaaaaccacaaggggatgaggaagaggaggaggaggaggaagaagtggaagaagaagaggtagaagaggcagagaatgagggagaagaagcaaaaactgaaggtctgatgaaggatgacagggctgaaagtcaagcaagcagcttaggacaaaaagtaggcgagagtagtgagcaagtgtctgaagaaaagacaaatgaagcctaatcgtttttctagaaggaaaataaattctaattgataatgaatttcgttcaatattatccttgcttttcatggaaacacagtaacctgtatgctgtgattcctgttcactactgtgtaaagt

SEQ ID NO: 4636 - DNA, 5972 bp, Homo sapiens
  source 1..5972: mol_type = genomic DNA
gggggggaagggggagggagggggaggaggtgactcgagcatttagacacaagcgagaggatcatggcggatggccccaggtgtaagcgcagaaagcaggcgaacccgcggcgcaataacgttacaaattataatactgtggtagaaacaaattcagattcagatgatgaagacaaactgcatattgtggaagaagaaagtgttacagatgcagctgactgtgaaggtgtaccagaggatgacctgccaacagaccagacagtgttaccagggaggagcagtgaaagagaagggaatgctaagaactgctgggaggatgacagaaaggaagggcaagaaatcctggggcctgaagctcaggcagatgaagcaggatgtacagtaaaagatgatgaatgcgagtcagatgcagaaaatgagcaaaaccatgatcctaatgttgaagagtttctacaacaacaagacactgctgtcatttttcctgaggcacctgaagaggaccagaggcagggcacaccagaagccagtggtcatgatgaaaatggaacaccagatgcattttcacaattactcacctgtccatattgtgatagaggctataaacgctttacctctctgaaagaacacattaaatatcgtcatgaaaagaatgaagataactttagttgctccctgtgcagttacacctttgcatacagaacccaacttgaacgtcacatgacatcacataaatcaggaagagatcaaagacatgtgacgcagtctgggtgtaatcgtaaattcaaatgcactgagtgtggaaaagctttcaaatacaaacatcacctaaaagagcacttaagaattcacagtggagagaagccatatgaatgcccaaactgcaagaaacgcttttcccattctggctcctatagctcacacataagcagtaagaaatgtatcagcttgatacctgtgaatgggcgaccaagaacaggactcaagacatctcagtgttcttcaccgtctctttcagcatcaccaggcagtcccacacgaccacagatacggcaaaagatagagaataaaccccttcaagaacaactttctgttaaccaaattaaaactgaacctgtggattatgaattcaaacccatagtggttgcttcaggaatcaactgttcaacccctttacaaaatggggttttcactggtggtggcccattacaggcaaccagttctcctcagggcatggtgcaagctgttgttctgccaacagttggtttggtgtctcccataagtatcaatttaagtgatattcagaatgtacttaaagtggcggtagatggtaatgtaataaggcaagtgttggagaataatcaagccaatcttgcatccaaagaacaagaaacaatcaatgcttcacccatacaacaaggtggccattctgttatttcagccatcagtcttcctttggttgatcaagatggaacaaccaaaattatcatcaactacagtcttgagcagcctagccaacttcaagttgttcctcaaaatttaaaaaaagaaaatccagtcgctacaaacagttgtaaaagtgaaaagttaccagaagatcttactgttaagtctgagaaggacaaaagctttgaagggggggtgaatgatagcacttgtcttctgtgtgatgattgtccaggagatattaatgcacttccagaattaaagcactatgacctaaagcagcctactcagcctcctccactccctgcagcagaagctgagaagcctgagtcctctgtttcatcagctactggagatggcaatttgtctcctagtcagccacctttaaagaacctcttgtctctcctaaaagcatattatgctttgaatgcacaaccaagtgcagaagagctctcaaaaattgctgattcagtaaacctaccactggatgtagtaaaaaagtggtttgaaaagatgcaagctggacagatttcagtgcagtcttctgaaccatcttctcctgaaccaggcaaagtaaatatccctgccaagaacaatgatcagcctcaatctgcaaatgcaaatgaaccccaggacagcacagtaaatctacaaagtcctttgaagatgactaactccccagttttaccagtgggatcaaccaccaatggttccagaagtagtacaccatccccatcacctctaaacctttcctcatccagaaatacacagggttacttgtacacagctgagggtgcacaagaagagccacaagtagaacctcttgatctttcactaccaaagcaacagggagaattattagaaaggtcaagtttaccagaacagtgtttattctgtccaggaagaacccttgaacttgtcttgaaaaaggagccacaaaaggacagttgtgttacagactcagaaccagttgtaaatgtaatcccaccaagtgccaaccccataaatatcgctatacctacagtcactgcccagttacccacaatcgtggccattgctgaccagaacagtgttccatgcttaagagcgctagctgccaataagcaaacgattctgattccccaggtggcatacacctactcaactacggtcagccctgcagtccaagaaccacccttgaaagtgatccagccaaatggaaatcaggatgaaagacaagatactagctcagaaggagtatcaaatgtagaggatcagaatgactctgattctacaccgcccaaaaagaaaatgcggaagacagaaaatggaatgtatgcttgtgatttgtgtgacaagatattccaaaagagtagttcattattgagacataaatatgaacacacaggtaaaagacctcatgagtgtggaatctgtaaaaaggcatttaaacacaaacatcatttgattgaacacatgcgattacattctggagaaaagccctatcaatgtgacaaatgtggaaagcgcttctcacactctgggtcttattctcaacacatgaatcatcgctactcctactgtaagagagaagcggaagaacgtgacagcacagagcaggaagaggcagggcctgaaatcctctcgaatgagcacgtgggtgccagggcgtctccctcacagggcgactcggacgagagagagagtttgacaagggaagaggatgaagacagtgaaaaagaggaagaggaggaggataaagagatggaagaattgcaggaagaaaaagaatgtgaaaaaccacaaggggatgaggaagaggaggaggaggaggaagaagtggaagaagaagaggtagaagaggcagagaatgagggagaagaagcaaaaactgaaggtctgatgaaggatgacagggctgaaagtcaagcaagcagcttaggacaaaaagtaggcgagagtagtgagcaagtgtctgaagaaaagacaaatgaagcctaatcgtttttctagaaggaaaataaattctaattgataatgaatttcgttcaatattatccttgcttttcatggaaacacagtaacctgtatgctgtgattcctgttcactactgtgtaaagtaaaaactaaaaaaatacaaaatacaaaacacacacacacacacacacacacacacacacacacacacaaaataaatccgggtgtgcctgaacctcagacctagtaatttttcatgcagttttcaaagttaggaacaagtttgtaacatgcagcagattagaaaaccttaatgactcagagagcaacaatacaagaggttaaaggaagctgattaattagatatgcatctggcattgttttatcttatcagtattatcactcttatgttggtttattcttaagctgtacaattgggagaaattttataattttttattggtaaacatatgctaaatccgcttcagtattttattatgttttttaaaatgtgagaacttctgcactacaaaattcccttcacagagaagtataatgtagttccaacccgtgctaactaccttttataaattcagtctagaaggtagtaatttctaatatttagatgtcttagtagagcgtattatcatttaaagtgtattgttagccttaagaaagcagctgatagaagaactgaagtttcttactcacgtggtttaaaatggagttcaaaagattgccattgagttctgattgcagggactaacaatgttaatctgataaggacagcaaaatcatcagaatcagtgtttgtgattgtgtttgaatatgtggtaacatatgaaggatatgacatgaagctttgtatctcctttggccttaagcaagacctgtgtgctgtaagtgccatttctcagtattttcaaggctctaacccgccttcatccaatgtgtggcctacaataactagcatttgttgatttgtctcttgtatcaaaattcccaaataaaacttaaaaccactgactctgtcagagaaactgaaacactgggacatttcatccttcaattcctcggtattgattttatgttgattgattttcagaatttctctacagaaacgaaagggaaattttctaatctgctttatccatgtacttgcatttcagacatggacatgctattgttatttggctcataactgtttccaaatgttagttattatggacccaatttattaacaacattagctgatttttacctatcagtattattttatttcttttagtttatagatctgtgcaacatttttgtactgtatgtcttcaaacctggcagtattaatacccttcttactgacatatgtacttttagttttagaaaacttttatatttatgtgtcttatttttatatttctttatttattacacagtgtagtgtataatactgtagtttgtattaatacaataatatattttagtatgaaaatttggaaagttgataagatttaaagtagagatgcaattggttctcctgcattgagatttgatttaacagtgttatgttaacatttatacttgccttggactgtagaacagaacttaaatgggaatgtattagttttacaactacaatcaagtcattttacctttacccagtttttaatataaaacttaaattttgaaattcactgtgtgactaatagcatgatgctctgcagttttattaagaaatcagcctaaccatacaactctcatttccttagtaagccaaattaggattaacttctataaacagtgttgggaacaatgtttaacattttgtgccaatttgttcctgtattcatgtatgtaagttacagatctgactcttcatttttaagttccttgttacatcatggtcattttctagttttttaccagactcccatctcacaataaaatgcatcaacaagcctgaactgctgtcattcttttcatcattatcagtattttctttggaaaactgtgaaatggggtacattgtcatcctgcatttgattcatcttgagctgaatttgggtaacactaaatgttttagacattctccactaaattatggattttcttgtggctaaatgtttctggagaggtcagagttgacaaaacctcttcacaggttgctccttcttcctgaaatccttaatcctccgcatttcatgcttcaggtcatttcagggaagcctgggtttagatgcctttctgactctcagctcctgcacttctgtcatcatacctctgatactattatttatattccttccccactaggaacaggaaccacatttgtcatagtcactctcacattcctcactgcctaacagggtgcctggcataagttgggacaacagatatttgttgaataaaaatataatttgcatgtttatggagctcagctatgttctcactttttttgcttctaattccagaatatatgttaaatgatctaataatttgattattttcttataagtcttattaaacactagtcataatagacacaataaattatgccttctttttctattgcctt

SEQ ID NO: 4637 - DNA, 1205 bp, Homo sapiens
  source 1..1205: mol_type = genomic DNA
ggatgcgaaacgcgaggttttgtaacctttcctggcaattttagattttgtgtgggatttcctgtctagaagcagatacgaagatttttaagctgtttcaagatgtttccttccaatccataattatatttttaatatattcgagccatcattaaaatcactgctttcgtgattttaattattcaaataaacacttgcattttaaagacgtctgttgattataaacgaaaggtattttggtattctcattgtggagagatgacttgttatagcaaggagtggagcataggctattgcaattttaatttcctgttttagcgtcaaatagtgtgtgttccatattgagctgttgccgctgttgctgatgtggctttatgaaagttacaaattataatactgtggtagaaacaaattcagattcagatgatgaagacaaactgcatattgtggaagaagaaagtgttacagatgcagctgactgtgaaggtgtaccagaggatgacctgccaacagaccagacagtgttaccagggaggagcagtgaaagagaagggaatgctaagaactgctgggaggatgacacaggaaaggaagggcaagaaatcctggggcctgaagctcaggcagatgaagcaggatgtacagtaaaagatgatgaatgcgagtcagatgcagaaaatgagcaaaaccatgatcctaatgttgaagagtttctacaacaacaagacactgctgtcatttttcctgaggcacctgaagaggaccagaggcagggcacaccagaagccagtggtcatgatgaaaatggaacaccagatgcattttcacaattactcacctgtccatattgtgatagaggctataaacgctttacctctctgaaagaacacattaaatatcgtcatgaaaagaatgaagataactttagttgctccctgtgcagttacacctttgcatacagaacccaacttgaacgtcacatgacatcacataaatcaggaagagatcaaagacatgtgacgcagtctgggtgtaatcgtaaattcaaatgcactgagtgtggaaaagctttcaaatacaaacatcacctaaaagagcacttaagaattcacagtggagagaagccatatgaatgcccaaactgcaagaaacgcttttcccattctggctcctatagctcacacataagcagtaagaaatgtatc

SEQ ID NO: 4638 - DNA, 3466 bp, Homo sapiens
  source 1..3466: mol_type = genomic DNA
atttagacacaagcgagaggatcatggcggatggccccaggtgtaagcgcagaaagcaggcgaacccgcggcgcaataacgttacaaattataatactgtggtagaaacaaattcagattcagatgatgaagacaaactgcatattgtggaagaagaaagtgttacagatgcagctgactgtgaaggtgtaccagaggatgacctgccaacagaccagacagtgttaccagggaggagcagtgaaagagaagggaatgctaagaactgctgggaggatgacataaaagatgatgaatgcgagtcagatgcagaaaatgagcaaaaccatgatcctaatgttgaagagtttctacaacaacaagacactgctgtcatttttcctgaggcacctgaagaggaccagaggcagggcacaccagaagccagtggtcatgatgaaaatggaacaccagatgcattttcacaattactcacctgtccatattgtgatagaggctataaacgctttacctctctgaaagaacacattaaatatcgtcatgaaaagaatgaagataactttagttgctccctgtgcagttacacctttgcatacagaacccaacttgaacgtcacatgacatcacataaatcaggaagagatcaaagacatgtgacgcagtctgggtgtaatcgtaaattcaaatgcactgagtgtggaaaagctttcaaatacaaacatcacctaaaagagcacttaagaattcacagtggagagaagccatatgaatgcccaaactgcaagaaacgcttttcccattctggctcctatagctcacacataagcagtaagaaatgtatcagcttgatacctgtgaatgggcgaccaagaacaggactcaagacatctcagtgttcttcaccgtctctttcagcatcaccaggcagtcccacacgaccacagatacggcaaaagatagagaataaaccccttcaagaacaactttctgttaaccaaattaaaactgaacctgtggattatgaattcaaacccatagtggttgcttcaggaatcaactgttcaacccctttacaaaatggggttttcactggtggtggcccattacaggcaaccagttctcctcagggcatggtgcaagctgttgttctgccaacagttggtttggtgtctcccataagtatcaatttaagtgatattcagaatgtacttaaagtggcggtagatggtaatgtaataaggcaagtgttggagaataatcaagccaatcttgcatccaaagaacaagaaacaatcaatgcttcacccatacaacaaggtggccattctgttatttcagccatcagtcttcctttggttgatcaagatggaacaaccaaaattatcatcaactacagtcttgagcagcctagccaacttcaagttgttcctcaaaatttaaaaaaagaaaatccagtcgctacaaacagttgtaaaagtgaaaagttaccagaagatcttactgttaagtctgagaaggacaaaagctttgaagggggggtgaatgatagcacttgtcttctgtgtgatgattgtccaggagatattaatgcacttccagaattaaagcactatgacctaaagcagcctactcagcctcctccactccctgcagcagaagctgagaagcctgagtcctctgtttcatcagctactggagatggcaatttgtctcctagtcagccacctttaaagaacctcttgtctctcctaaaagcatattatgctttgaatgcacaaccaagtgcagaagagctctcaaaaattgctgattcagtaaacctaccactggatgtagtaaaaaagtggtttgaaaagatgcaagctggacagatttcagtgcagtcttctgaaccatcttctcctgaaccaggcaaagtaaatatccctgccaagaacaatgatcagcctcaatctgcaaatgcaaatgaaccccaggacagcacagtaaatctacaaagtcctttgaagatgactaactccccagttttaccagtgggatcaaccaccaatggttccagaagtagtacaccatccccatcacctctaaacctttcctcatccagaaatacacagggttacttgtacacagctgagggtgcacaagaagagccacaagtagaacctcttgatctttcactaccaaagcaacagggagaattattagaaaggtcaactatcactagtgtttaccagaacagtgtttattctgtccaggaagaacccttgaacttgtcttgcgcaaaaaaggagccacaaaaggacagttgtgttacagactcagaaccagttgtaaatgtaatcccaccaagtgccaaccccataaatatcgctatacctacagtcactgcccagttacccacaatcgtggccattgctgaccagaacagtgttccatgcttaagagcgctagctgccaataagcaaacgattctgattccccaggtggcatacacctactcaactacggtcagccctgcagtccaagaaccacccttgaaagtgatccagccaaatggaaatcaggatgaaagacaagatactagctcagaaggagtatcaaatgtagaggatcagaatgactctgattctacaccgcccaaaaagaaaatgcggaagacagaaaatggaatgtatgcttgtgatttgtgtgacaagatattccaaaagagtagttcattattgagacataaatatgaacacacaggtaaaagacctcatgagtgtggaatctgtaaaaaggcatttaaacacaaacatcatttgattgaacacatgcgattacattctggagaaaagccctatcaatgtgacaaatgtggaaagcgcttctcacactctgggtcttattctcaacacatgaatcatcgctactcctactgtaagagagaagcggaagaacgtgacagcacagagcaggaagaggcagggcctgaaatcctctcgaatgagcacgtgggtgccagggcgtctccctcacagggcgactcggacgagagagagagtttgacaagggaagaggatgaagacagtgaaaaagaggaagaggaggaggataaagagatggaagaattgcaggaagaaaaagaatgtgaaaaaccacaaggggatgaggaagaggaggaggaggaggaagaagtggaagaagaagaggtagaagaggcagagaatgagggagaagaagcaaaaactgaaggtctgatgaaggatgacagggctgaaagtcaagcaagcagcttaggacaaaaagtaggcgagagtagtgagcaagtgtctgaagaaaagacaaatgaagcctaatcgtttttctagaaggaaaataaattctaattgataatgaatttcgttcaatattatccttgcttttcatggaaacacagtaacctgtatgctgtgattcctgttcactactgtgtaaagtaaaaact

SEQ ID NO: 4639 - DNA, 6280 bp, Homo sapiens
  source 1..6280: mol_type = genomic DNA
catgccgtttaatatcatgctctcccttccctgctaagtttctctatggcctttctcgtttctcctcctgcctccctacacactctcccttactttgtagtgaggtctccccgaggtgtagagagattcagagatcggccaaccgagtgttctattttaatttacttagagaccctttattaaaatgccaaactactttttaatattgggatccagtccagaaattcatcatgcacacaccctaatacacatgccctaagatgcagctcccatgcagcatttttttttctggctctggtacctaaaaagaaaaaaataacaataagagaaagggcagagaactttgttccagaagctgtactgagatacctacacaatttgatgtgcatctcaaatctggtcattagagatatctgtataagaagagactatctggattgaggacccgggatctttccctttaactttcgccccttggagttctccagttctgtgaatggtgtgcaccgttttccgccctgtactctgtaggatttagtgatgaggataatgatgccaaaggcttgacgggcggggaggggggggtggagggggggagaagggagggaggggggagggaggcgaaggcgaaagggagggagaggaggaagggagggaggtggaatttcatttcttccactaaagcgtttgcggagacttcaaggtataatctatcccagatcctttcccagagagaaacttggcgatcacgttttcacatgatgctcacgctcagggcgcttcaattatccctccccacaaagataggtggcgcgtgtttcagggtctctcgtctctctcctacagaaaagaaaaagaaaaaaatgtcattagaagaggcgtaacacgtcagtccgtccccaggtttgtgtttcctggagtggccgaaagagatcagttctaacctgctctgcaggaataacggtcctgcctcccgacactcttggcgaggtttttgtacagtttgctccgggagctgtttcttcgcttccacctttttctcccccacacttcgcggcttcttcatgctttttcttctcaccatttctggccaaaactacaaacaagacttcgcagatcgagcctgcgtgctgccgaagcagggcgccgagtccatgcgaactgccatctgatccgctcttatcaatgaagcagccgatcatggcggatggcccccggtgcaagaggcgcaaacaagccaatcccaggaggaaaaacgtggtgaactatgacaatgtagtggacacaggttctgaaacagatgaggaagacaagcttcatattgctgaggatgacggtattgccaaccctctggaccaggagacgagtccagctagtgtgcccaaccatgagtcctccccacacgtgagccaagctctgttgccaagagaggaagaggaagatgaaataagggagggtggagtggaacacccctggcacaacaacgagattctacaagcctctgtagatggtccagaagaaatgaaggaagactatgacactatggggccagaagccacgatccagaccgcaattaacaatggtacagtgaagaatgcaaattgcacatcagattttgaggaatactttgccaaaagaaaactggaggaacgcgatggtcatgcagtcagcatcgaggagtaccttcagcgcagtgacacagccattatttacccagaagcccctgaggagctgtctcgccttggcacgccagaggccaatgggcaagaagaaaatgacctgccacctggaactccagatgcttttgcccaactgctgacctgcccctactgcgaccggggctacaagcgcttgacatcactgaaggagcacatcaagtaccgccacgagaagaatgaagagaacttttcctgccctctctgtagctacacgtttgcctaccgcacccagctcgagcggcatatggtgacacacaagccagggacagatcagcaccaaatgctaacccaaggagcaggtaatcgcaagttcaaatgcacagagtgtggcaaggccttcaaatataaacaccatctgaaagaacacctgcgaattcacagtggtgaaaaaccttacgagtgcccaaactgcaagaaacgtttctcccattctggttcctacagttcgcacatcagcagcaagaaatgtattggtttaatctctgtaaatggccgaatgagaaacaatatcaagacgggttcttcccctaattctgtttcttcttctcctactaattcagccattacccagttaagaaacaagttggagaatggaaaaccacttagtatgtctgaacagacaggcttacttaaaattaaaacagaaccactagacttcaatgactataaagttcttatggctacacacgggtttagtggcactagtccctttatgaatggtgggcttggagccaccagccctttaggagttcatccatctgctcagagtccaatgcagcacttaggtgtagggatggaagcccctttacttgggtttcccaccatgaatagtaatttaagtgaggtacaaaaggttctacagattgtggacaatactgtttccaggcaaaaaatggactgcaaggctgaagaaatttcaaagttgaaaggttatcacatgaaggatccatgctctcaacctgaggaacaaggagttacttctcctaatattccgcctgtcggtcttccggtagtgagtcataatggtgccactaaaagtattattgactatacgttggaaaaagtcaatgaagccaaagcttgcctccagagcttgactactgactcaaggagacagatcagtaatataaagaaagagaagctacgtactttaatagatttggtcactgatgacaaaatgattgagaaccacaacatatccactccattttcatgccagttctgtaaagaaagttttcctggccccatccctttgcatcagcatgaacgttacctttgtaagatgaatgaagagatcaaggcggtcctgcagcctcatgaaaacatagtccccaacaaagccggagtttttgttgataataaagccctcctcttgtcatctgtactttctgagaaaggaatgacaagccccatcaacccatacaaggaccacatgtctgtactcaaagcatactatgctatgaacatggagcccaactccgatgaactgctgaaaatttccattgctgtgggccttcctcaggaatttgtgaaggaatggtttgaacaacgaaaagtctaccagtactcaaattccaggtccccatccctggaaagaagctccaagccgttagctcccaacagtaaccctcccacaaaagactctttattacccaggtctcctgtaaaacctatggactccataacatcaccatctatagcagaactccacaacagtgttacgaattgtgatcctcctctcaggctaacaaaaccttcccattttaccaatattaaaccagttgaaaaattggaccactccaggagtaatactccttctcccttaaatctttcctccacatcttctaaaaactcccacagtagttcatacactccaaacagcttctcttctgaggagctccaggctgagcctttagacttgtcattaccaaaacaaatgaaagaacccaaaagtattatagccacaaagaacaaaacaaaagctagtagcatcagtttagatcataacagtgtttcttcctcatctgaaaactcagatgagcctctgaacttgacttttatcaagaaggaattttcaaattcaaataatctggacaacaaaagcactaacccagtgttcagcatgaacccatttagtgccaaacctttatacacagctcttccacctcaaagcgcatttccccctgctactttcatgccaccagtccagaccagtattcctgggctacgaccatacccaggactggatcagatgagcttcctaccacatatggcctacacctacccaactggagcagctacttttgctgatatgcagcaaaggagaaagtaccagcggaaacaaggatttcagggagaattgcttgatggagcacaagactacatgtcaggcctagatgatatgacagactccgactcctgtctgtctcgcaaaaagatcaagaagacagagagtggcatgtatgcatgtgacttatgtgacaagacattccagaaaagcagttcccttctgcgacataaatacgaacacacaggaaaaagaccacatcagtgtcagatttgtaagaaagcgtttaaacacaagcaccaccttatcgagcactcaaggcttcactcgggcgagaagccctatcagtgtgataaatgtggcaagcgcttctcacactcgggctcgtactcgcagcacatgaatcacaggtattcctactgcaagcgggaggcggaggagcgggaagcggcggagcgcgaggcgcgcgagaaagggcacttggaacccaccgagctgctgatgaaccgggcttacttgcagagcattacccctcaggggtactctgactcggaggagagggagagtatgccgagggatggcgagagcgagaaggagcacgagaaagaaggcgaggatggctacgggaagctgggcagacaggatggcgacgaggagttcgaggaggaagaggaagaaagtgaaaataaaagtatggatacggatcccgaaacgatacgagatgaagaagagactggagatcactccatggacgatagttcggaggatgggaaaatggaaaccaaatcagaccacgaggaagacaatatggaagatggcatgtaataaactactgcattttaagcttcctatttttttttccagtagtattgttacctgcttgaaaacactgctgtgttaagctgttcatgcacgtgcctgacgcttccaggaagctgtagagagggacagaaggggcggttcagccaagacagatgtagacggagttggagctgggtattgttaaaaactgcattatgcaaaaattttgtacagtgttaaggcctaaaaactgtgtggttcagagactaattcctgtgtttaatagcatttatactttaagcacaactagaaaattgtaagaattgcactctacttatgtatcactacaaactttaaaaaactatgtctaatttatattaatacattttaaaaaggtgcccgcactaccatacatcagtatttttattattattattgttattcctttttaatttaatgtgctcgcactacaatgcatcagtattatgattcctctgtactttcctttcgctattcatcaatttcccattttttttttcagcttaagtaaccacacaattttaggcctcaatttttttttttttctgtgaaggaacttgaagtgatgcatgtgtgaatttaagataccgaagtcttaaagtgacctggacgtgaaggaaaaagtaagatgagaaataaagaaagcctttgtaaggtggttttaaaagccttatatgcaaaccttttaatctgtgtttctgcaagtgccatccttgtacagtgttaagagggtaacatgggttacctttgcaccagcttcagtgttaagctcaccctgttctttgaagcacccatgtcagtattagaagaataggcagcagttccttagtttacatatgtttgtgcaattattttctgtacttttttgttcattaattttgtcagtattacaccaaactgtttttgcaacaaaaaaattttttttgcattcatttaattttaggtcaaataacattttatttatgtggctcattttatatttcctaattttatttatttcatactgtagtgtacagtattatagttcttcaatatatagatatattttagtaaaaaaggaacatgacgttgatcatttgggcaaattttacgtaaagagaagagcatttattgtgttttggaacattaattgtgagatgggatttttcaattttattattttatttttgtttttttccaattactggaaattccaaatttgggaacttttgatacgatcttgtgaaaacactgtattttcgactgaaaattccactttcttcatcttgttttttagctaaaaagagggactgttaaatacaatgtatgataccatgacaaaaatctttcctgaattgtctttgtaaaagtattattgaattttcaatttgtaatttcttttgaaaatgaccatgctcgaataaaaatgtagccaaactaagaatgtagttaatga

SEQ ID NO: 4640 - DNA, 1812 bp, Homo sapiens
  source 1..1812: mol_type = genomic DNA
atttcatttcttccactaaagcgtttgcggagacttcaaggtataatctatcccagatcctttcccagagagaaacttggcgatcacgttttcacatgatgctcacgctcagggcgcttcaattatccctccccacaaagataggtggcgcgtgtttcagggtctctcgtctctctcctacagaaaagaaaaagaaaaaaatgtcattagaagaggcgtaacacgtcagtccgtccccaggtttgtgtttcctggagtggccgaaagagatcagttctaacctgctctgcaggaataacggtcctgcctcccgacactcttggcgaggtttttgtacagtttgctccgggagctgtttcttcgcttccacctttttctcccccacacttcgcggcttcttcatgctttttcttctcaccatttctggccaaaactacaaacaagacttcgcagatcgagcctgcgtgctgccgaagcagggcgccgagtccatgcgaactgccatctgatccgctcttatcaatgaagcagccgatcatggcggatggcccccggtgcaagaggcgcaaacaagccaatcccaggaggaaaaacgtggtgaactatgacaatgtagtggacacaggttctgaaacagatgaggaagacaagcttcatattgctgaggatgacggtattgccaaccctctggaccaggagacgagtccagctagtgtgcccaaccatgagtcctccccacacgtgagccaagctctgttgccaagagaggaagaggaagatgaaataagggagggtggagtggaacacccctggcacaacaacgagattctacaagcctctgtagatggtccagaagaaatgaaggaagactatgacactatggggccagaagccacgatccagaccgcaattaacaatggtacagtgaagaatgcaaattgcacatcagattttgaggaatactttgccaaaagaaaactggaggaacgcgatggtcatgcagtcagcatcgaggagtaccttcagcgcagtgacacagccattatttacccagaagcccctgaggagctgtctcgccttggcacgccagaggccaatgggcaagaagaaaatgacctgccacctggaactccagatgcttttgcccaactgctgacctgcccctactgcgaccggggctacaagcgcttgacatcactgaaggagcacatcaagtaccgccacgagaagaatgaagagaacttttcctgccctctctgtagctacacgtttgcctaccgcacccagctcgagcggcatatggtgacacacaagccagggacagatcagcaccaaatgctaacccaaggagcaggtaatcgcaagttcaaatgcacagagtgtggcaaggccttcaaatataaacaccatctgaaagaacacctgcgaattcacagtggtgaaaaaccttacgagtgcccaaactgcaagaaacgtttctcccattctggttcctacagttcgcacatcagcagcaagaaatgtattggtttaatctctgtaaatggccgaatgagaaacaatatcaagacgggttcttcccctaattctgtttcttcttctcctactaattcagccattacccagttaagaaacaagttggagaatggaaaaccacttagtatgtctgaacagacaggcttacttaaaagcggccgggcgcagtggctcacgcctttaatcccagcacttttggaggctgaggtaggcagatcacgaggtcagaagatcgagactctcctggctaacatggtggaaccccgtctctactaa

SEQ ID NO: 4641 - DNA, 1514 bp, Homo sapiens
  source 1..1514: mol_type = genomic DNA
atcatttagtagagcttaaaagtattgccgtagtggttggactttctctttcctttcttaagggaaaaaaaaaattctactggaactatttaagggaaccagtgtgggggagcatgtgtgtgagtgagatcgagcctgcgtgctgccgaagcagggcgccgagtccatgcgaactgccatctgatccgctcttatcaatgaagcagccgatcatggcggatggcccccggtgcaagaggcgcaaacaagccaatcccaggaggaaaaacgtggtgaactatgacaatgtagtggacacaggttctgaaacagatgaggaagacaagcttcatattgctgaggatgacggtattgccaaccctctggaccaggagacgagtccagctagtgtgcccaaccatgagtcctccccacacgtgagccaagctctgttgccaagagaggaagaggaagatgaaataagggagggtggagtggaacacccctggcacaacaacgagattctacaagcctctgtagatggtccagaagaaatgaaggaagactatgacactatggggccagaagccacgatccagaccgcaattaacaatggtacagtgaagaatgcaaattgcacatcagattttgaggaatactttgccaaaagaaaactggaggaacgcgatggtcatgcagtcagcatcgaggagtaccttcagcgcagtgacacagccattatttacccagaagcccctgaggagctgtctcgccttggcacgccagaggccaatgggcaagaagaaaatgacctgccacctggaactccagatgcttttgcccaactgctgacctgcccctactgcgaccggggctacaagcgcttgacatcactgaaggagcacatcaagtaccgccacgagaagaatgaagagaacttttcctgccctctctgtagctacacgtttgcctaccgcacccagctcgagcggcatatggtgacacacaagccagggacagatcagcaccaaatgctaacccaaggagcaggtaatcgcaagttcaaatgcacagagtgtggcaaggccttcaaatataaacaccatctgaaagaacacctgcgaattcacagtggtgaaaaaccttacgagtgcccaaactgcaagaaacgtttctcccattctggttcctacagttcgcacatcagcagcaagaaatgtattggtttaatctctgtaaatggccgaatgagaaacaatatcaagacgggttcttcccctaattctgtttcttcttctcctactaattcagccattacccagttaagaaacaagttggagaatggaaaaccacttagtatgtctgaacagacaggcttacttaaaattaaaacagaaccactagacttcaatgactataaagttcttatggctacacacgggtttagtggcactagtccctttatgaatggtgggcttggagccaccagccctttaggagttcatccatctgctcagagtccaatgcagcactta

SEQ ID NO: 4642 - DNA, 590 bp, Homo sapiens
  source 1..590: mol_type = genomic DNA
aacctccaccgagttttcaggattctcctcctctcctgcctgcctccgaggtcccccttctccaagttttgacagtttcaactgaaaaaatgcagcgcctctctcgatttttagatcgagcctgcgtgctgccgaagcagggcgccgagtccatgcgaactgccatctgatccgctcttatcaatgaagcagccgatcatggcggatggcccccggtgcaagaggcgcaaacaagccaatcccaggaggaaaaacgtggtgaactatgacaatgtagtggacacaggttctgaaacagatgaggaagacaagcttcatattgctgaggatgacggtattgccaaccctctggaccaggagacgagtccagctagtgtgcccaaccatgagtcctccccacacgtgagccaagctctgttgccaagagaggaagaggaagatgaaataagggagggtggagtggaacacccctggcacaacaacgagattctacaagcctctgtagatggtccagaagaaatgaaggaagactatgacactatggggccagaagccacgatccagaccgcaattaacaatggtacaggtga

SEQ ID NO: 4643 - DNA, 5266 bp, Homo sapiens
  source 1..5266: mol_type = genomic DNA
agtcaagcggtcttactgtaccgccgtgtgcattccctcatacggtcaggagttatgactcattttgaagatgtaattcttgtctctctgatcccctcgcgggtgcaacacaccaaacaatcgagcctgcgtgctgccgaagcagggcgccgagtccatgcgaactgccatctgatccgctcttatcaatgaagcagccgatcatggcggatggcccccggtgcaagaggcgcaaacaagccaatcccaggaggaaaaacgtggtgaactatgacaatgtagtggacacaggttctgaaacagatgaggaagacaagcttcatattgctgaggatgacggtattgccaaccctctggaccaggagacgagtccagctagtgtgcccaaccatgagtcctccccacacgtgagccaagctctgttgccaagagaggaagaggaagatgaaataagggagggtggagtggaacacccctggcacaacaacgagattctacaagcctctgtagatggtccagaagaaatgaaggaagactatgacactatggggccagaagccacgatccagaccgcaattaacaatggtacagtgaagaatgcaaattgcacatcagattttgaggaatactttgccaaaagaaaactggaggaacgcgatggtcatgcagtcagcatcgaggagtaccttcagcgcagtgacacagccattatttacccagaagcccctgaggagctgtctcgccttggcacgccagaggccaatgggcaagaagaaaatgacctgccacctggaactccagatgcttttgcccaactgctgacctgcccctactgcgaccggggctacaagcgcttgacatcactgaaggagcacatcaagtaccgccacgagaagaatgaagagaacttttcctgccctctctgtagctacacgtttgcctaccgcacccagctcgagcggcatatggtgacacacaagccagggacagatcagcaccaaatgctaacccaaggagcaggtaatcgcaagttcaaatgcacagagtgtggcaaggccttcaaatataaacaccatctgaaagaacacctgcgaattcacagtggtgaaaaaccttacgagtgcccaaactgcaagaaacgtttctcccattctggttcctacagttcgcacatcagcagcaagaaatgtattggtttaatctctgtaaatggccgaatgagaaacaatatcaagacgggttcttcccctaattctgtttcttcttctcctactaattcagccattacccagttaagaaacaagttggagaatggaaaaccacttagtatgtctgaacagacaggcttacttaaaattaaaacagaaccactagacttcaatgactataaagttcttatggctacacacgggtttagtggcactagtccctttatgaatggtgggcttggagccaccagccctttaggagttcatccatctgctcagagtccaatgcagcacttaggtgtagggatggaagcccctttacttgggtttcccaccatgaatagtaatttaagtgaggtacaaaaggttctacagattgtggacaatactgtttccaggcaaaaaatggactgcaaggctgaagaaatttcaaagttgaaaggttatcacatgaaggatccatgctctcaacctgaggaacaaggagttacttctcctaatattccgcctgtcggtcttccggtagtgagtcataatggtgccactaaaagtattattgactatacgttggaaaaagtcaatgaagccaaagcttgcctccagagcttgactactgactcaaggagacagatcagtaatataaagaaagagaagctacgtactttaatagatttggtcactgatgacaaaatgattgagaaccacaacatatccactccattttcatgccagttctgtaaagaaagttttcctggccccatccctttgcatcagcatgaacgttacctttgtaagatgaatgaagagatcaaggcggtcctgcagcctcatgaaaacatagtccccaacaaagccggagtttttgttgataataaagccctcctcttgtcatctgtactttctgagaaaggaatgacaagccccatcaacccatacaaggaccacatgtctgtactcaaagcatactatgctatgaacatggagcccaactccgatgaactgctgaaaatttccattgctgtgggccttcctcaggaatttgtgaaggaatggtttgaacaacgaaaagtctaccagtactcaaattccaggtccccatccctggaaagaagctccaagccgttagctcccaacagtaaccctcccacaaaagactctttattacccaggtctcctgtaaaacctatggactccataacatcaccatctatagcagaactccacaacagtgttacgaattgtgatcctcctctcaggctaacaaaaccttcccattttaccaatattaaaccagttgaaaaattggaccactccaggagtaatactccttctcccttaaatctttcctccacatcttctaaaaactcccacagtagttcatacactccaaacagcttctcttctgaggagctccaggctgagcctttagacttgtcattaccaaaacaaatgaaagaacccaaaagtattatagccacaaagaacaaaacaaaagctagtagcatcagtttagatcataacagtgtttcttcctcatctgaaaactcagatgagcctctgaacttgacttttatcaagaaggaattttcaaattcaaataatctggacaacaaaagcactaacccagtgttcagcatgaacccatttagtgccaaacctttatacacagctcttccacctcaaagcgcatttccccctgctactttcatgccaccagtccagaccagtattcctgggctacgaccatacccaggactggatcagatgagcttcctaccacatatggcctacacctacccaactggagcagctacttttgctgatatgcagcaaaggagaaagtaccagcggaaacaaggatttcagggagaattgcttgatggagcacaagactacatgtcaggcctagatgatatgacagactccgactcctgtctgtctcgcaaaaagatcaagaagacagagagtggcatgtatgcatgtgacttatgtgacaagacattccagaaaagcagttcccttctgcgacataaatacgaacacacaggaaaaagaccacatcagtgtcagatttgtaagaaagcgtttaaacacaagcaccaccttatcgagcactcaaggcttcactcgggcgagaagccctatcagtgtgataaatgtggcaagcgcttctcacactcgggctcgtactcgcagcacatgaatcacaggtattcctactgcaagcgggaggcggaggagcgggaagcggcggagcgcgaggcgcgcgagaaagggcacttggaacccaccgagctgctgatgaaccgggcttacttgcagagcattacccctcaggggtactctgactcggaggagagggagagtatgccgagggatggcgagagcgagaaggagcacgagaaagaaggcgaggatggctacgggaagctgggcagacaggatggcgacgaggagttcgaggaggaagaggaagaaagtgaaaataaaagtatggatacggatcccgaaacgatacgagatgaagaagagactggagatcactccatggacgatagttcggaggatgggaaaatggaaaccaaatcagaccacgaggaagacaatatggaagatggcatgtaataaactactgcattttaagcttcctatttttttttccagtagtattgttacctgcttgaaaacactgctgtgttaagctgttcatgcacgtgcctgacgcttccaggaagctgtagagagggacagaaggggcggttcagccaagacagatgtagacggagttggagctgggtattgttaaaaactgcattatgcaaaaattttgtacagtgttaaggcctaaaaactgtgtggttcagagactaattcctgtgtttaatagcatttatactttaagcacaactagaaaattgtaagaattgcactctacttatgtatcactacaaactttaaaaaactatgtctaatttatattaatacattttaaaaaggtgcccgcactaccatacatcagtatttttattattattattgttattcctttttaatttaatgtgctcgcactacaatgcatcagtattatgattcctctgtactttcctttcgctattcatcaatttcccattttttttttcagcttaagtaaccacacaattttaggcctcaatttttttttttttctgtgaaggaacttgaagtgatgcatgtgtgaatttaagataccgaagtcttaaagtgacctggacgtgaaggaaaaagtaagatgagaaataaagaaagcctttgtaaggtggttttaaaagccttatatgcaaaccttttaatctgtgtttctgcaagtgccatccttgtacagtgttaagagggtaacatgggttacctttgcaccagcttcagtgttaagctcaccctgttctttgaagcacccatgtcagtattagaagaataggcagcagttccttagtttacatatgtttgtgcaattattttctgtacttttttgttcattaattttgtcagtattacaccaaactgtttttgcaacaaaaaaattttttttgcattcatttaattttaggtcaaataacattttatttatgtggctcattttatatttcctaattttatttatttcatactgtagtgtacagtattatagttcttcaatatatagatatattttagtaaaaaaggaacatgacgttgatcatttgggcaaattttacgtaaagagaagagcatttattgtgttttggaacattaattgtgagatgggatttttcaattttattattttatttttgtttttttccaattactggaaattccaaatttgggaacttttgatacgatcttgtgaaaacactgtattttcgactgaaaattccactttcttcatcttgttttttagctaaaaagagggactgttaaatacaatgtatgataccatgacaaaaatctttcctgaattgtctttgtaaaagtattattgaattttcaatttgtaatttcttttgaaaatgaccatgctcgaataaaaatgtagccaaact

SEQ ID NO: 4644 - DNA, 2236 bp, Homo sapiens
  source 1..2236: mol_type = genomic DNA
ttactgtaccgccgtgtgcattccctcatacggtcaggagttatgactcattttgaagatatcgagcctgcgtgctgccgaagcagggcgccgagtccatgcgaactgccatctgatccgctcttatcaatgaagcagccgatcatggcggatggcccccggtgcaagaggcgcaaacaagccaatcccaggaggaaaaacgtggtgaactatgacaatgtagtggacacaggttctgaaacagatgaggaagacaagcttcatattgctgaggatgacggtattgccaaccctctggaccaggagacgagtccagctagtgtgcccaaccatgagtcctccccacacgtgagccaagctctgttgccaagagaggaagaggaagatgaaataagggagggtggagtggaacacccctggcacaacaacgagattctacaagcctctgtagatggtccagaagaaatgaaggaagactatgacactatggggccagaagccacgatccagaccgcaattaacaatggtacagtgaagaatgcaaattgcacatcagattttgaggaatactttgccaaaagaaaactggaggaacgcgatggtcatgcagtcagcatcgaggagtaccttcagcgcagtgacacagccattatttacccagaagcccctgaggagctgtctcgccttggcacgccagaggccaatgggcaagaagaaaatgacctgccacctggaactccagatgcttttgcccaactgctgacctgcccctactgcgaccggggctacaagcgcttgacatcactgaaggagcacatcaagtaccgccacgagaagaatgaagagaacttttcctgccctctctgtagctacacgtttgcctaccgcacccagctcgagcggcatatggtgacacacaagccagggacagatcagcaccaaatgctaacccaaggagcaggtaatcgcaagttcaaatgcacagagtgtggcaaggccttcaaatataaacaccatctgaaagaacacctgcgaattcacagtggtgaaaaaccttacgagtgcccaaactgcaagaaacgtttctcccattctggttcctacagttcgcacatcagcagcaagaaatgtattggtttaatctctgtaaatggccgaatgagaaacaatatcaagacgggttcttcccctaattctgtttcttcttctcctactaattcagccattacccagttaagaaacaagttggagaatggaaaaccacttagtatgtctgaacagacaggcttacttaaaattaaaacagaaccactagacttcaatgactataaagttcttatggctacacacgggtttagtggcactagtccctttatgaatggtgggcttggagccaccagccctttaggagttcatccatctgctcagagtccaatgcagcacttaggtgtagggatggaagcccctttacttgggtttcccaccatgaatagtaatttaagtgaggtacaaaaggttctacagattgtggacaatactgtttccaggcaaaaaatggactgcaaggctgaagaaatttcaaagttgaaaggttatcacatgaaggatccatgctctcaacctgaggaacaaggagttacttctcctaatattccgcctgtcggtcttccggtagtgagtcataatggtgccactaaaagtattattgactatacgttggaaaaagtcaatgaagccaaagcttgcctccagagcttgactactgactcaaggagacagatcagtaatataaagaaagagaagctacgtactttaatagatttggtcactgatgacaaaatgattgagaaccacaacatatccactccattttcatgccagttctgtaaagaaagttttcctggccccatccctttgcatcagcatgaacgttacctttgtaagatgaatgaagagatcaaggcggtcctgcagcctcatgaaaacatagtccccaacaaagccggagtttttgttgataataaagccctcctcttgtcatctgtactttctgagaaaggaatgacaagccccatcaacccatacaaggaccacatgtctgtactcaaagcatactatgctatgaacatggagcccaactccgatgaactgctgaaaatttccattgctgtgggccttcctcaggaatttgtgaaggaatggtttgaacaacgaaaagtctaccagtactcaaatt

SEQ ID NO: 4645 - DNA, 554 bp, Homo sapiens
  source 1..554: mol_type = genomic DNA
gtgcttcatccaggggctgtttcgcgttgtttgtttgtttgtttcctctgggaattggggggtggggggatgagaaaagatgagaacgaaaagaaaacctcgcctcaccccaagttcccgagccgggggctgaggacttttcgaaggaaagggtccgcctagccctgagtcaagcggtcttactgtaccgccgtgtgcattccctcatacgatcgagcctgcgtgctgccgaagcagggcgccgagtccatgcgaactgccatctgatccgctcttatcaatgaagcagccgatcatggcggatggcccccggtgcaagaggcgcaaacaagccaatcccaggaggaaaaacgtggtgaactatgacaatgtagtggacacaggttctgaaacagatgaggaagacaagcttcatattgctgaggatgacggtattgccaaccctctggaccaggagacgagtccagctagtgtgcccaaccatgagtcctccccacacgtgagccaagctctgttgccaagagaggaagaggaagatgaaataagggagggtg

SEQ ID NO: 4646 - DNA, 576 bp, Homo sapiens
  source 1..576: mol_type = genomic DNA
gaggtggaatttcatttcttccactaaagcgtttgcggagacttcaagaaaagaaaaagaaaaaaatgtcattagaagaggcgtaacacgtcagtccgtccccaggtttgtgtttcctggagtggccgaaagagatcagttctaacctgctctgcaggaataacggtcctgcctcccgacactcttggcgaggtttttgtacagtttgctccgggagctgtttcttcgcttccacctttttctcccccacacttcgcggcttcttcatgctttttcttctcaccatttctggccaaaactacaaacaagacttcgcagatcgagcctgcgtgctgccgaagcagggcgccgagtccatgcgaactgccatctgatccgctcttatcaatgaagcagccgatcatggcggatggcccccggtgcaagaggcgcaaacaagccaatcccaggaggaaaaacgtggtgaactatgacaatgtagtggacacaggttctgaaacagatgaggaagacaagcttcatattgctgaggatgacggtattgccaaccctctggaccaggagacgagtccagct

SEQ ID NO: 4647 - DNA, 4061 bp, Homo sapiens
  source 1..4061: mol_type = genomic DNA
agttctaacctgctctgcaggaataacggtcctgcctcccgacactcttggcgaggtttttgtacagtttgctccgggagctgtttcttcgcttccacctttttctcccccacacttcgcggcttcttcatgctttttcttctcaccatttctggccaaaactacaaacaagacttcgcagatcgagcctgcgtgctgccgaagcagggcgccgagtccatgcgaactgccatctgatccgctcttatcaatgaagcagccgatcatggcggatggcccccggtgcaagaggcgcaaacaagccaatcccaggaggaaaaacgtggtgaactatgacaatgtagtggacacaggttctgaaacagatgaggaagacaagcttcatattgctgaggatgacggtattgccaaccctctggaccaggagacgagtccagctagtgtgcccaaccatgagtcctccccacacgtgagccaagctctgttgccaagagaggaagaggaagatgaaataagggagggtggagtggaacacccctggcacaacaacgagattctacaagcctctgtagatggtccagtgaagaatgcaaattgcacatcagattttgaggaatactttgccaaaagaaaactggaggaacgcgatggtcatgcagtcagcatcgaggagtaccttcagcgcagtgacacagccattatttacccagaagcccctgaggagctgtctcgccttggcacgccagaggccaatgggcaagaagaaaatgacctgccacctggaactccagatgcttttgcccaactgctgacctgcccctactgcgaccggggctacaagcgcttgacatcactgaaggagcacatcaagtaccgccacgagaagaatgaagagaacttttcctgccctctctgtagctacacgtttgcctaccgcacccagctcgagcggcatatggtgacacacaagccagggacagatcagcaccaaatgctaacccaaggagcaggtaatcgcaagttcaaatgcacagagtgtggcaaggccttcaaatataaacaccatctgaaagaacacctgcgaattcacagtggtgaaaaaccttacgagtgcccaaactgcaagaaacgtttctcccattctggttcctacagttcgcacatcagcagcaagaaatgtattggtttaatctctgtaaatggccgaatgagaaacaatatcaagacgggttcttcccctaattctgtttcttcttctcctactaattcagccattacccagttaagaaacaagttggagaatggaaaaccacttagtatgtctgaacagacaggcttacttaaaattaaaacagaaccactagacttcaatgactataaagttcttatggctacacacgggtttagtggcactagtccctttatgaatggtgggcttggagccaccagccctttaggagttcatccatctgctcagagtccaatgcagcacttaggtgtagggatggaagcccctttacttgggtttcccaccatgaatagtaatttaagtgaggtacaaaaggttctacagattgtggacaatactgtttccaggcaaaaaatggactgcaaggctgaagaaatttcaaagttgaaaggttatcacatgaaggatccatgctctcaacctgaggaacaaggagttacttctcctaatattccgcctgtcggtcttccggtagtgagtcataatggtgccactaaaagtattattgactatacgttggaaaaagtcaatgaagccaaagcttgcctccagagcttgactactgactcaaggagacagatcagtaatataaagaaagagaagctacgtactttaatagatttggtcactgatgacaaaatgattgagaaccacaacatatccactccattttcatgccagttctgtaaagaaagttttcctggccccatccctttgcatcagcatgaacgttacctttgtaagatgaatgaagagatcaaggcggtcctgcagcctcatgaaaacatagtccccaacaaagccggagtttttgttgataataaagccctcctcttgtcatctgtactttctgagaaaggaatgacaagccccatcaacccatacaaggaccacatgtctgtactcaaagcatactatgctatgaacatggagcccaactccgatgaactgctgaaaatttccattgctgtgggccttcctcaggaatttgtgaaggaatggtttgaacaacgaaaagtctaccagtactcaaattccaggtccccatccctggaaagaagctccaagccgttagctcccaacagtaaccctcccacaaaagactctttattacccaggtctcctgtaaaacctatggactccataacatcaccatctatagcagaactccacaacagtgttacgaattgtgatcctcctctcaggctaacaaaaccttcccattttaccaatattaaaccagttgaaaaattggaccactccaggagtaatactccttctcccttaaatctttcctccacatcttctaaaaactcccacagtagttcatacactccaaacagcttctcttctgaggagctccaggctgagcctttagacttgtcattaccaaaacaaatgaaagaacccaaaagtattatagccacaaagaacaaaacaaaagctagtagcatcagtttagatcataacagtgtttcttcctcatctgaaaactcagatgagcctctgaacttgacttttatcaagaaggaattttcaaattcaaataatctggacaacaaaagcactaacccagtgttcagcatgaacccatttagtgccaaacctttatacacagctcttccacctcaaagcgcatttccccctgctactttcatgccaccagtccagaccagtattcctgggctacgaccatacccaggactggatcagatgagcttcctaccacatatggcctacacctacccaactggagcagctacttttgctgatatgcagcaaaggagaaagtaccagcggaaacaaggatttcagggagaattgcttgatggagcacaagactacatgtcaggcctagatgatatgacagactccgactcctgtctgtctcgcaaaaagatcaagaagacagagagtggcatgtatgcatgtgacttatgtgacaagacattccagaaaagcagttcccttctgcgacataaatacgaacacacaggaaaaagaccacatcagtgtcagatttgtaagaaagcgtttaaacacaagcaccaccttatcgagcactcaaggcttcactcgggcgagaagccctatcagtgtgataaatgtggcaagcgcttctcacactcgggctcgtactcgcagcacatgaatcacaggtattcctactgcaagcgggaggcggaggagcgggaagcggcggagcgcgaggcgcgcgagaaagggcacttggaacccaccgagctgctgatgaaccgggcttacttgcagagcattacccctcaggggtactctgactcggaggagagggagagtatgccgagggatggcgagagcgagaaggagcacgagaaagaaggcgaggatggctacgggaagctgggcagacaggatggcgacgaggagttcgaggaggaagaggaagaaagtgaaaataaaagtatggatacggatcccgaaacgatacgagatgaagaagagactggagatcactccatggacgatagttcggaggatgggaaaatggaaaccaaatcagaccacgaggaagacaatatggaagatggcatgtaataaactactgcattttaagcttcctatttttttttccagtagtattgttacctgcttgaaaacactgctgtgttaagctgttcatgcacgtgcctgacgcttccaggaagctgtagagagggacagaaggggcggttcagccaagacagatgtagacggagttggagctgggtattgttaaaaactgcattatgcaaaaattttgtacagtgttaaggcctaaaaactgtgtggttca

SEQ ID NO: 4648 - DNA, 3912 bp, Homo sapiens
  source 1..3912: mol_type = genomic DNA
cgcggcttcttcatgctttttcttctcaccatttctggccaaaactacaaacaagacttcgcagatcgagcctgcgtgctgccgaagcagggcgccgagtccatgcgaactgccatctgatccgctcttatcaatgaagcagccgatcatggcggatggcccccggtgcaagaggcgcaaacaagccaatcccaggaggaaaaacgtggtgaactatgacaatgtagtggacacaggttctgaaacagatgaggaagacaagcttcatattgctgaggatgacggtattgccaaccctctggaccaggagacgagtccagctagtgtgcccaaccatgagtcctccccacacgtgagccaagctctgttgccaagagaggaagaggaagatgaaataagggagggtggagtggaacacccctggcacaacaacgagattctacaagcctctgtagatggtccagaagaaatgaaggaagactatgacactatggggccagaagccacgatccagaccgcaattaacaatggtacagtgaagaatgcaaattgcacatcagattttgaggaatactttgccaaaagaaaactggaggaacgcgatggtcatgcagtcagcatcgaggagtaccttcagcgcagtgacacagccattatttacccagaagcccctgaggagctgtctcgccttggcacgccagaggccaatgggcaagaagaaaatgacctgccacctggaactccagatgcttttgcccaactgctgacctgcccctactgcgaccggggctacaagcgcttgacatcactgaaggagcacatcaagtaccgccacgagaagaatgaagagaacttttcctgccctctctgtagctacacgtttgcctaccgcacccagctcgagcggcatatggtgacacacaagccagggacagatcagcaccaaatgctaacccaaggagcaggtaatcgcaagttcaaatgcacagagtgtggcaaggccttcaaatataaacaccatctgaaagaacacctgcgaattcacagtggtgaaaaaccttacgagtgcccaaactgcaagaaacgtttctcccattctggttcctacagttcgcacatcagcagcaagaaatgtattggtttaatctctgtaaatggccgaatgagaaacaatatcaagacgggttcttcccctaattctgtttcttcttctcctactaattcagccattacccagttaagaaacaagttggagaatggaaaaccacttagtatgtctgaacagacaggcttacttaaaattaaaacagaaccactagacttcaatgactataaagttcttatggctacacacgggtttagtggcactagtccctttatgaatggtgggcttggagccaccagccctttaggagttcatccatctgctcagagtccaatgcagcacttaggtgtagggatggaagcccctttacttgggtttcccaccatgaatagtaatttaagtgaggtacaaaaggttctacagattgtggacaatactgtttccaggcaaaaaatggactgcaaggctgaagaaatttcaaagttgaaaggttatcacatgaaggatccatgctctcaacctgaggaacaaggagttacttctcctaatattccgcctgtcggtcttccggtagtgagtcataatggtgccactaaaagtattattgactatacgttggaaaaagtcaatgaagccaaagcttgcctccagagcttgactactgactcaaggagacagatcagtaatataaagaaagagaagctacgtactttaatagatttggtcactgatgacaaaatgattgagaaccacaacatatccactccattttcatgccagttctgtaaagaaagttttcctggccccatccctttgcatcagcatgaacgttacctttgtaagatgaatgaagagatcaaggcggtcctgcagcctcatgaaaacatagtccccaacaaagccggagtttttgttgataataaagccctcctcttgtcatctgtactttctgagaaaggaatgacaagccccatcaacccatacaaggaccacatgtctgtactcaaagcatactatgctatgaacatggagcccaactccgatgaactgctgaaaatttccattgctgtgggccttcctcaggaatttgtgaaggaatggtttgaacaacgaaaagtctaccagtactcaaattccaggtccccatccctggaaagaagctccaagccgttagctcccaacagtaaccctcccacaaaagactctttattacccaggtctcctgtaaaacctatggactccataacatcaccatctatagcagaactccacaacagtgttacgaattgtgatcctcctctcaggctaacaaaaccttcccattttaccaatattaaaccagttgaaaaattggaccactccaggagtaatactccttctcccttaaatctttcctccacatcttctaaaaactcccacagtagttcatacactccaaacagcttctcttctgaggagctccaggctgagcctttagacttgtcattaccaaaacaaatgaaagaacccaaaagtattatagccacaaagaacaaaacaaaagctagtagcatcagtttagatcataacagtgtttcttcctcatctgaaaactcagatgagcctctgaacttgacttttatcaagaaggaattttcaaattcaaataatctggacaacaaaagcactaacccagtgttcagcatgaacccatttagtgccaaacctttatacacagctcttccacctcaaagcgcatttccccctgctactttcatgccaccagtccagaccagtattcctgggctacgaccatacccaggactggatcagatgagcttcctaccacatatggcctacacctacccaactggagcagctacttttgctgatatgcagcaaaggagaaagtaccagcggaaacaaggatttcagggagaattgcttgatggagcacaagactacatgtcaggcctagatgatatgacagactccgactcctgtctgtctcgcaaaaagatcaagaagacagagagtggcatgtatgcatgtgacttatgtgacaagacattccagaaaagcagttcccttctgcgacataaatacgaacacacaggaaaaagaccacatcagtgtcagatttgtaagaaagcgtttaaacacaagcaccaccttatcgagcactcaaggcttcactcgggcgagaagccctatcagtgtgataaatgtggcaagcgcttctcacactcgggctcgtactcgcagcacatgaatcacaggtattcctactgcaagcgggaggcggaggagcgggaagcggcggagcgcgaggcgcgcgagaaagggcacttggaacccaccgagctgctgatgaaccgggcttacttgcagagcattacccctcaggggtactctgactcggaggagagggagagtatgccgagggatggcgagagcgagaaggagcacgagaaagaaggcgaggatggctacgggaagctgggcagacaggatggcgacgaggagttcgaggaggaagaggaagaaagtgaaaataaaagtatggatacggatcccgaaacgatacgagatgaagaagagactggagatcactccatggacgatagttcggaggatgggaaaatggaaaccaaatcagaccacgaggaagacaatatggaagatggcatgtaataaactactgcattttaagcttcctatttttttttccagtagtattgttacctgcttgaaaacactgctgtgttaagctgttcatgcacgtgcctgacgcttccaggaagctgtagagagggacagaaggggcg

SEQ ID NO: 4649 - DNA, 4148 bp, Homo sapiens
  source 1..4148: mol_type = genomic DNA
cagaagccctgctgaatcaagtgagaggagagctgcggagcaatcaccatgagtatctcagctcttggaggccgcaccaaagggaagcctctgccaccaggcgaggaggagcgcaataacgttctcaagcagatgaaagtgcgaaccacgctgaagggggacaagagctggattaccaagcaggatgaatcggagggtcgcaccatagagctgccctcaggccggagtcgcgccacatccttttcatcagctggggaggttccgaagcctaggcctccgagcacaagggctcccactggctacatcatccggggagtgttcaccaagcccatagacagctcttcccagccccagcagcagttccccaaggccaacgggactccaaaaagtgctgccagtctggtgagaacagctaacgctggtcctccccgcccctcctcctctggctacaagatgaccactgaggattacaagaagctggcaccctacaatatcaggcgcagctctacatcaggggacaccgaggaggaggaggaggaggaggtggtgccattctcctcagatgaacagaaacggaggtcagaggctgcaagcggtgttctgaggaggacagctccccgggagcactcctacgtcctgtcagcggccaagaagagcactggtcctacccaggagacacaggcaccgtttatcgcgaagagggtggaggtggtggaagaggacgggccttctgagaagagccaggacccacctgctctggcaagatccactcctggctcaaacaggtcttccccaggcaacaaagacaaggaggccccctgctccagagagctccagagggacttggctggtgaggaggctttcagggcccccaacacagatgctgcaaggtcaagtgcacagttgagtgatggcaatgtgggatccggagccacgggctcccggcctgaaggcttggctgcagtagacatcggctccgagagaggaagctccagtgccacttcagtctctgctgtccctgctgataggaagagcaacagcacagcagcccaggaggatgcaaaggcagacccaaagggggccttggctgattatgaggggaaggatgtggccaccagggtcggagaggcctggcaggagaggcctggagctccaagaggtggccaaggagacccagctgtacccgctcagcaacctgcagatcccagcaccccagagcggcagagcagccccagcggatctgagcaacttgtcagacgagagagttgtggcagcagcgtgttgactgattttgaggggaaggatgtggccaccaaggtcggagaggcctggcaggacaggcctggagccccaagaggtggccaaggagacccagctgtacccactcagcaacctgcagatcccagtaccccagaacagcagaacagccccagcggatctgagcaattcgtcagacgagagagctgcaccagcagggtgaggagcccctcgagctgcatggtcactgttactgtcactgccacatctgagcagcctcacatttatattccagcccccgcaagtgaattggactccagctctaccaccaaagggattctcttcgtgaaggagtacgtgaatgctagtgaagtgtcttctgggaagccagtatctgcacgctatagcaacgtcagcagcattgaggactcattcgccatggagaagaagcctccatgtggcagcactccatactctgagaggacaactggagggatctgtacttactgcaaccgtgagatccgagactgtccaaagattaccctagaacatcttggtatctgctgccatgaatattgctttaagtgtgggatttgcagtaaaccgatgggcgatctcctggatcagatcttcattcaccgtgacaccattcactgtgggaaatgctatgagaagctcttctagcgaccccccaccgccaggctgatcagaagctgatgactcgtggacaaatttggctgtccccagttttgccccaagttgctgtctccccttccctcacctcctccctccctgtttgatttcttcatgcttttgcccttctcaagttgaagttgcatacatccaatatcgtatcttaatgatgctatgataattgcttgtgtgtgtagcttcttgtagcttagaaagcgctttatgcccatgatgtcatttcaggctcaaccaaagaggatcaaacaggaattccatcttggcttccctaagacagattggctttctaatgagtttaagtgggcagaagtgtagggttcagtgtgtcctgactcccttgaggcttataatgggccaagttgaagactgttgatgatccctggtgggtaaattgcagacatcaaatgctagggattggcataggctagtgtttagcttgtctatttgccatatctattttttttaaatttccatacacttgtaaaagtagttagttgcttttgattgagttatatagcagtttttcatttggtcttccactcacctttcactatatttgagtgttcccttacaggtatgttggcatgtgttggaaaatttacacaattaggtttaaattcagtaggatgtgattttaggatgctactgatcaaagtgatatctgtgtctgttggaatcttgatagctgattaatttgccctcaattctgctccctgaacttcacacataaatcttcccaagtgggttttagggtgtatagatcccagcaggattaaggaggtggaaaagcagctaacatttcttgaggctctaccacatagcaggcactgtcacagagtaatggcattaatccccataataatcctgtgaaggtgatattctcatcccatcttagacatgaggatattggaactcagagaggtggctattgcattgcgcagaacgctacagagcccatgctcttcccagagcagcacccacaaaagcaagcattgattttgtgctcagtgtgtgccaagcactgtgcagagggtacacagttcctgccaggttaacaccctcccttcaggcctcccaaaggcataggcttgcaaagagcagaaggtgtgaaatcacactcttcctctgggcatcctggatccctgaattatccccccccccatgaagtacttcaagggccaagctgcccctttccctcctctccgcccatgaaaatgcctccaaactgagatgctttcagctgagaacagatttgactcacagacattaccaaagaggagcttgtgaatccaggaaaagctccagggggctagctgatctgagcagagagctttcagtgacccattttcctgtctagactctgccttaagctagtggcaactgctggggccccaggtacttgggacatggaaactcgttggatggctgggcagatgtaagcctgtccatgcagtcagccgatcctctgctcaggttcagctggactctgccatctgtgggcccagcatcactctgtaagttccttgaaaggaagaacaaccttagagtatttctgatacaaaatgagggcctctgctcttgatttaattataaaatgtctacgtctttctccagtttctgagccctatgcacattggcttgtgggcttgttcttcctgccaaatgatcagagaggaacattccatttatttgtagtggatttcctctggagggcatgtacccacactaaataccaactgctcttcctcagctgtagtccccaacatcagacttggcacgtggtggacactaacacacaggcactcaatgaatgagtgaaggaaataaaagtcaccccgttggtgagaggtgctatccctgagtctcagtgcaggaccagtggatgaaaggcaaggtaaagaggcccaagataggctggcttcccccgttcaaggtatagtctgcctttaagggagttttagaaccaacatgcaagacattgaaagaaatcttgcaagagccattattgacttagatccaaaacagcctctctcatgtctaaaaaggcacagaattttgcagatctgaggaagagggatgcattacctttttgcttcttttcaattgcttagtgtttctaatcatacttaatccacactaatgtgcgcaattataataaatggtaagatatcacatgtgtc

SEQ ID NO: 4650 - DNA, 3878 bp, Homo sapiens
  source 1..3878: mol_type = genomic DNA
gttccctgaagctcggtggggtttgcctacacagctgctctgagtggcgcagttccgggtgtctgtcagggccaaaagcaaagaggaaaggctcccaggcagctcctggtccacctctcatgtgtccactgggctgtgtggccaaatctggaggcaggagggagcctgcaggtagacacatggaaccttctcctctctagtgctgccagtctggtgagaacagctaacgctggtcctccccgcccctcctcctctggctacaagatgaccactgaggattacaagaagctggcaccctacaatatcaggcgcagctctacatcaggggacaccgaggaggaggaggaggaggaggtggtgccattctcctcagatgaacagaaacggagcagtcctacccaggagacacaggcaccgtttatcgcgaagagggtggaggtggtggaagaggacgggccttctgagaagagccaggacccacctgctctggcaagatccactcctggctcaaacaggtcttccccaggcaacaaagacaaggaggccccctgctccagagagctccagagggacttggctggtgaggaggctttcagggcccccaacacagatgctgcaaggtcaagtgcacagttgagtgatggcaatgtgggatccggagccacgggctcccggcctgaaggcttggctgcagtagacatcggctccgagagaggaagctccagtgccacttcagtctctgctgtccctgctgataggaagagcaacagcacagcagcccaggaggatgcaaaggcagacccaaagggggccttggctgattatgaggggaaggatgtggccaccagggtcggagaggcctggcaggagaggcctggagctccaagaggtggccaaggagacccagctgtacccgctcagcaacctgcagatcccagcaccccagagcggcagagcagccccagcggatctgagcaacttgtcagacgagagagttgtggcagcagcgtgttgactgattttgaggggaaggatgtggccaccaaggtcggagaggcctggcaggacaggcctggagccccaagaggtggccaaggagacccagctgtacccactcagcaacctgcagatcccagtaccccagaacagcagaacagccccagcggatctgagcaattcgtcagacgagagagctgcaccagcagggtgaggagcccctcgagctgcatggtcactgttactgtcactgccacatctgagcagcctcacatttatattccagcccccgcaagtgaattggactccagctctaccaccaaagggattctcttcgtgaaggagtacgtgaatgctagtgaagtgtcttctgggaagccagtatctgcacgctatagcaacgtcagcagcattgaggactcattcgccatggagaagaagcctccatgtggcagcactccatactctgagaggacaactggagggatctgtacttactgcaaccgtgagatccgagactgtccaaagattaccctagaacatcttggtatctgctgccatgaatattgctttaagtgtgggatttgcagtaaaccgatgggcgatctcctggatcagatcttcattcaccgtgacaccattcactgtgggaaatgctatgagaagctcttctagcgaccccccaccgccaggctgatcagaagctgatgactcgtggacaaatttggctgtccccagttttgccccaagttgctgtctccccttccctcacctcctccctccctgtttgatttcttcatgcttttgcccttctcaagttgaagttgcatacatccaatatcgtatcttaatgatgctatgataattgcttgtgtgtgtagcttcttgtagcttagaaagcgctttatgcccatgatgtcatttcaggctcaaccaaagaggatcaaacaggaattccatcttggcttccctaagacagattggctttctaatgagtttaagtgggcagaagtgtagggttcagtgtgtcctgactcccttgaggcttataatgggccaagttgaagactgttgatgatccctggtgggtaaattgcagacatcaaatgctagggattggcataggctagtgtttagcttgtctatttgccatatctattttttttaaatttccatacacttgtaaaagtagttagttgcttttgattgagttatatagcagtttttcatttggtcttccactcacctttcactatatttgagtgttcccttacaggtatgttggcatgtgttggaaaatttacacaattaggtttaaattcagtaggatgtgattttaggatgctactgatcaaagtgatatctgtgtctgttggaatcttgatagctgattaatttgccctcaattctgctccctgaacttcacacataaatcttcccaagtgggttttagggtgtatagatcccagcaggattaaggaggtggaaaagcagctaacatttcttgaggctctaccacatagcaggcactgtcacagagtaatggcattaatccccataataatcctgtgaaggtgatattctcatcccatcttagacatgaggatattggaactcagagaggtggctattgcattgcgcagaacgctacagagcccatgctcttcccagagcagcacccacaaaagcaagcattgattttgtgctcagtgtgtgccaagcactgtgcagagggtacacagttcctgccaggttaacaccctcccttcaggcctcccaaaggcataggcttgcaaagagcagaaggtgtgaaatcacactcttcctctgggcatcctggatccctgaattatccccccccccatgaagtacttcaagggccaagctgcccctttccctcctctccgcccatgaaaatgcctccaaactgagatgctttcagctgagaacagatttgactcacagacattaccaaagaggagcttgtgaatccaggaaaagctccagggggctagctgatctgagcagagagctttcagtgacccattttcctgtctagactctgccttaagctagtggcaactgctggggccccaggtacttgggacatggaaactcgttggatggctgggcagatgtaagcctgtccatgcagtcagccgatcctctgctcaggttcagctggactctgccatctgtgggcccagcatcactctgtaagttccttgaaaggaagaacaaccttagagtatttctgatacaaaatgagggcctctgctcttgatttaattataaaatgtctacgtctttctccagtttctgagccctatgcacattggcttgtgggcttgttcttcctgccaaatgatcagagaggaacattccatttatttgtagtggatttcctctggagggcatgtacccacactaaataccaactgctcttcctcagctgtagtccccaacatcagacttggcacgtggtggacactaacacacaggcactcaatgaatgagtgaaggaaataaaagtcaccccgttggtgagaggtgctatccctgagtctcagtgcaggaccagtggatgaaaggcaaggtaaagaggcccaagataggctggcttcccccgttcaaggtatagtctgcctttaagggagttttagaaccaacatgcaagacattgaaagaaatcttgcaagagccattattgacttagatccaaaacagcctctctcatgtctaaaaaggcacagaattttgcagatctgaggaagagggatgcattacctttttgcttcttttcaattgcttagtgtttctaatcatacttaatccacactaatgtgcgcaattataataaatggtaagatatcacatgtgtc

SEQ ID NO: 4651 - DNA, 4034 bp, Homo sapiens
  source 1..4034: mol_type = genomic DNA
cagaagccctgctgaatcaagtgagaggagagctgcggagcaatcaccatgagtatctcagctcttggaggccgcaccaaagggaagcctctgccaccaggcgaggaggagcgcaataacgttctcaagcagatgaaagtgcgaaccacgctgaagggggacaagagctggattaccaagcaggatgaatcggagggtcgcaccatagagctgccctcaggccggagtcgcgccacatccttttcatcagctggggaggttccgaagcctaggcctccgagcacaagggctcccactggctacatcatccggggagtgttcaccaagcccatagacagctcttcccagccccagcagcagttccccaaggccaacgggactccaaaaagtgctgccagtctggtgagaacagctaacgctggtcctccccgcccctcctcctctggctacaagatgaccactgaggattacaagaagctggcaccctacaatatcaggcgcagctctacatcaggggacaccgaggaggaggaggaggaggaggtggtgccattctcctcagatgaacagaaacggaggtcagaggctgcaagcggtgttctgaggaggacagctccccgggagcactcctacgtcctgtcagcggccaagaagagcactggcagtcctacccaggagacacaggcaccgtttatcgcgaagagggtggaggtggtggaagaggacgggccttctgagaagagccaggacccacctgctctggcaagatccactcctggctcaaacagctcaagaggtgaggaaattgtccgcctgcagatcctgacacccagggcaggactccgcctggtggccccagacgtggaaggcatgagctccagtgccacttcagtctctgctgtccctgctgataggaagagcaacagcacagcagcccaggaggatgcaaaggcagacccaaagggggccttggctgattatgaggggaaggatgtggccaccagggtcggagaggcctggcaggagaggcctggagctccaagaggtggccaaggagacccagctgtacccgctcagcaacctgcagatcccagcaccccagagcggcagagcagccccagcggatctgagcaacttgtcagacgagagagttgtggcagcagcgtgttgactgattttgaggggaaggatgtggccaccaaggtcggagaggcctggcaggacaggcctggagccccaagaggtggccaaggagacccagctgtacccactcagcaacctgcagatcccagtaccccagaacagcagaacagccccagcggatctgagcaattcgtcagacgagagagctgcaccagcagggtgaggagcccctcgagctgcatggtcactgttactgtcactgccacatctgagcagcctcacatttatattccagcccccgcaagtgaattggactccagctctaccaccaaagggattctcttcgtgaaggagtacgtgaatgctagtgaagtgtcttctgggaagccagtatctgcacgctatagcaacgtcagcagcattgaggactcattcgccatggagaagaagcctccatgtggcagcactccatactctgagaggacaactggagggatctgtacttactgcaaccgtgagatccgagactgtccaaagattaccctagaacatcttggtatctgctgccatgaatattgctttaagtgtgggatttgcagtaaaccgatgggcgatctcctggatcagatcttcattcaccgtgacaccattcactgtgggaaatgctatgagaagctcttctagcgaccccccaccgccaggctgatcagaagctgatgactcgtggacaaatttggctgtccccagttttgccccaagttgctgtctccccttccctcacctcctccctccctgtttgatttcttcatgcttttgcccttctcaagttgaagttgcatacatccaatatcgtatcttaatgatgctatgataattgcttgtgtgtgtagcttcttgtagcttagaaagcgctttatgcccatgatgtcatttcaggctcaaccaaagaggatcaaacaggaattccatcttggcttccctaagacagattggctttctaatgagtttaagtgggcagaagtgtagggttcagtgtgtcctgactcccttgaggcttataatgggccaagttgaagactgttgatgatccctggtgggtaaattgcagacatcaaatgctagggattggcataggctagtgtttagcttgtctatttgccatatctattttttttaaatttccatacacttgtaaaagtagttagttgcttttgattgagttatatagcagtttttcatttggtcttccactcacctttcactatatttgagtgttcccttacaggtatgttggcatgtgttggaaaatttacacaattaggtttaaattcagtaggatgtgattttaggatgctactgatcaaagtgatatctgtgtctgttggaatcttgatagctgattaatttgccctcaattctgctccctgaacttcacacataaatcttcccaagtgggttttagggtgtatagatcccagcaggattaaggaggtggaaaagcagctaacatttcttgaggctctaccacatagcaggcactgtcacagagtaatggcattaatccccataataatcctgtgaaggtgatattctcatcccatcttagacatgaggatattggaactcagagaggtggctattgcattgcgcagaacgctacagagcccatgctcttcccagagcagcacccacaaaagcaagcattgattttgtgctcagtgtgtgccaagcactgtgcagagggtacacagttcctgccaggttaacaccctcccttcaggcctcccaaaggcataggcttgcaaagagcagaaggtgtgaaatcacactcttcctctgggcatcctggatccctgaattatccccccccccatgaagtacttcaagggccaagctgcccctttccctcctctccgcccatgaaaatgcctccaaactgagatgctttcagctgagaacagatttgactcacagacattaccaaagaggagcttgtgaatccaggaaaagctccagggggctagctgatctgagcagagagctttcagtgacccattttcctgtctagactctgccttaagctagtggcaactgctggggccccaggtacttgggacatggaaactcgttggatggctgggcagatgtaagcctgtccatgcagtcagccgatcctctgctcaggttcagctggactctgccatctgtgggcccagcatcactctgtaagttccttgaaaggaagaacaaccttagagtatttctgatacaaaatgagggcctctgctcttgatttaattataaaatgtctacgtctttctccagtttctgagccctatgcacattggcttgtgggcttgttcttcctgccaaatgatcagagaggaacattccatttatttgtagtggatttcctctggagggcatgtacccacactaaataccaactgctcttcctcagctgtagtccccaacatcagacttggcacgtggtggacactaacacacaggcactcaatgaatgagtgaaggaaataaaagtcaccccgttggtgagaggtgctatccctgagtctcagtgcaggaccagtggatgaaaggcaaggtaaagaggcccaagataggctggcttcccccgttcaaggtatagtctgcctttaagggagttttagaaccaacatgcaagacattgaaagaaatcttgcaagagccattattgacttagatccaaaacagcctctctcatgtctaaaaaggcacagaattttgcagatctgaggaagagggatgcattacctttttgcttcttttcaattgcttagtgtttctaatcatacttaatccacactaatgtgcgcaattataataaatggtaagatatcacatgtgtc

SEQ ID NO: 4652 - DNA, 4305 bp, Homo sapiens
  source 1..4305: mol_type = genomic DNA
ctgaatcaagtgagaggagagctgcggagcaatcaccatgagtatctcagctcttggaggccgcaccaaagggaagcctctgccaccaggcgaggaggagcgcaataacgttctcaagcagatgaaagtgcgaaccacgctgaagggggacaagagctggattaccaagcaggatgaatcggagggtcgcaccatagagctgccctcaggccggagtcgcgccacatccttttcatcagctggggaggttccgaagcctaggcctccgagcacaagggctcccactggctacatcatccggggagtgttcaccaagcccatagacagctcttcccagccccagcagcagttccccaaggccaacgggactccaaaaagtgctgccagtctggtgagaacagctaacgctggtcctccccgcccctcctcctctggctacaagatgaccactgaggattacaagaagctggcaccctacaatatcaggcgcagctctacatcaggggacaccgaggaggaggaggaggaggaggtggtgccattctcctcagatgaacagaaacggaggtcagaggctgcaagcggtgttctgaggaggacagctccccgggagcactcctacgtcctgtcagcggccaagaagagcactggtcctacccaggagacacaggcaccgtttatcgcgaagagggtggaggtggtggaagaggacgggccttctgagaagagccaggacccacctgctctggcaagatccactcctggctcaaacagtgcggatggaggcaggaccaaagcgtctcgggcaatttggatcgagtgcctgccaagtatgcctagccccgctgggagccaggagctcagctcaagaggtgaggaaattgtccgcctgcagatcctgacacccagggcaggactccgcctggtggccccagacgtggaaggcatgaggtcttccccaggcaacaaagacaaggaggccccctgctccagagagctccagagggacttggctggtgaggaggctttcagggcccccaacacagatgctgcaaggtcaagtgcacagttgagtgatggcaatgtgggatccggagccacgggctcccggcctgaaggcttggctgcagtagacatcggctccgagagaggaagctccagtgccacttcagtctctgctgtccctgctgataggaagagcaacagcacagcagcccaggaggatgcaaaggcagacccaaagggggccttggctgattatgaggggaaggatgtggccaccagggtcggagaggcctggcaggagaggcctggagctccaagaggtggccaaggagacccagctgtacccgctcagcaacctgcagatcccagcaccccagagcggcagagcagccccagcggatctgagcaacttgtcagacgagagagttgtggcagcagcgtgttgactgattttgaggggaaggatgtggccaccaaggtcggagaggcctggcaggacaggcctggagccccaagaggtggccaaggagacccagctgtacccactcagcaacctgcagatcccagtaccccagaacagcagaacagccccagcggatctgagcaattcgtcagacgagagagctgcaccagcagggtgaggagcccctcgagctgcatggtcactgttactgtcactgccacatctgagcagcctcacatttatattccagcccccgcaagtgaattggactccagctctaccaccaaagggattctcttcgtgaaggagtacgtgaatgctagtgaagtgtcttctgggaagccagtatctgcacgctatagcaacgtcagcagcattgaggactcattcgccatggagaagaagcctccatgtggcagcactccatactctgagaggacaactggagggatctgtacttactgcaaccgtgagatccgagactgtccaaagattaccctagaacatcttggtatctgctgccatgaatattgctttaagtgtgggatttgcagtaaaccgatgggcgatctcctggatcagatcttcattcaccgtgacaccattcactgtgggaaatgctatgagaagctcttctagcgaccccccaccgccaggctgatcagaagctgatgactcgtggacaaatttggctgtccccagttttgccccaagttgctgtctccccttccctcacctcctccctccctgtttgatttcttcatgcttttgcccttctcaagttgaagttgcatacatccaatatcgtatcttaatgatgctatgataattgcttgtgtgtgtagcttcttgtagcttagaaagcgctttatgcccatgatgtcatttcaggctcaaccaaagaggatcaaacaggaattccatcttggcttccctaagacagattggctttctaatgagtttaagtgggcagaagtgtagggttcagtgtgtcctgactcccttgaggcttataatgggccaagttgaagactgttgatgatccctggtgggtaaattgcagacatcaaatgctagggattggcataggctagtgtttagcttgtctatttgccatatctattttttttaaatttccatacacttgtaaaagtagttagttgcttttgattgagttatatagcagtttttcatttggtcttccactcacctttcactatatttgagtgttcccttacaggtatgttggcatgtgttggaaaatttacacaattaggtttaaattcagtaggatgtgattttaggatgctactgatcaaagtgatatctgtgtctgttggaatcttgatagctgattaatttgccctcaattctgctccctgaacttcacacataaatcttcccaagtgggttttagggtgtatagatcccagcaggattaaggaggtggaaaagcagctaacatttcttgaggctctaccacatagcaggcactgtcacagagtaatggcattaatccccataataatcctgtgaaggtgatattctcatcccatcttagacatgaggatattggaactcagagaggtggctattgcattgcgcagaacgctacagagcccatgctcttcccagagcagcacccacaaaagcaagcattgattttgtgctcagtgtgtgccaagcactgtgcagagggtacacagttcctgccaggttaacaccctcccttcaggcctcccaaaggcataggcttgcaaagagcagaaggtgtgaaatcacactcttcctctgggcatcctggatccctgaattatccccccccccatgaagtacttcaagggccaagctgcccctttccctcctctccgcccatgaaaatgcctccaaactgagatgctttcagctgagaacagatttgactcacagacattaccaaagaggagcttgtgaatccaggaaaagctccagggggctagctgatctgagcagagagctttcagtgacccattttcctgtctagactctgccttaagctagtggcaactgctggggccccaggtacttgggacatggaaactcgttggatggctgggcagatgtaagcctgtccatgcagtcagccgatcctctgctcaggttcagctggactctgccatctgtgggcccagcatcactctgtaagttccttgaaaggaagaacaaccttagagtatttctgatacaaaatgagggcctctgctcttgatttaattataaaatgtctacgtctttctccagtttctgagccctatgcacattggcttgtgggcttgttcttcctgccaaatgatcagagaggaacattccatttatttgtagtggatttcctctggagggcatgtacccacactaaataccaactgctcttcctcagctgtagtccccaacatcagacttggcacgtggtggacactaacacacaggcactcaatgaatgagtgaaggaaataaaagtcaccccgttggtgagaggtgctatccctgagtctcagtgcaggaccagtggatgaaaggcaaggtaaagaggcccaagataggctggcttcccccgttcaaggtatagtctgcctttaagggagttttagaaccaacatgcaagacattgaaagaaatcttgcaagagccattattgacttagatccaaaacagcctctctcatgtctaaaaaggcacagaattttgcagatctgaggaagagggatgcattacctttttgcttcttttcaattgcttagtgtttctaatcatacttaatccacactaatgtgcgcaattataataaatggtaagatatc

SEQ ID NO: 4653 - DNA, 3607 bp, Homo sapiens
  source 1..3607: mol_type = genomic DNA
gctacaagatgaccactgaggattacaagaagctgtgagtatgcaacgccaggcaccctacaatatcaggcgcagctctacatcaggggacaccgaggaggaggaggaggaggaggtggtgccattctcctcagatgaacagaaacggaggtcagaggctgcaagcggtgttctgaggaggacagctccccgggagcactcctacgtcctgtcagcggccaagaagagcactggcagtcctacccaggagacacaggcaccgtttatcgcgaagagggtggaggtggtggaagaggacgggccttctgagaagagccaggacccacctgctctggcaagatccactcctggctcaaacagctcaagaggtgaggaaattgtccgcctgcagatcctgacacccagggcaggactccgcctggtggccccagacgtggaaggcatgagctccagtgccacttcagtctctgctgtccctgctgataggaagagcaacagcacagcagcccaggaggatgcaaaggcagacccaaagggggccttggctgattatgaggggaaggatgtggccaccagggtcggagaggcctggcaggagaggcctggagctccaagaggtggccaaggagacccagctgtacccgctcagcaacctgcagatcccagcaccccagagcggcagagcagccccagcggatctgagcaacttgtcagacgagagagttgtggcagcagcgtgttgactgattttgaggggaaggatgtggccaccaaggtcggagaggcctggcaggacaggcctggagccccaagaggtggccaaggagacccagctgtacccactcagcaacctgcagatcccagtaccccagaacagcagaacagccccagcggatctgagcaattcgtcagacgagagagctgcaccagcagggtgaggagcccctcgagctgcatggtcactgttactgtcactgccacatctgagcagcctcacatttatattccagcccccgcaagtgaattggactccagctctaccaccaaagggattctcttcgtgaaggagtacgtgaatgctagtgaagtgtcttctgggaagccagtatctgcacgctatagcaacgtcagcagcattgaggactcattcgccatggagaagaagcctccatgtggcagcactccatactctgagaggacaactggagggatctgtacttactgcaaccgtgagatccgagactgtccaaagattaccctagaacatcttggtatctgctgccatgaatattgctttaagtgtgggatttgcagtaaaccgatgggcgatctcctggatcagatcttcattcaccgtgacaccattcactgtgggaaatgctatgagaagctcttctagcgaccccccaccgccaggctgatcagaagctgatgactcgtggacaaatttggctgtccccagttttgccccaagttgctgtctccccttccctcacctcctccctccctgtttgatttcttcatgcttttgcccttctcaagttgaagttgcatacatccaatatcgtatcttaatgatgctatgataattgcttgtgtgtgtagcttcttgtagcttagaaagcgctttatgcccatgatgtcatttcaggctcaaccaaagaggatcaaacaggaattccatcttggcttccctaagacagattggctttctaatgagtttaagtgggcagaagtgtagggttcagtgtgtcctgactcccttgaggcttataatgggccaagttgaagactgttgatgatccctggtgggtaaattgcagacatcaaatgctagggattggcataggctagtgtttagcttgtctatttgccatatctattttttttaaatttccatacacttgtaaaagtagttagttgcttttgattgagttatatagcagtttttcatttggtcttccactcacctttcactatatttgagtgttcccttacaggtatgttggcatgtgttggaaaatttacacaattaggtttaaattcagtaggatgtgattttaggatgctactgatcaaagtgatatctgtgtctgttggaatcttgatagctgattaatttgccctcaattctgctccctgaacttcacacataaatcttcccaagtgggttttagggtgtatagatcccagcaggattaaggaggtggaaaagcagctaacatttcttgaggctctaccacatagcaggcactgtcacagagtaatggcattaatccccataataatcctgtgaaggtgatattctcatcccatcttagacatgaggatattggaactcagagaggtggctattgcattgcgcagaacgctacagagcccatgctcttcccagagcagcacccacaaaagcaagcattgattttgtgctcagtgtgtgccaagcactgtgcagagggtacacagttcctgccaggttaacaccctcccttcaggcctcccaaaggcataggcttgcaaagagcagaaggtgtgaaatcacactcttcctctgggcatcctggatccctgaattatccccccccccatgaagtacttcaagggccaagctgcccctttccctcctctccgcccatgaaaatgcctccaaactgagatgctttcagctgagaacagatttgactcacagacattaccaaagaggagcttgtgaatccaggaaaagctccagggggctagctgatctgagcagagagctttcagtgacccattttcctgtctagactctgccttaagctagtggcaactgctggggccccaggtacttgggacatggaaactcgttggatggctgggcagatgtaagcctgtccatgcagtcagccgatcctctgctcaggttcagctggactctgccatctgtgggcccagcatcactctgtaagttccttgaaaggaagaacaaccttagagtatttctgatacaaaatgagggcctctgctcttgatttaattataaaatgtctacgtctttctccagtttctgagccctatgcacattggcttgtgggcttgttcttcctgccaaatgatcagagaggaacattccatttatttgtagtggatttcctctggagggcatgtacccacactaaataccaactgctcttcctcagctgtagtccccaacatcagacttggcacgtggtggacactaacacacaggcactcaatgaatgagtgaaggaaataaaagtcaccccgttggtgagaggtgctatccctgagtctcagtgcaggaccagtggatgaaaggcaaggtaaagaggcccaagataggctggcttcccccgttcaaggtatagtctgcctttaagggagttttagaaccaacatgcaagacattgaaagaaatcttgcaagagccattattgacttagatccaaaacagcctctctcatgtctaaaaaggcacagaattttgcagatctgaggaagagggatgcattacctttttgcttcttttcaattgcttagtgtttctaatcatacttaatccacactaatgtgcgcaattataataaatggtaagatatcacatgtgtca

SEQ ID NO: 4654 - DNA, 3626 bp, Homo sapiens
  source 1..3626: mol_type = genomic DNA
gcgcagctctacatcaggggacaccgaggaggaggaggaggaggaggtggtgccattctcctcagatgaacagaaacggagtctgaggaggacagctccccgggagcactcctacgtcctgtcagcggccaagaagagcactggcagtcctacccaggagacacaggcaccgtttatcgcgaagagggtggaggtggtggaagaggacgggccttctgagaagagccaggacccacctgctctggcaagatccactcctggctcaaacaggtcttccccaggcaacaaagacaaggaggccccctgctccagagagctccagagggacttggctggtgaggaggctttcagggcccccaacacagatgctgcaaggtcaagtgcacagttgagtgatggcaatgtgggatccggagccacgggctcccggcctgaaggcttggctgcagtagacatcggctccgagagaggaagctccagtgccacttcagtctctgctgtccctgctgataggaagagcaacagcacagcagcccaggaggatgcaaaggcagacccaaagggggccttggctgattatgaggggaaggatgtggccaccagggtcggagaggcctggcaggagaggcctggagctccaagaggtggccaaggagacccagctgtacccgctcagcaacctgcagatcccagcaccccagagcggcagagcagccccagcggatctgagcaacttgtcagacgagagagttgtggcagcagcgtgttgactgattttgaggggaaggatgtggccaccaaggtcggagaggcctggcaggacaggcctggagccccaagaggtggccaaggagacccagctgtacccactcagcaacctgcagatcccagtaccccagaacagcagaacagccccagcggatctgagcaattcgtcagacgagagagctgcaccagcagggtgaggagcccctcgagctgcatggtcactgttactgtcactgccacatctgagcagcctcacatttatattccagcccccgcaagtgaattggactccagctctaccaccaaagggattctcttcgtgaaggagtacgtgaatgctagtgaagtgtcttctgggaagccagtatctgcacgctatagcaacgtcagcagcattgaggactcattcgccatggagaagaagcctccatgtggcagcactccatactctgagaggacaactggagggatctgtacttactgcaaccgtgagatccgagactgtccaaagattaccctagaacatcttggtatctgctgccatgaatattgctttaagtgtgggatttgcagtaaaccgatgggcgatctcctggatcagatcttcattcaccgtgacaccattcactgtgggaaatgctatgagaagctcttctagcgaccccccaccgccaggctgatcagaagctgatgactcgtggacaaatttggctgtccccagttttgccccaagttgctgtctccccttccctcacctcctccctccctgtttgatttcttcatgcttttgcccttctcaagttgaagttgcatacatccaatatcgtatcttaatgatgctatgataattgcttgtgtgtgtagcttcttgtagcttagaaagcgctttatgcccatgatgtcatttcaggctcaaccaaagaggatcaaacaggaattccatcttggcttccctaagacagattggctttctaatgagtttaagtgggcagaagtgtagggttcagtgtgtcctgactcccttgaggcttataatgggccaagttgaagactgttgatgatccctggtgggtaaattgcagacatcaaatgctagggattggcataggctagtgtttagcttgtctatttgccatatctattttttttaaatttccatacacttgtaaaagtagttagttgcttttgattgagttatatagcagtttttcatttggtcttccactcacctttcactatatttgagtgttcccttacaggtatgttggcatgtgttggaaaatttacacaattaggtttaaattcagtaggatgtgattttaggatgctactgatcaaagtgatatctgtgtctgttggaatcttgatagctgattaatttgccctcaattctgctccctgaacttcacacataaatcttcccaagtgggttttagggtgtatagatcccagcaggattaaggaggtggaaaagcagctaacatttcttgaggctctaccacatagcaggcactgtcacagagtaatggcattaatccccataataatcctgtgaaggtgatattctcatcccatcttagacatgaggatattggaactcagagaggtggctattgcattgcgcagaacgctacagagcccatgctcttcccagagcagcacccacaaaagcaagcattgattttgtgctcagtgtgtgccaagcactgtgcagagggtacacagttcctgccaggttaacaccctcccttcaggcctcccaaaggcataggcttgcaaagagcagaaggtgtgaaatcacactcttcctctgggcatcctggatccctgaattatccccccccccatgaagtacttcaagggccaagctgcccctttccctcctctccgcccatgaaaatgcctccaaactgagatgctttcagctgagaacagatttgactcacagacattaccaaagaggagcttgtgaatccaggaaaagctccagggggctagctgatctgagcagagagctttcagtgacccattttcctgtctagactctgccttaagctagtggcaactgctggggccccaggtacttgggacatggaaactcgttggatggctgggcagatgtaagcctgtccatgcagtcagccgatcctctgctcaggttcagctggactctgccatctgtgggcccagcatcactctgtaagttccttgaaaggaagaacaaccttagagtatttctgatacaaaatgagggcctctgctcttgatttaattataaaatgtctacgtctttctccagtttctgagccctatgcacattggcttgtgggcttgttcttcctgccaaatgatcagagaggaacattccatttatttgtagtggatttcctctggagggcatgtacccacactaaataccaactgctcttcctcagctgtagtccccaacatcagacttggcacgtggtggacactaacacacaggcactcaatgaatgagtgaaggaaataaaagtcaccccgttggtgagaggtgctatccctgagtctcagtgcaggaccagtggatgaaaggcaaggtaaagaggcccaagataggctggcttcccccgttcaaggtatagtctgcctttaagggagttttagaaccaacatgcaagacattgaaagaaatcttgcaagagccattattgacttagatccaaaacagcctctctcatgtctaaaaaggcacagaattttgcagatctgaggaagagggatgcattacctttttgcttcttttcaattgcttagtgtttctaatcatacttaatccacactaatgtgcgcaattataataaatggtaagatatcac

SEQ ID NO: 4655 - DNA, 1599 bp, Homo sapiens
  source 1..1599: mol_type = genomic DNA
cagaagccctgctgaatcaagtgagaggagagctgcggagcaatcaccatgagtatctcagctcttggaggccgcaccaaagggaagcctctgccaccaggcgaggaggagcgcaataacgttctcaagcagatgaaagtgcgaaccacgctgaagggggacaagagctggattaccaagcaggatgaatcggagggtcgcaccatagagctgccctcaggccggagtcgcgccacatccttttcatcagctggggaggttccgaagcctaggcctccgagcacaagggctcccactggctacatcatccggggagtgttcaccaagcccatagacagctcttcccagccccagcagcagttccccaaggccaacgggactccaaaaagtgctgccagtctggtgagaacagctaacgctggtcctccccgcccctcctcctctggctacaagatgaccactgaggattacaagaagctggcaccctacaatatcaggcgcagctctacatcaggggacaccgaggaggaggaggaggaggaggtggtgccattctcctcagatgaacagaaacggaggtcagaggctgcaagcggtgttctgaggaggacagctccccgggagcactcctacgtcctgtcagcggccaagaagagcactggcagtcctacccaggagacacaggcaccgtttatcgcgaagagggtggaggtggtggaagaggacgggccttctgagaagagccaggacccacctgctctggcaagatccactcctggctcaaacagtgcggatggaggcaggaccaaagcgtctcgggcaatttggatcgagtgcctgccaagtatgcctagccccgctgggagccaggagctcagctcaagaggtgaggaaattgtccgcctgcagatcctgacacccagggcaggactccgcctggtggccccagacgtggaaggcatgaggtcttccccaggcaacaaagacaaggaggccccctgctccagagagctccagagggacttggctggtgaggaggctttcagggcccccaacacagatgctgcaaggtcaagtgcacagttgagtgatggcaatgtgggatccggagccacgggctcccggcctgaaggcttggctgcagtagacatcggctccgagagaggaagctccagtgccacttcagtctctgctgtccctgctgataggaagagcaacagcacagcagcccaggaggatgcaaaggcagacccaaagggggccttggctgattatgaggggaaggatgtggccaccagggtcggagaggcctggcaggagaggcctggagctccaagaggtggccaaggagacccagctgtacccgctcagcaacctgcagatcccagcaccccagagcggcagagcagccccagcggatctgagcaacttgtcagacgagagagttgtggcagcagcgtgttgactgattttgaggggaaggatgtggccaccaaggtcggagaggcctggcaggacaggcctggacccagctgtacccactcagcaacctgcagatcccagtaccccagaacagcagaacagccccagcggatctga

SEQ ID NO: 4656 - DNA, 633 bp, Homo sapiens
  source 1..633: mol_type = genomic DNA
gaggaggctttcagggcccccaacacagatgctgcaaggtcaagtgcacagttgagtgatggcaatgtgggatccggagccacgggctcccggcctgaaggcttggctgcagtagacatcggctccgagagaggaaggctgtgtgcagctgctagctttgcctctttcctggaagaccaggatgggcacagtgccaactctcagtcctgcaagcctagaccagcagccatcagctccagtgccacttcagtctctgctgtccctgctgataggaagagcaacagcacagcagcccaggaggatgcaaaggcagacccaaagggggccttggctgattatgaggggaaggatgtggccaccagggtcggagaggcctggcaggagaggcctggagctccaagaggtggccaaggagacccagctgtacccgctcagcaacctgcagatcccagcaccccagagcggcagagcagccccagcggatctgagcaacttgtcagacgagagagttgtggcagcagcgtgttgactgattttgaggggaaggatgtggccaccaaggtcggagaggcctggcaggacaggcctggagccccaagaggtggccaaggagacccagctgtacccactcag

SEQ ID NO: 4657 - DNA, 660 bp, Homo sapiens
  source 1..660: mol_type = genomic DNA
tctgaggaggacagctccccgggagcactcctacgtcctgtcagcggccaagaagagcactggcagtcctacccaggagacacaggcaccgtttatcgcgaagagggtggaggtggtggaagaggacgggccttctgagaagagccaggacccacctgctctggcaagatccactcctggctcaaacagtgcggatggaggcaggaccaaagcgtctcgggcaatttggatcgagtgcctgccaagtatgcctagccccgctgggagccaggagctcagctcaagaggtgaggaaattgtccgcctgcagatcctgacacccagggcaggactccgcctggtggccccagacgtggaaggcatgaggtcttccccaggcaacaaagacaaggaggccccctgctccagagagctccagagggacttggctggtgaggaggctttcagggcccccaacacagatgctgcaaggtcaagtgcacagttgagtgatggcaatgtgggatccggagccacgggctcccggcctgaaggcttggctgcagtagacatcggctccgagagaggaagctccagtgccacttcagtctctgctgtccctgctgataggaagagcaacagcacagcagcccaggaggatgcaaaggcagacccaaaggg

SEQ ID NO: 4658 - DNA, 411 bp, Homo sapiens
  source 1..411: mol_type = genomic DNA
cagtcctacccaggagacacaggcaccgtttatcgcgaagagggtggaggtggtggaagaggacgggccttctgagaagagccaggacccacctgctctggcaagatccactcctggctcaaacagtgcggatggaggcaggaccaaagcgtctcgggcaatttggatcgagtgcctgccaagtatgcctagccccgctgggagccaggagctcaggtcttccccaggcaacaaagacaaggaggccccctgctccagagagctccagagggacttggctggtgaggaggctttcagggcccccaacacagatgctgcaagctccagtgccacttcagtctctgctgtccctgctgataggaagagcaacagcacagcagcccaggaggatgcaaaggcagacccaaaggg

SEQ ID NO: 4659 - DNA, 4328 bp, Homo sapiens
  source 1..4328: mol_type = genomic DNA
cagaagccctgctgaatcaagtgagaggagagctgcggagcaatcaccatgagtatctcagctcttggaggccgcaccaaagggaagcctctgccaccaggcgaggaggagcgcaataacgttctcaagcagatgaaagtgcgaaccacgctgaagggggacaagagctggattaccaagcaggatgaatcggagggtcgcaccatagagctgccctcaggccggagtcgcgccacatccttttcatcagctggggaggttccgaagcctaggcctccgagcacaagggctcccactggctacatcatccggggagtgttcaccaagcccatagacagctcttcccagccccagcagcagttccccaaggccaacgggactccaaaaagtgctgccagtctggtgagaacagctaacgctggtcctccccgcccctcctcctctggctacaagatgaccactgaggattacaagaagctggcaccctacaatatcaggcgcagctctacatcaggggacaccgaggaggaggaggaggaggaggtggtgccattctcctcagatgaacagaaacggaggtcagaggctgcaagcggtgttctgaggaggacagctccccgggagcactcctacgtcctgtcagcggccaagaagagcactggcagtcctacccaggagacacaggcaccgtttatcgcgaagagggtggaggtggtggaagaggacgggccttctgagaagagccaggacccacctgctctggcaagatccactcctggctcaaacagtgcggatggaggcaggaccaaagcgtctcgggcaatttggatcgagtgcctgccaagtatgcctagccccgctgggagccaggagctcagctcaagaggtgaggaaattgtccgcctgcagatcctgacacccagggcaggactccgcctggtggccccagacgtggaaggcatgaggtcttccccaggcaacaaagacaaggaggccccctgctccagagagctccagagggacttggctggtgaggaggctttcagggcccccaacacagatgctgcaaggtcaagtgcacagttgagtgatggcaatgtgggatccggagccacgggctcccggcctgaaggcttggctgcagtagacatcggctccgagagaggaagctccagtgccacttcagtctctgctgtccctgctgataggaagagcaacagcacagcagcccaggaggatgcaaaggcagacccaaagggggccttggctgattatgaggggaaggatgtggccaccagggtcggagaggcctggcaggagaggcctggagctccaagaggtggccaaggagacccagctgtacccgctcagcaacctgcagatcccagcaccccagagcggcagagcagccccagcggatctgagcaacttgtcagacgagagagttgtggcagcagcgtgttgactgattttgaggggaaggatgtggccaccaaggtcggagaggcctggcaggacaggcctggagccccaagaggtggccaaggagacccagctgtacccactcagcaacctgcagatcccagtaccccagaacagcagaacagccccagcggatctgagcaattcgtcagacgagagagctgcaccagcagggtgaggagcccctcgagctgcatggtcactgttactgtcactgccacatctgagcagcctcacatttatattccagcccccgcaagtgaattggactccagctctaccaccaaagggattctcttcgtgaaggagtacgtgaatgctagtgaagtgtcttctgggaagccagtatctgcacgctatagcaacgtcagcagcattgaggactcattcgccatggagaagaagcctccatgtggcagcactccatactctgagaggacaactggagggatctgtacttactgcaaccgtgagatccgagactgtccaaagattaccctagaacatcttggtatctgctgccatgaatattgctttaagtgtgggatttgcagtaaaccgatgggcgatctcctggatcagatcttcattcaccgtgacaccattcactgtgggaaatgctatgagaagctcttctagcgaccccccaccgccaggctgatcagaagctgatgactcgtggacaaatttggctgtccccagttttgccccaagttgctgtctccccttccctcacctcctccctccctgtttgatttcttcatgcttttgcccttctcaagttgaagttgcatacatccaatatcgtatcttaatgatgctatgataattgcttgtgtgtgtagcttcttgtagcttagaaagcgctttatgcccatgatgtcatttcaggctcaaccaaagaggatcaaacaggaattccatcttggcttccctaagacagattggctttctaatgagtttaagtgggcagaagtgtagggttcagtgtgtcctgactcccttgaggcttataatgggccaagttgaagactgttgatgatccctggtgggtaaattgcagacatcaaatgctagggattggcataggctagtgtttagcttgtctatttgccatatctattttttttaaatttccatacacttgtaaaagtagttagttgcttttgattgagttatatagcagtttttcatttggtcttccactcacctttcactatatttgagtgttcccttacaggtatgttggcatgtgttggaaaatttacacaattaggtttaaattcagtaggatgtgattttaggatgctactgatcaaagtgatatctgtgtctgttggaatcttgatagctgattaatttgccctcaattctgctccctgaacttcacacataaatcttcccaagtgggttttagggtgtatagatcccagcaggattaaggaggtggaaaagcagctaacatttcttgaggctctaccacatagcaggcactgtcacagagtaatggcattaatccccataataatcctgtgaaggtgatattctcatcccatcttagacatgaggatattggaactcagagaggtggctattgcattgcgcagaacgctacagagcccatgctcttcccagagcagcacccacaaaagcaagcattgattttgtgctcagtgtgtgccaagcactgtgcagagggtacacagttcctgccaggttaacaccctcccttcaggcctcccaaaggcataggcttgcaaagagcagaaggtgtgaaatcacactcttcctctgggcatcctggatccctgaattatccccccccccatgaagtacttcaagggccaagctgcccctttccctcctctccgcccatgaaaatgcctccaaactgagatgctttcagctgagaacagatttgactcacagacattaccaaagaggagcttgtgaatccaggaaaagctccagggggctagctgatctgagcagagagctttcagtgacccattttcctgtctagactctgccttaagctagtggcaactgctggggccccaggtacttgggacatggaaactcgttggatggctgggcagatgtaagcctgtccatgcagtcagccgatcctctgctcaggttcagctggactctgccatctgtgggcccagcatcactctgtaagttccttgaaaggaagaacaaccttagagtatttctgatacaaaatgagggcctctgctcttgatttaattataaaatgtctacgtctttctccagtttctgagccctatgcacattggcttgtgggcttgttcttcctgccaaatgatcagagaggaacattccatttatttgtagtggatttcctctggagggcatgtacccacactaaataccaactgctcttcctcagctgtagtccccaacatcagacttggcacgtggtggacactaacacacaggcactcaatgaatgagtgaaggaaataaaagtcaccccgttggtgagaggtgctatccctgagtctcagtgcaggaccagtggatgaaaggcaaggtaaagaggcccaagataggctggcttcccccgttcaaggtatagtctgcctttaagggagttttagaaccaacatgcaagacattgaaagaaatcttgcaagagccattattgacttagatccaaaacagcctctctcatgtctaaaaaggcacagaattttgcagatctgaggaagagggatgcattacctttttgcttcttttcaattgcttagtgtttctaatcatacttaatccacactaatgtgcgcaattataataaatggtaagatatcacatgtgtc

SEQ ID NO: 4660 - DNA, 3191 bp, Homo sapiens
  source 1..3191: mol_type = genomic DNA
aaagtgaaatggccgcccgggacgagctcggcctcggcggggattctcttgaggccatgcccgtgccggccgccagaggtcgcccgaggatcacgaatgggcccgaggagctggctgccccttcccccgcggccttggctgattatgaggggaaggatgtggccaccagggtcggagaggcctggcaggagaggcctggagctccaagaggtggccaaggagacccagctgtacccgctcagcaacctgcagatcccagcaccccagagcggcagagcagccccagcggatctgagcaacttgtcagacgagagagttgtggcagcagcgtgttgactgattttgaggggaaggatgtggccaccaaggtcggagaggcctggcaggacaggcctggagccccaagaggtggccaaggagacccagctgtacccactcagcaacctgcagatcccagtaccccagaacagcagaacagccccagcggatctgagcaattcgtcagacgagagagctgcaccagcagggtgaggagcccctcgagctgcatggtcactgttactgtcactgccacatctgagcagcctcacatttatattccagcccccgcaagtgaattggactccagctctaccaccaaagggattctcttcgtgaaggagtacgtgaatgctagtgaagtgtcttctgggaagccagtatctgcacgctatagcaacgtcagcagcattgaggactcattcgccatggagaagaagcctccatgtggcagcactccatactctgagaggacaactggagggatctgtacttactgcaaccgtgagatccgagactgtccaaagattaccctagaacatcttggtatctgctgccatgaatattgctttaagtgtgggatttgcagtaaaccgatgggcgatctcctggatcagatcttcattcaccgtgacaccattcactgtgggaaatgctatgagaagctcttctagcgaccccccaccgccaggctgatcagaagctgatgactcgtggacaaatttggctgtccccagttttgccccaagttgctgtctccccttccctcacctcctccctccctgtttgatttcttcatgcttttgcccttctcaagttgaagttgcatacatccaatatcgtatcttaatgatgctatgataattgcttgtgtgtgtagcttcttgtagcttagaaagcgctttatgcccatgatgtcatttcaggctcaaccaaagaggatcaaacaggaattccatcttggcttccctaagacagattggctttctaatgagtttaagtgggcagaagtgtagggttcagtgtgtcctgactcccttgaggcttataatgggccaagttgaagactgttgatgatccctggtgggtaaattgcagacatcaaatgctagggattggcataggctagtgtttagcttgtctatttgccatatctattttttttaaatttccatacacttgtaaaagtagttagttgcttttgattgagttatatagcagtttttcatttggtcttccactcacctttcactatatttgagtgttcccttacaggtatgttggcatgtgttggaaaatttacacaattaggtttaaattcagtaggatgtgattttaggatgctactgatcaaagtgatatctgtgtctgttggaatcttgatagctgattaatttgccctcaattctgctccctgaacttcacacataaatcttcccaagtgggttttagggtgtatagatcccagcaggattaaggaggtggaaaagcagctaacatttcttgaggctctaccacatagcaggcactgtcacagagtaatggcattaatccccataataatcctgtgaaggtgatattctcatcccatcttagacatgaggatattggaactcagagaggtggctattgcattgcgcagaacgctacagagcccatgctcttcccagagcagcacccacaaaagcaagcattgattttgtgctcagtgtgtgccaagcactgtgcagagggtacacagttcctgccaggttaacaccctcccttcaggcctcccaaaggcataggcttgcaaagagcagaaggtgtgaaatcacactcttcctctgggcatcctggatccctgaattatccccccccccatgaagtacttcaagggccaagctgcccctttccctcctctccgcccatgaaaatgcctccaaactgagatgctttcagctgagaacagatttgactcacagacattaccaaagaggagcttgtgaatccaggaaaagctccagggggctagctgatctgagcagagagctttcagtgacccattttcctgtctagactctgccttaagctagtggcaactgctggggccccaggtacttgggacatggaaactcgttggatggctgggcagatgtaagcctgtccatgcagtcagccgatcctctgctcaggttcagctggactctgccatctgtgggcccagcatcactctgtaagttccttgaaaggaagaacaaccttagagtatttctgatacaaaatgagggcctctgctcttgatttaattataaaatgtctacgtctttctccagtttctgagccctatgcacattggcttgtgggcttgttcttcctgccaaatgatcagagaggaacattccatttatttgtagtggatttcctctggagggcatgtacccacactaaataccaactgctcttcctcagctgtagtccccaacatcagacttggcacgtggtggacactaacacacaggcactcaatgaatgagtgaaggaaataaaagtcaccccgttggtgagaggtgctatccctgagtctcagtgcaggaccagtggatgaaaggcaaggtaaagaggcccaagataggctggcttcccccgttcaaggtatagtctgcctttaagggagttttagaaccaacatgcaagacattgaaagaaatcttgcaagagccattattgacttagatccaaaacagcctctctcatgtctaaaaaggcacagaattttgcagatctgaggaagagggatgcattacctttttgcttcttttcaattgcttagtgtttctaatcatacttaatccacactaatgtgcgcaattataataaatggtaagatatca

SEQ ID NO: 4661 - DNA, 4235 bp, Homo sapiens
  source 1..4235: mol_type = genomic DNA
cagaagccctgctgaatcaagtgagaggagagctgcggagcaatcaccatgagtatctcagctcttggaggccgcaccaaagggaagcctctgccaccaggcgaggaggagcgcaataacgttctcaagcagatgaaagtgcgaaccacgctgaagggggacaagagctggattaccaagcaggatgaatcggagggtcgcaccatagagctgccctcaggccggagtcgcgccacatccttttcatcagctggggaggttccgaagcctaggcctccgagcacaagggctcccactggctacatcatccggggagtgttcaccaagcccatagacagctcttcccagccccagcagcagttccccaaggccaacgggactccaaaaagtgctgccagtctggtgagaacagctaacgctggtcctccccgcccctcctcctctggctacaagatgaccactgaggattacaagaagctggcaccctacaatatcaggcgcagctctacatcaggggacaccgaggaggaggaggaggaggaggtggtgccattctcctcagatgaacagaaacggaggtcagaggctgcaagcggtgttctgaggaggacagctccccgggagcactcctacgtcctgtcagcggccaagaagagcactggtcctacccaggagacacaggcaccgtttatcgcgaagagggtggaggtggtggaagaggacgggccttctgagaagagccaggacccacctgctctggcaagatccactcctggctcaaacagctcaagaggtgaggaaattgtccgcctgcagatcctgacacccagggcaggactccgcctggtggccccagacgtggaaggcatgaggtcttccccaggcaacaaagacaaggaggccccctgctccagagagctccagagggacttggctggtgaggaggctttcagggcccccaacacagatgctgcaaggtcaagtgcacagttgagtgatggcaatgtgggatccggagccacgggctcccggcctgaaggcttggctgcagtagacatcggctccgagagaggaagctccagtgccacttcagtctctgctgtccctgctgataggaagagcaacagcacagcagcccaggaggatgcaaaggcagacccaaagggggccttggctgattatgaggggaaggatgtggccaccagggtcggagaggcctggcaggagaggcctggagctccaagaggtggccaaggagacccagctgtacccgctcagcaacctgcagatcccagcaccccagagcggcagagcagccccagcggatctgagcaacttgtcagacgagagagttgtggcagcagcgtgttgactgattttgaggggaaggatgtggccaccaaggtcggagaggcctggcaggacaggcctggagccccaagaggtggccaaggagacccagctgtacccactcagcaacctgcagatcccagtaccccagaacagcagaacagccccagcggatctgagcaattcgtcagacgagagagctgcaccagcagggtgaggagcccctcgagctgcatggtcactgttactgtcactgccacatctgagcagcctcacatttatattccagcccccgcaagtgaattggactccagctctaccaccaaagggattctcttcgtgaaggagtacgtgaatgctagtgaagtgtcttctgggaagccagtatctgcacgctatagcaacgtcagcagcattgaggactcattcgccatggagaagaagcctccatgtggcagcactccatactctgagaggacaactggagggatctgtacttactgcaaccgtgagatccgagactgtccaaagattaccctagaacatcttggtatctgctgccatgaatattgctttaagtgtgggatttgcagtaaaccgatgggcgatctcctggatcagatcttcattcaccgtgacaccattcactgtgggaaatgctatgagaagctcttctagcgaccccccaccgccaggctgatcagaagctgatgactcgtggacaaatttggctgtccccagttttgccccaagttgctgtctccccttccctcacctcctccctccctgtttgatttcttcatgcttttgcccttctcaagttgaagttgcatacatccaatatcgtatcttaatgatgctatgataattgcttgtgtgtgtagcttcttgtagcttagaaagcgctttatgcccatgatgtcatttcaggctcaaccaaagaggatcaaacaggaattccatcttggcttccctaagacagattggctttctaatgagtttaagtgggcagaagtgtagggttcagtgtgtcctgactcccttgaggcttataatgggccaagttgaagactgttgatgatccctggtgggtaaattgcagacatcaaatgctagggattggcataggctagtgtttagcttgtctatttgccatatctattttttttaaatttccatacacttgtaaaagtagttagttgcttttgattgagttatatagcagtttttcatttggtcttccactcacctttcactatatttgagtgttcccttacaggtatgttggcatgtgttggaaaatttacacaattaggtttaaattcagtaggatgtgattttaggatgctactgatcaaagtgatatctgtgtctgttggaatcttgatagctgattaatttgccctcaattctgctccctgaacttcacacataaatcttcccaagtgggttttagggtgtatagatcccagcaggattaaggaggtggaaaagcagctaacatttcttgaggctctaccacatagcaggcactgtcacagagtaatggcattaatccccataataatcctgtgaaggtgatattctcatcccatcttagacatgaggatattggaactcagagaggtggctattgcattgcgcagaacgctacagagcccatgctcttcccagagcagcacccacaaaagcaagcattgattttgtgctcagtgtgtgccaagcactgtgcagagggtacacagttcctgccaggttaacaccctcccttcaggcctcccaaaggcataggcttgcaaagagcagaaggtgtgaaatcacactcttcctctgggcatcctggatccctgaattatccccccccccatgaagtacttcaagggccaagctgcccctttccctcctctccgcccatgaaaatgcctccaaactgagatgctttcagctgagaacagatttgactcacagacattaccaaagaggagcttgtgaatccaggaaaagctccagggggctagctgatctgagcagagagctttcagtgacccattttcctgtctagactctgccttaagctagtggcaactgctggggccccaggtacttgggacatggaaactcgttggatggctgggcagatgtaagcctgtccatgcagtcagccgatcctctgctcaggttcagctggactctgccatctgtgggcccagcatcactctgtaagttccttgaaaggaagaacaaccttagagtatttctgatacaaaatgagggcctctgctcttgatttaattataaaatgtctacgtctttctccagtttctgagccctatgcacattggcttgtgggcttgttcttcctgccaaatgatcagagaggaacattccatttatttgtagtggatttcctctggagggcatgtacccacactaaataccaactgctcttcctcagctgtagtccccaacatcagacttggcacgtggtggacactaacacacaggcactcaatgaatgagtgaaggaaataaaagtcaccccgttggtgagaggtgctatccctgagtctcagtgcaggaccagtggatgaaaggcaaggtaaagaggcccaagataggctggcttcccccgttcaaggtatagtctgcctttaagggagttttagaaccaacatgcaagacattgaaagaaatcttgcaagagccattattgacttagatccaaaacagcctctctcatgtctaaaaaggcacagaattttgcagatctgaggaagagggatgcattacctttttgcttcttttcaattgcttagtgtttctaatcatacttaatccacactaatgtgcgcaattataataaatggtaagatatcacatgtgtc

SEQ ID NO: 4662 - DNA, 4421 bp, Homo sapiens
  source 1..4421: mol_type = genomic DNA
cagaagccctgctgaatcaagtgagaggagagctgcggagcaatcaccatgagtatctcagctcttggaggccgcaccaaagggaagcctctgccaccaggcgaggaggagcgcaataacgttctcaagcagatgaaagtgcgaaccacgctgaagggggacaagagctggattaccaagcaggatgaatcggagggtcgcaccatagagctgccctcaggccggagtcgcgccacatccttttcatcagctggggaggttccgaagcctaggcctccgagcacaagggctcccactggctacatcatccggggagtgttcaccaagcccatagacagctcttcccagccccagcagcagttccccaaggccaacgggactccaaaaagtgctgccagtctggtgagaacagctaacgctggtcctccccgcccctcctcctctggctacaagatgaccactgaggattacaagaagctggcaccctacaatatcaggcgcagctctacatcaggggacaccgaggaggaggaggaggaggaggtggtgccattctcctcagatgaacagaaacggaggtcagaggctgcaagcggtgttctgaggaggacagctccccgggagcactcctacgtcctgtcagcggccaagaagagcactggtcctacccaggagacacaggcaccgtttatcgcgaagagggtggaggtggtggaagaggacgggccttctgagaagagccaggacccacctgctctggcaagatccactcctggctcaaacagtgcggatggaggcaggaccaaagcgtctcgggcaatttggatcgagtgcctgccaagtatgcctagccccgctgggagccaggagctcagctcaagaggtgaggaaattgtccgcctgcagatcctgacacccagggcaggactccgcctggtggccccagacgtggaaggcatgaggtcttccccaggcaacaaagacaaggaggccccctgctccagagagctccagagggacttggctggtgaggaggctttcagggcccccaacacagatgctgcaaggtcaagtgcacagttgagtgatggcaatgtgggatccggagccacgggctcccggcctgaaggcttggctgcagtagacatcggctccgagagaggaaggctgtgtgcagctgctagctttgcctctttcctggaagaccaggatgggcacagtgccaactctcagtcctgcaagcctagaccagcagccatcagctccagtgccacttcagtctctgctgtccctgctgataggaagagcaacagcacagcagcccaggaggatgcaaaggcagacccaaagggggccttggctgattatgaggggaaggatgtggccaccagggtcggagaggcctggcaggagaggcctggagctccaagaggtggccaaggagacccagctgtacccgctcagcaacctgcagatcccagcaccccagagcggcagagcagccccagcggatctgagcaacttgtcagacgagagagttgtggcagcagcgtgttgactgattttgaggggaaggatgtggccaccaaggtcggagaggcctggcaggacaggcctggagccccaagaggtggccaaggagacccagctgtacccactcagcaacctgcagatcccagtaccccagaacagcagaacagccccagcggatctgagcaattcgtcagacgagagagctgcaccagcagggtgaggagcccctcgagctgcatggtcactgttactgtcactgccacatctgagcagcctcacatttatattccagcccccgcaagtgaattggactccagctctaccaccaaagggattctcttcgtgaaggagtacgtgaatgctagtgaagtgtcttctgggaagccagtatctgcacgctatagcaacgtcagcagcattgaggactcattcgccatggagaagaagcctccatgtggcagcactccatactctgagaggacaactggagggatctgtacttactgcaaccgtgagatccgagactgtccaaagattaccctagaacatcttggtatctgctgccatgaatattgctttaagtgtgggatttgcagtaaaccgatgggcgatctcctggatcagatcttcattcaccgtgacaccattcactgtgggaaatgctatgagaagctcttctagcgaccccccaccgccaggctgatcagaagctgatgactcgtggacaaatttggctgtccccagttttgccccaagttgctgtctccccttccctcacctcctccctccctgtttgatttcttcatgcttttgcccttctcaagttgaagttgcatacatccaatatcgtatcttaatgatgctatgataattgcttgtgtgtgtagcttcttgtagcttagaaagcgctttatgcccatgatgtcatttcaggctcaaccaaagaggatcaaacaggaattccatcttggcttccctaagacagattggctttctaatgagtttaagtgggcagaagtgtagggttcagtgtgtcctgactcccttgaggcttataatgggccaagttgaagactgttgatgatccctggtgggtaaattgcagacatcaaatgctagggattggcataggctagtgtttagcttgtctatttgccatatctattttttttaaatttccatacacttgtaaaagtagttagttgcttttgattgagttatatagcagtttttcatttggtcttccactcacctttcactatatttgagtgttcccttacaggtatgttggcatgtgttggaaaatttacacaattaggtttaaattcagtaggatgtgattttaggatgctactgatcaaagtgatatctgtgtctgttggaatcttgatagctgattaatttgccctcaattctgctccctgaacttcacacataaatcttcccaagtgggttttagggtgtatagatcccagcaggattaaggaggtggaaaagcagctaacatttcttgaggctctaccacatagcaggcactgtcacagagtaatggcattaatccccataataatcctgtgaaggtgatattctcatcccatcttagacatgaggatattggaactcagagaggtggctattgcattgcgcagaacgctacagagcccatgctcttcccagagcagcacccacaaaagcaagcattgattttgtgctcagtgtgtgccaagcactgtgcagagggtacacagttcctgccaggttaacaccctcccttcaggcctcccaaaggcataggcttgcaaagagcagaaggtgtgaaatcacactcttcctctgggcatcctggatccctgaattatccccccccccatgaagtacttcaagggccaagctgcccctttccctcctctccgcccatgaaaatgcctccaaactgagatgctttcagctgagaacagatttgactcacagacattaccaaagaggagcttgtgaatccaggaaaagctccagggggctagctgatctgagcagagagctttcagtgacccattttcctgtctagactctgccttaagctagtggcaactgctggggccccaggtacttgggacatggaaactcgttggatggctgggcagatgtaagcctgtccatgcagtcagccgatcctctgctcaggttcagctggactctgccatctgtgggcccagcatcactctgtaagttccttgaaaggaagaacaaccttagagtatttctgatacaaaatgagggcctctgctcttgatttaattataaaatgtctacgtctttctccagtttctgagccctatgcacattggcttgtgggcttgttcttcctgccaaatgatcagagaggaacattccatttatttgtagtggatttcctctggagggcatgtacccacactaaataccaactgctcttcctcagctgtagtccccaacatcagacttggcacgtggtggacactaacacacaggcactcaatgaatgagtgaaggaaataaaagtcaccccgttggtgagaggtgctatccctgagtctcagtgcaggaccagtggatgaaaggcaaggtaaagaggcccaagataggctggcttcccccgttcaaggtatagtctgcctttaagggagttttagaaccaacatgcaagacattgaaagaaatcttgcaagagccattattgacttagatccaaaacagcctctctcatgtctaaaaaggcacagaattttgcagatctgaggaagagggatgcattacctttttgcttcttttcaattgcttagtgtttctaatcatacttaatccacactaatgtgcgcaattataataaatggtaagatatcacatgtgtc

SEQ ID NO: 4663 - DNA, 4334 bp, Homo sapiens
  source 1..4334: mol_type = genomic DNA
cagaagccctgctgaatcaagtgagaggagagctgcggagcaatcaccatgagtatctcagctcttggaggccgcaccaaagggaagcctctgccaccaggcgaggaggagcgcaataacgttctcaagcagatgaaagtgcgaaccacgctgaagggggacaagagctggattaccaagcaggatgaatcggagggtcgcaccatagagctgccctcaggccggagtcgcgccacatccttttcatcagctggggaggttccgaagcctaggcctccgagcacaagggctcccactggctacatcatccggggagtgttcaccaagcccatagacagctcttcccagccccagcagcagttccccaaggccaacgggactccaaaaagtgctgccagtctggtgagaacagctaacgctggtcctccccgcccctcctcctctggctacaagatgaccactgaggattacaagaagctggcaccctacaatatcaggcgcagctctacatcaggggacaccgaggaggaggaggaggaggaggtggtgccattctcctcagatgaacagaaacggaggtcagaggctgcaagcggtgttctgaggaggacagctccccgggagcactcctacgtcctgtcagcggccaagaagagcactggtcctacccaggagacacaggcaccgtttatcgcgaagagggtggaggtggtggaagaggacgggccttctgagaagagccaggacccacctgctctggcaagatccactcctggctcaaacagtgcggatggaggcaggaccaaagcgtctcgggcaatttggatcgagtgcctgccaagtatgcctagccccgctgggagccaggagctcaggtcttccccaggcaacaaagacaaggaggccccctgctccagagagctccagagggacttggctggtgaggaggctttcagggcccccaacacagatgctgcaaggtcaagtgcacagttgagtgatggcaatgtgggatccggagccacgggctcccggcctgaaggcttggctgcagtagacatcggctccgagagaggaaggctgtgtgcagctgctagctttgcctctttcctggaagaccaggatgggcacagtgccaactctcagtcctgcaagcctagaccagcagccatcagctccagtgccacttcagtctctgctgtccctgctgataggaagagcaacagcacagcagcccaggaggatgcaaaggcagacccaaagggggccttggctgattatgaggggaaggatgtggccaccagggtcggagaggcctggcaggagaggcctggagctccaagaggtggccaaggagacccagctgtacccgctcagcaacctgcagatcccagcaccccagagcggcagagcagccccagcggatctgagcaacttgtcagacgagagagttgtggcagcagcgtgttgactgattttgaggggaaggatgtggccaccaaggtcggagaggcctggcaggacaggcctggagccccaagaggtggccaaggagacccagctgtacccactcagcaacctgcagatcccagtaccccagaacagcagaacagccccagcggatctgagcaattcgtcagacgagagagctgcaccagcagggtgaggagcccctcgagctgcatggtcactgttactgtcactgccacatctgagcagcctcacatttatattccagcccccgcaagtgaattggactccagctctaccaccaaagggattctcttcgtgaaggagtacgtgaatgctagtgaagtgtcttctgggaagccagtatctgcacgctatagcaacgtcagcagcattgaggactcattcgccatggagaagaagcctccatgtggcagcactccatactctgagaggacaactggagggatctgtacttactgcaaccgtgagatccgagactgtccaaagattaccctagaacatcttggtatctgctgccatgaatattgctttaagtgtgggatttgcagtaaaccgatgggcgatctcctggatcagatcttcattcaccgtgacaccattcactgtgggaaatgctatgagaagctcttctagcgaccccccaccgccaggctgatcagaagctgatgactcgtggacaaatttggctgtccccagttttgccccaagttgctgtctccccttccctcacctcctccctccctgtttgatttcttcatgcttttgcccttctcaagttgaagttgcatacatccaatatcgtatcttaatgatgctatgataattgcttgtgtgtgtagcttcttgtagcttagaaagcgctttatgcccatgatgtcatttcaggctcaaccaaagaggatcaaacaggaattccatcttggcttccctaagacagattggctttctaatgagtttaagtgggcagaagtgtagggttcagtgtgtcctgactcccttgaggcttataatgggccaagttgaagactgttgatgatccctggtgggtaaattgcagacatcaaatgctagggattggcataggctagtgtttagcttgtctatttgccatatctattttttttaaatttccatacacttgtaaaagtagttagttgcttttgattgagttatatagcagtttttcatttggtcttccactcacctttcactatatttgagtgttcccttacaggtatgttggcatgtgttggaaaatttacacaattaggtttaaattcagtaggatgtgattttaggatgctactgatcaaagtgatatctgtgtctgttggaatcttgatagctgattaatttgccctcaattctgctccctgaacttcacacataaatcttcccaagtgggttttagggtgtatagatcccagcaggattaaggaggtggaaaagcagctaacatttcttgaggctctaccacatagcaggcactgtcacagagtaatggcattaatccccataataatcctgtgaaggtgatattctcatcccatcttagacatgaggatattggaactcagagaggtggctattgcattgcgcagaacgctacagagcccatgctcttcccagagcagcacccacaaaagcaagcattgattttgtgctcagtgtgtgccaagcactgtgcagagggtacacagttcctgccaggttaacaccctcccttcaggcctcccaaaggcataggcttgcaaagagcagaaggtgtgaaatcacactcttcctctgggcatcctggatccctgaattatccccccccccatgaagtacttcaagggccaagctgcccctttccctcctctccgcccatgaaaatgcctccaaactgagatgctttcagctgagaacagatttgactcacagacattaccaaagaggagcttgtgaatccaggaaaagctccagggggctagctgatctgagcagagagctttcagtgacccattttcctgtctagactctgccttaagctagtggcaactgctggggccccaggtacttgggacatggaaactcgttggatggctgggcagatgtaagcctgtccatgcagtcagccgatcctctgctcaggttcagctggactctgccatctgtgggcccagcatcactctgtaagttccttgaaaggaagaacaaccttagagtatttctgatacaaaatgagggcctctgctcttgatttaattataaaatgtctacgtctttctccagtttctgagccctatgcacattggcttgtgggcttgttcttcctgccaaatgatcagagaggaacattccatttatttgtagtggatttcctctggagggcatgtacccacactaaataccaactgctcttcctcagctgtagtccccaacatcagacttggcacgtggtggacactaacacacaggcactcaatgaatgagtgaaggaaataaaagtcaccccgttggtgagaggtgctatccctgagtctcagtgcaggaccagtggatgaaaggcaaggtaaagaggcccaagataggctggcttcccccgttcaaggtatagtctgcctttaagggagttttagaaccaacatgcaagacattgaaagaaatcttgcaagagccattattgacttagatccaaaacagcctctctcatgtctaaaaaggcacagaattttgcagatctgaggaagagggatgcattacctttttgcttcttttcaattgcttagtgtttctaatcatacttaatccacactaatgtgcgcaattataataaatggtaagatatcacatgtgtc

SEQ ID NO: 4664 - DNA, 5257 bp, Homo sapiens
  source 1..5257: mol_type = genomic DNA
ttgtatccatgtttttccgggcgtcccccggagggacaggttgcgggtgaccttttcaagtgtggaggaaagggaagctgcttttgtcttcaggaatgatgcaggtctcgactcaagcctgacgggcccaaacctccctggagctggctgacgactctgcccgagttcctgaagaggggtcccgggggtcccggagcggaagtgggagcgcgtgggcgtgggctcctcggctgcctggggctccagacttgtgctgcgtgcggctccggagctctgttctcgctcctgagcagctgctaggtttcccaagcgactgtctcaaccgcccggccgcctcccccgggcagccagagcttcacatctacctccagccgggacccgcccccgagccgcggggcccacgcccagagccctccgccgtccccagcgcagtgcagcagagcgcgatccagtctggggccgggccgcgcttccgcgcacgcgcggagaaacccgcgccctccgaggggggaggggacagagggggcgtcacgggggcaggagaagaaggaggaggaggcccgcgtcgcctccggcggggctcgcgctcgccccgcgctcgccctccgcctcgcccgagccccgggagggtgaaacgctttctcccagcatgcagcgggaggagggatttaacaccaagatggcggacggcccggatgagtacgataccgaagcgggctgtgtgccccttctccacccagaggaaatcaaaccccaaagccattataaccatggatatggtgaacctcttggacggaaaactcatattgatgattacagcacatgggacatagtcaaggctacacaatatggaatatatgaacgctgtcgagaattggtggaagcaggttatgatgtacggcaaccggacaaagaaaatgttaccctcctccattgggctgccatcaataacagaatagatttagtcaaatactatatttcgaaaggtgctattgtggatcaacttggaggggacctgaattcaactccattgcactgggccacaagacaaggccatctatccatggttgtgcaactaatgaaatatggtgcagatccttcattaattgatggagaaggatgtagctgtattcatctggctgctcagttcggacatacctcaattgttgcttatctcatagcaaaaggacaggatgtagatatgatggatcagaatggaatgacgcctttaatgtgggcagcatatagaacacatagtgtggatccaactagattgcttttaacattcaatgtttcagttaaccttggtgacaagtatcacaaaaacactgctctgcattgggcagtgctagcagggaataccacagtcattagccttcttctggaagctggagctaatgttgatgcccagaatatcaagggcgaatcagcgcttgatttggcaaaacagagaaaaaatgtgtggatgatcaaccacttacaagaggcaaggcaagcaaaaggatatgacaatccgtccttccttagaaagctgaaagctgataaggaatttcggcagaaagtaatgttaggaactcctttcctagttatttggctggttgggtttatagcagacctaaatattgattcttggctcattaaagggctaatgtatggtggtgtttgggctacagtacagtttctttcaaaatcctttttcgatcattcaatgcatagtgcattgccccttgggatatatttggcaaccaaattctggatgtatgtgacgtggttcttctggttttggaatgatctcaactttttatttatccatcttccattccttgccaatagtgttgcacttttctacaattttggaaaatcttggaaatcagatccagggattattaaagcaacagaagagcaaaagaaaaagacaatagttgaacttgcagagacaggaagtctggacctcagtatattctgcagtacctgtttgatacgaaaaccggtgaggtccaaacattgtggtgtgtgcaaccgctgtatagcaaaatttgatcatcattgcccatgggtgggtaactgtgtaggtgcaggcaaccatagatattttatgggctacctattcttcttgctttttatgatctgctggatgatttatggttgtatatcttactggggactccactgtgagaccacttacaccaaggatggattttggacatacattactcagattgccacgtgttcaccttggatgttttggatgttcctgaacagtgttttccacttcatgtgggtggctgtattactcatgtgtcagatgtaccagatatcatgtttaggtattactacaaatgaaagaatgaatgccaggagatacaagcactttaaagtcacaacaacgtctattgaaagcccattcaaccatggatgtgtaagaaatattatagacttctttgaatttcgatgctgtggcctctttcgtcctgttatcgtggactggaccaggcagtatacaatagaatatgaccaaatatcaggatctgggtaccagctggtgtagcgacatcttatcctatgaagcatattgctgagtggtgcctgaaaattgtgtctgtccgtgtctttctcacactcgaatccacatcctttgaacaagagcatgctatgtgtagggctaatggtgaattttacagtctttttttcaacacttttattaacaaaagtaaacatggacagaacacactgccatttctgggaagagtaaagatgataaaaaataattttaatggttcttaatgtggaaattcacaacatactcaacttttgggttttgttctcacagtatttttcacaaaaaaagggtaaacttattctattgacagacatggtgtactgatcagaaatgttcagttttaactaaaactaaatttatgttatttggctaaatgttatgatgcagtctagtacgagtattgcatctaattccaggagcattgttttaagttgattgactagttattatgtacatttcagaatgtacacataaatactgtgatgaaaatcatgtgattgggatctactgtgatgttgtcttcaaaggcaggagaaaataatgttcacaataaaatgtgctaacaatgttttgtttctatcagctgttgcaatgctgatatatttctagttcagtgaaataatttgtagtaaccttactctgaggttttacggtctgataatgaagcacttgcatgagtatagtaagtcatgtttttttgttcaaatttaaaagccctgctaattgcatgacacaccacatagaatgtatactagcagatactatccagtgaagcataaattagaatttaatttgatgttcaaaaacagttccatttttaagggttaaggtggtattttcaagaaaaggcagaacaaataatgcaaaattctcagtaatagtgatacatggatatacttccttttaaattctcagctgcaaaataattgtagacaaaataatggcatttaactaaagatggagcatgatctaagtacatagcacatgtgaataaaagaaaagctgacagtatattctggtttcaataaaatgacctatcagaaagtagaatttcatccccaagagtatttcagtttatccaatattgagtaagttctgaaacagttttagaaaaaattttctttttgttaaatgtgatgcactgatcaatttttgtcacagcattttcataccttcatggtggactactagtcactgcttccataaatattgtttacagggtgagatttggtttattcatcttaagtgctgtagcaaactgtggttcgagcaacctgtgggaaatctgtgagagggaatggggtgggagatgtgggggaatggtggtcagactgatgacagatcctagaccaatgtaaagaatgtgtatctgtatataaataatttatcaaatagttttctctttgtgtctgtgttagtgtttttaaagctgctcatttcattttgtccaaccaaaaagaaaagggagataactaatgagcttctagtgatgttcaaaattgctgttaataggcattataccctgcaagttcactgcatgtctgatgcttggtaaaactagtcttccctgtaaaatgcagattacaggtattaaagcaatctagtggtatacccgccccttgccttagtaagaggagcagtgaaatgtatatagttgatgttcagtatttccaagtaccatttttatatagtagcttatttgaccataagtcacacatcaaaaaaagattacccttagtgtatgtgttttaatattagaaaattggcatatgtactttatttttgaaaagggaagagatgggtgtggggtggcaatagcattgtgccattttgtcatagaatgtaaaaattggttaactttacaaatgtcagctagttttgactactaattgggggaaattttagataatttttaaattcaaagttatttataaaatgctagaatttgttttaattttttgtattttgagccacttcacatgaagactcagttgcatttttatcgaatacatttttatcaacagttaaagactatggtggttttttcagagtttggctaagaatgttgttaccatcttctttgtttgtggtacaatattttcagtgcaaaagagatgtcattcagttaaaaagacaaacctctagatgtgtaattacatggaaaatactagcaatgtgaatgcttttgtagtaaccatcttgtagtacctgtgaaatctataactcagaaatggtcagatggtcaggagccagctatgcagcagtataccatctgtttaattattttgtaggtcctgtgtgtggaaccaactataaacccagttctaaagttgtgtatgatggtgaacctttgggaatagttcttatcaacttaattggatacttttagcaaataggaacttaattctcagcactgaacatgaattacttccttggagttttttttcattcatatttttgttgtttccaggaatttatttgatattaatgggcgtaaaacagcatcattgtacttaagctatggatgtttttattttatattttctttatttataactgtgccaagtattattttgctacttaccgtgttattctgtggaaagaaaaacctgtaaagtgtttaataaattagccctccttacataaattaaatgtcaaaattttgtaaaatattaatcagaataaatactgactctt

SEQ ID NO: 4665 - DNA, 1346 bp, Homo sapiens
  source 1..1346: mol_type = genomic DNA
ttgtatccatgtttttccgggcgtcccccggagggacaggttgcgggtgaccttttcaagtgtggaggaaagggaagctgcttttgtcttcaggaatgatgcaggtctcgactcaagcctgacgggcccaaacctccctggagctggctgacgactctgcccgagttcctgaagaggggtcccgggggtcccggagcggaagtgggagcgcgtgggcgtgggctcctcggctgcctggggctccagacttgtgctgcgtgcggctccggagctctgttctcgctcctgagcagctgctaggtttcccaagcgactgtctcaaccgcccggccgcctcccccgggcagccagagcttcacatctacctccagccgggacccgcccccgagccgcggggcccacgcccagagccctccgccgtccccagcgcagtgcagcagagcgcgatccagtctggggccgggccgcgcttccgcgcacgcgcggagaaacccgcgccctccgaggggggaggggacagagggggcgtcacgggggcaggagaagaaggaggaggaggcccgcgtcgcctccggcggggctcgcgctcgccccgcgctcgccctccgcctcgcccgagccccgggagggtgaaacgctttctcccagcatgcagcgggaggagggatttaacaccaagatggcggacggcccggatgagtacgataccgaagcgggctgtgtgccccttctccacccagagatatggaatatatgaacgctgtcgagaattggtggaagcaggttatgatgtacggcaaccggacaaagaaaatgttaccctcctccattgggctgccatcaataacagaatagatttagtcaaatactatatttcgaaaggtgctattgtggatcaacttggaggggacctgaattcaactccattgcactgggccacaagacaaggccatctatccatggttgtgcaactaatgaaatatggtgcagatccttcattaattgatggagaaggatgtagctgtattcatctggctgctcagttcggacatacctcaattgttgcttatctcatagcaaaaggacaggatgtagatatgatggatcagaatggaatgacgcctttaatgtgggcagcatatagaacacatagtgtggatccaactagattgcttttaacattcaatgtttcagttaaccttggtgacaagtatcacaaaaacactgctctgcattgggcagtgctagcagggaataccacagtcattagccttcttctggaagctggagctaatgttgatgcccagaatatcaaggcaatccttaggtgtcacatggccctctag

SEQ ID NO: 4666 - DNA, 5259 bp, Homo sapiens
  source 1..5259: mol_type = genomic DNA
ttgtatccatgtttttccgggcgtcccccggagggacaggttgcgggtgaccttttcaagtgtggaggaaagggaagctgcttttgtcttcaggaatgatgcaggtctcgactcaagcctgacgggcccaaacctccctggagctggctgacgactctgcccgagttcctgaagaggggtcccgggggtcccggagcggaagtgggagcgcgtgggcgtgggctcctcggctgcctggggctccagacttgtgctgcgtgcggctccggagctctgttctcgctcctgagcagctgctaggtttcccaagcgactgtctcaaccgcccggccgcctcccccgggcagccagagcttcacatctacctccagccgggacccgcccccgagccgcggggcccacgcccagagccctccgccgtccccagcgcagtgcagcagagcgcgatccagtctggggccgggccgcgcttccgcgcacgcgcggagaaacccgcgccctccgaggggggaggggacagagggggcgtcacgggggcaggagaagaaggaggaggaggcccgcgtcgcctccggcggggctcgcgctcgccccgcgctcgccctccgcctcgcccgagccccgggagggtgaaacgctttctcccagcatgcagcgggaggagggatttaacaccaagatggcggacggcccggatgagtacgataccgaagcgggctgtgtgccccttctccacccagaggaaatcaaaccccaaagccattataaccatggatatggtgaacctcttggacggaaaactcatattgatgattacagcacatgggacatagtcaaggctacacaatatggaatatatgaacgctgtcgagaattggtggaagcaggttatgatgtacggcaaccggacaaagaaaatgttaccctcctccattgggctgccatcaataacagaatagatttagtcaaatactatatttcgaaaggtgctattgtggatcaacttggaggggacctgaattcaactccattgcactgggccacaagacaaggccatctatccatggttgtgcaactaatgaaatatggtgcagatccttcattaattgatggagaaggatgtagctgtattcatctggctgctcagttcggacatacctcaattgttgcttatctcatagcaaaaggacaggatgtagatatgatggatcagaatggaatgacgcctttaatgtgggcagcatatagaacacatagtgtggatccaactagattgcttttaacattcaatgtttcagttaaccttggtgacaagtatcacaaaaacactgctctgcattgggcagtgctagcagggaataccacagtcattagccttcttctggaagctggagctaatgttgatgcccagaatatcaagggcgaatcagcgcttgatttggcaaaacagagaaaaaatgtgtggatgatcaaccacttacaagaggcaaggcaagcaaaaggatatgacaatccgtccttccttagaaagctgaaagctgataaggaatttcggcagaaagtaatgttaggaactcctttcctagttatttggctggttgggtttatagcagacctaaatattgattcttggctcattaaagggctaatgtatggtggtgtttgggctacagtacagtttctttcaaaatcctttttcgatcattcaatgcatagtgcattgccccttgggatatatttggcaaccaaattctggatgtatgtgacgtggttcttctggttttggaatgatctcaactttttatttatccatcttccattccttgccaatagtgttgcacttttctacaattttggaaaatcttggaaatcagatccagggattattaaagcaacagaagagcaaaagaaaaagacaatagttgaacttgcagagacaggaagtctggacctcagtatattctgcagtacctgtttgatacgaaaaccggtgaggtccaaacattgtggtgtgtgcaaccgctgtatagcaaaatttgatcatcattgcccatgggtgggtaactgtgtaggtgcaggcaaccatagatattttatgggctacctattcttcttgctttttatgatctgctggatgatttatggttgtatatcttactggggactccactgtgagaccacttacaccaaggatggattttggacatacattactcagattgccacgtgttcaccttggatgttttggatgttcctgaacagtgttttccacttcatgtgggtggctgtattactcatgtgtcagatgtaccagatatcatgtttaggtattactacaaatgaaagaatgaatgccaggagatacaagcactttaaagtcacaacaacgtctattgaaagcccattcaaccatggatgtgtaagaaatattatagacttctttgaatttcgatgctgtggcctctttcgtcctgttatcgtggactggaccaggcagtatacaatagaatatgaccaaatatcaggatctgggtaccagctggtgtagcgacatcttatcctatgaagcatattgctgagtggtgcctgaaaattgtgtctgtccgtgtctttctcacactcgaatccacatcctttgaacaagagcatgctatgtgtagggctaatggtgaattttacagtctttttttcaacacttttattaacaaaagtaaacatggacagaacacactgccatttctgggaagagtaaagatgataaaaaataattttaatggttcttaatgtggaaattcacaacatactcaacttttgggttttgttctcacagtatttttcacaaaaaaagggtaaacttattctattgacagacatggtgtactgatcagaaatgttcagttttaactaaaactaaatttatgttatttggctaaatgttatgatgcagtctagtacgagtattgcatctaattccaggagcattgttttaagttgattgactagttattatgtacatttcagaatgtacacataaatactgtgatgaaaatcatgtgattgggatctactgtgatgttgtcttcaaaggcaggagaaaataatgttcacaataaaatgtgctaacaatgttttgtttctatcagctgttgcaatgctgatatatttctagttcagtgaaataatttgtagtaaccttactctgaggttttacggtctgataatgaagcacttgcatgagtatagtaagtcatgtttttttgttcaaatttaaaagccctgctaattgcatgacacaccacatagaatgtatactagcagatactatccagtgaagcataaattagaatttaatttgatgttcaaaaacagttccatttttaagggttaaggtggtattttcaagaaaaggcagaacaaataatgcaaaattctcagtaatagtgatacatggatatacttccttttaaattctcagctgcaaaataattgtagacaaaataatggcatttaactaaagatggagcatgatctaagtacatagcacatgtgaataaaagaaaagctgacagtatattctggtttcaataaaatgacctatcagaaagtagaatttcatccccaagagtatttcagtttatccaatattgagtaagttctgaaacagttttagaaaaaattttctttttgttaaatgtgatgcactgatcaatttttgtcacagcattttcataccttcatggtggactactagtcactgcttccataaatattgtttacagggtgagatttggtttattcatcttaagtgctgtagcaaactgtggttcgagcaacctgtgggaaatctgtgagagggaatggggtgggagatgtgggggaatggtggtcagactgatgacagatcctagaccaatgtaaagaatgtgtatctgtatataaataatttatcaaatagttttctctttgtgtctgtgttagtgtttttaaagctgctcatttcattttgtccaaccaaaaagaaaagggagataactaatgagcttctagtgatgttcaaaattgctgttaataggcattataccctgcaagttcactgcatgtctgatgcttggtaaaactagtcttccctgtaaaatgcagattacaggtattaaagcaatctagtggtatacccgccccttgccttagtaagaggagcagtgaaatgtatatagttgatgttcagtatttccaagtaccatttttatatagtagcttatttgaccataagtcacacatcaaaaaaagattacccttagtgtatgtgttttaatattagaaaattggcatatgtactttatttttgaaaagggaagagatgggtgtggggtggcaatagcattgtgccattttgtcatagaatgtaaaaattggttaactttacaaatgtcagctagttttgactactaattgggggaaattttagataatttttaaattcaaagttatttataaaatgctagaatttgttttaattttttgtattttgagccacttcacatgaagactcagttgcatttttatcgaatacatttttatcaacagttaaagactatggtggttttttcagagtttggctaagaatgttgttaccatcttctttgtttgtggtacaatattttcagtgcaaaagagatgtcattcagttaaaaagacaaacctctagatgtgtaattacatggaaaatactagcaatgtgaatgcttttgtagtaaccatcttgtagtacctgtgaaatctataactcagaaatggtcagatggtcaggagccagctatgcagcagtataccatctgtttaattattttgtaggtcctgtgtgtggaaccaactataaacccagttctaaagttgtgtatgatggtgaacctttgggaatagttcttatcaacttaattggatacttttagcaaataggaacttaattctcagcactgaacatgaattacttccttggagttttttttcattcatatttttgttgtttccaggaatttatttgatattaatgggcgtaaaacagcatcattgtacttaagctatggatgtttttattttatattttctttatttataactgtgccaagtattattttgctacttaccgtgttattctgtggaaagaaaaacctgtaaagtgtttaataaattagccctccttacataaattaaatgtcaaaattttgtaaaatattaatcagaataaatactgactcttaa

SEQ ID NO: 4667 - DNA, 1491 bp, synthetic construct
  misc_feature 1..1491: note = Description of Artificial Sequence: Synthetic coding sequence
  source 1..1491: mol_type = other DNA
atgaccgtgttcctgagcttcgccttcctggccgccatcctgacccacatcggctgcagcaaccagcgccgcagccccgagaacagcggccgccgctacaaccgcatccagcacggccagtgcgcctacaccttcatcctgcccgagcacgacggcaactgccgcgagagcaccaccgaccagtacaacaccaacgccctgcagcgcgacgccccccacgtggagcccgacttcagcagccagaagctgcagcacctggagcacgtgatggagaactacacccagtggctgcagaagctggagaactacatcgtggagaacatgaagagcgagatggcccagatccagcagaacgccgtgcagaaccacaccgccaccatgctggagatcggcaccagcctgctgagccagaccgccgagcagacccgcaagctgaccgacgtggagacccaggtgctgaaccagaccagccgcctggagatccagctgctggagaacagcctgagcacctacaagctggagaagcagctgctgcagcagaccaacgagatcctgaagatccacgagaagaacagcctgctggagcacaagatcctggagatggagggcaagcacaaggaggagctggacaccctgaaggaggagaaggagaacctgcagggcctggtgacccgccagacctacatcatccaggagctggagaagcagctgaaccgcgccaccaccaacaacagcgtgctgcagaagcagcagctggagctgatggacaccgtgcacaacctggtgaacctgtgcaccaaggaggtgctgctgaagggcggcaagcgcgaggaggagaagcccttccgcgactgcgccgacgtgtaccaggccggcttcaacaagagcggcatctacaccatctacatcaacaacatgcccgagcccaagaaggtgttctgcaacatggacgtgaacggcggcggctggaccgtgatccagcaccgcgaggacggcagcctggacttccagcgcggctggaaggagtacaagatgggcttcggcaaccccagcggcgagtactggctgggcaacgagttcatcttcgccatcaccagccagcgccagtacatgctgcgcatcgagctgatggactgggagggcaaccgcgcctacagccagtacgaccgcttccacatcggcaacgagaagcagaactaccgcctgtacctgaagggccacaccggcaccgccggcaagcagagcagcctgatcctgcacggcgccgacttcagcaccaaggacgccgacaacgacaactgcatgtgcaagtgcgccctgatgctgaccggcggctggtggttcgacgcctgcggccccagcaacctgaacggcatgttctacaccgccggccagaaccacggcaagctgaacggcatcaagtggcactacttcaagggccccagctacagcctgcgcagcaccaccatgatgatccgccccctggacttc

SEQ ID NO: 4668 - DNA, 1494 bp, synthetic construct
  misc_feature 1..1494: note = Description of Artificial Sequence: Synthetic coding sequence
  source 1..1494: mol_type = other DNA
atgaccgtgttcctgagcttcgccttcctggccgccatcctgacccacatcggctgcagcaaccagcgccgcagccccgagaacagcggccgccgctacaaccgcatccagcacggccagtgcgcctacaccttcatcctgcccgagcacgacggcaactgccgcgagagcaccaccgaccagtacaacaccaacgccctgcagcgcgacgccccccacgtggagcccgacttcagcagccagaagctgcagcacctggagcacgtgatggagaactacacccagtggctgcagaagctggagaactacatcgtggagaacatgaagagcgagatggcccagatccagcagaacgccgtgcagaaccacaccgccaccatgctggagatcggcaccagcctgctgagccagaccgccgagcagacccgcaagctgaccgacgtggagacccaggtgctgaaccagaccagccgcctggagatccagctgctggagaacagcctgagcacctacaagctggagaagcagctgctgcagcagaccaacgagatcctgaagatccacgagaagaacagcctgctggagcacaagatcctggagatggagggcaagcacaaggaggagctggacaccctgaaggaggagaaggagaacctgcagggcctggtgacccgccagacctacatcatccaggagctggagaagcagctgaaccgcgccaccaccaacaacagcgtgctgcagaagcagcagctggagctgatggacaccgtgcacaacctggtgaacctgtgcaccaaggagggcgtgctgctgaagggcggcaagcgcgaggaggagaagcccttccgcgactgcgccgacgtgtaccaggccggcttcaacaagagcggcatctacaccatctacatcaacaacatgcccgagcccaagaaggtgttctgcaacatggacgtgaacggcggcggctggaccgtgatccagcaccgcgaggacggcagcctggacttccagcgcggctggaaggagtacaagatgggcttcggcaaccccagcggcgagtactggctgggcaacgagttcatcttcgccatcaccagccagcgccagtacatgctgcgcatcgagctgatggactgggagggcaaccgcgcctacagccagtacgaccgcttccacatcggcaacgagaagcagaactaccgcctgtacctgaagggccacaccggcaccgccggcaagcagagcagcctgatcctgcacggcgccgacttcagcaccaaggacgccgacaacgacaactgcatgtgcaagtgcgccctgatgctgaccggcggctggtggttcgacgcctgcggccccagcaacctgaacggcatgttctacaccgccggccagaaccacggcaagctgaacggcatcaagtggcactacttcaagggccccagctacagcctgcgcagcaccaccatgatgatccgccccctggacttc

SEQ ID NO: 4669 - DNA, 891 bp, synthetic construct
  misc_feature 1..891: note = Description of Artificial Sequence: Synthetic coding sequence
  source 1..891: mol_type = other DNA
atggagggcaagcacaaggaggagctggacaccctgaaggaggagaaggagaacctgcagggcctggtgacccgccagacctacatcatccaggagctggagaagcagctgaaccgcgccaccaccaacaacagcgtgctgcagaagcagcagctggagctgatggacaccgtgcacaacctggtgaacctgtgcaccaaggaggtgctgctgaagggcggcaagcgcgaggaggagaagcccttccgcgactgcgccgacgtgtaccaggccggcttcaacaagagcggcatctacaccatctacatcaacaacatgcccgagcccaagaaggtgttctgcaacatggacgtgaacggcggcggctggaccgtgatccagcaccgcgaggacggcagcctggacttccagcgcggctggaaggagtacaagatgggcttcggcaaccccagcggcgagtactggctgggcaacgagttcatcttcgccatcaccagccagcgccagtacatgctgcgcatcgagctgatggactgggagggcaaccgcgcctacagccagtacgaccgcttccacatcggcaacgagaagcagaactaccgcctgtacctgaagggccacaccggcaccgccggcaagcagagcagcctgatcctgcacggcgccgacttcagcaccaaggacgccgacaacgacaactgcatgtgcaagtgcgccctgatgctgaccggcggctggtggttcgacgcctgcggccccagcaacctgaacggcatgttctacaccgccggccagaaccacggcaagctgaacggcatcaagtggcactacttcaagggccccagctacagcctgcgcagcaccaccatgatgatccgccccctggacttc

SEQ ID NO: 4670 - DNA, 894 bp, synthetic construct
  misc_feature 1..894: note = Description of Artificial Sequence: Synthetic coding sequence
  source 1..894: mol_type = other DNA
atggagggcaagcacaaggaggagctggacaccctgaaggaggagaaggagaacctgcagggcctggtgacccgccagacctacatcatccaggagctggagaagcagctgaaccgcgccaccaccaacaacagcgtgctgcagaagcagcagctggagctgatggacaccgtgcacaacctggtgaacctgtgcaccaaggagggcgtgctgctgaagggcggcaagcgcgaggaggagaagcccttccgcgactgcgccgacgtgtaccaggccggcttcaacaagagcggcatctacaccatctacatcaacaacatgcccgagcccaagaaggtgttctgcaacatggacgtgaacggcggcggctggaccgtgatccagcaccgcgaggacggcagcctggacttccagcgcggctggaaggagtacaagatgggcttcggcaaccccagcggcgagtactggctgggcaacgagttcatcttcgccatcaccagccagcgccagtacatgctgcgcatcgagctgatggactgggagggcaaccgcgcctacagccagtacgaccgcttccacatcggcaacgagaagcagaactaccgcctgtacctgaagggccacaccggcaccgccggcaagcagagcagcctgatcctgcacggcgccgacttcagcaccaaggacgccgacaacgacaactgcatgtgcaagtgcgccctgatgctgaccggcggctggtggttcgacgcctgcggccccagcaacctgaacggcatgttctacaccgccggccagaaccacggcaagctgaacggcatcaagtggcactacttcaagggccccagctacagcctgcgcagcaccaccatgatgatccgccccctggacttc

SEQ ID NO: 4671 - DNA, 1854 bp, synthetic construct
  misc_feature 1..1854: note = Description of Artificial Sequence: Synthetic coding sequence
  source 1..1854: mol_type = other DNA
atgcacaagaccgccagccagcgcctgttccccggccccagctaccagaacatcaagagcatcatggaggacagcaccatcctgagcgactggaccaacagcaacaagcagaagatgaagtacgacttcagctgcgagctgtaccgcatgagcacctacagcaccttccccgccggcgtgcccgtgagcgagcgcagcctggcccgcgccggcttctactacaccggcgtgaacgacaaggtgaagtgcttctgctgcggcctgatgctggacaactggaagctgggcgacagccccatccagaagcacaagcagctgtaccccagctgcagcttcatccagaacctggtgagcgccagcctgggcagcaccagcaagaacaccagccccatgcgcaacagcttcgcccacagcctgagccccaccctggagcacagcagcctgttcagcggcagctacagcagcctgagccccaaccccctgaacagccgcgccgtggaggacatcagcagcagccgcaccaacccctacagctacgccatgagcaccgaggaggcccgcttcctgacctaccacatgtggcccctgaccttcctgagccccagcgagctggcccgcgccggcttctactacatcggccccggcgaccgcgtggcctgcttcgcctgcggcggcaagctgagcaactgggagcccaaggacgacgccatgagcgagcaccgccgccacttccccaactgccccttcctggagaacagcctggagaccctgcgcttcagcatcagcaacctgagcatgcagacccacgccgcccgcatgcgcaccttcatgtactggcccagcagcgtgcccgtgcagcccgagcagctggccagcgccggcttctactacgtgggccgcaacgacgacgtgaagtgcttctgctgcgacggcggcctgcgctgctgggagagcggcgacgacccctgggtggagcacgccaagtggttcccccgctgcgagttcctgatccgcatgaagggccaggagttcgtggacgagatccagggccgctacccccacctgctggagcagctgctgagcaccagcgacaccaccggcgaggagaacgccgacccccccatcatccacttcggccccggcgagagcagcagcgaggacgccgtgatgatgaacacccccgtggtgaagagcgccctggagatgggcttcaaccgcgacctggtgaagcagaccgtgcagagcaagatcctgaccaccggcgagaactacaagaccgtgaacgacatcgtgagcgccctgctgaacgccgaggacgagaagcgcgaggaggagaaggagaagcaggccgaggagatggccagcgacgacctgagcctgatccgcaagaaccgcatggccctgttccagcagctgacctgcgtgctgcccatcctggacaacctgctgaaggccaacgtgatcaacaagcaggagcacgacatcatcaagcagaagacccagatccccctgcaggcccgcgagctgatcgacaccatcctggtgaagggcaacgccgccgccaacatcttcaagaactgcctgaaggagatcgacagcaccctgtacaagaacctgttcgtggacaagaacatgaagtacatccccaccgaggacgtgagcggcctgagcctggaggagcagctgcgccgcctgcaggaggagcgcacctgcaaggtgtgcatggacaaggaggtgagcgtggtgttcatcccctgcggccacctggtggtgtgccaggagtgcgcccccagcctgcgcaagtgccccatctgccgcggcatcatcaagggcaccgtgcgcaccttcctgagc

SEQ ID NO: 4672 - DNA, 1707 bp, synthetic construct
  misc_feature 1..1707: note = Description of Artificial Sequence: Synthetic coding sequence
  source 1..1707: mol_type = other DNA
atgagcacctacagcaccttccccgccggcgtgcccgtgagcgagcgcagcctggcccgcgccggcttctactacaccggcgtgaacgacaaggtgaagtgcttctgctgcggcctgatgctggacaactggaagctgggcgacagccccatccagaagcacaagcagctgtaccccagctgcagcttcatccagaacctggtgagcgccagcctgggcagcaccagcaagaacaccagccccatgcgcaacagcttcgcccacagcctgagccccaccctggagcacagcagcctgttcagcggcagctacagcagcctgagccccaaccccctgaacagccgcgccgtggaggacatcagcagcagccgcaccaacccctacagctacgccatgagcaccgaggaggcccgcttcctgacctaccacatgtggcccctgaccttcctgagccccagcgagctggcccgcgccggcttctactacatcggccccggcgaccgcgtggcctgcttcgcctgcggcggcaagctgagcaactgggagcccaaggacgacgccatgagcgagcaccgccgccacttccccaactgccccttcctggagaacagcctggagaccctgcgcttcagcatcagcaacctgagcatgcagacccacgccgcccgcatgcgcaccttcatgtactggcccagcagcgtgcccgtgcagcccgagcagctggccagcgccggcttctactacgtgggccgcaacgacgacgtgaagtgcttctgctgcgacggcggcctgcgctgctgggagagcggcgacgacccctgggtggagcacgccaagtggttcccccgctgcgagttcctgatccgcatgaagggccaggagttcgtggacgagatccagggccgctacccccacctgctggagcagctgctgagcaccagcgacaccaccggcgaggagaacgccgacccccccatcatccacttcggccccggcgagagcagcagcgaggacgccgtgatgatgaacacccccgtggtgaagagcgccctggagatgggcttcaaccgcgacctggtgaagcagaccgtgcagagcaagatcctgaccaccggcgagaactacaagaccgtgaacgacatcgtgagcgccctgctgaacgccgaggacgagaagcgcgaggaggagaaggagaagcaggccgaggagatggccagcgacgacctgagcctgatccgcaagaaccgcatggccctgttccagcagctgacctgcgtgctgcccatcctggacaacctgctgaaggccaacgtgatcaacaagcaggagcacgacatcatcaagcagaagacccagatccccctgcaggcccgcgagctgatcgacaccatcctggtgaagggcaacgccgccgccaacatcttcaagaactgcctgaaggagatcgacagcaccctgtacaagaacctgttcgtggacaagaacatgaagtacatccccaccgaggacgtgagcggcctgagcctggaggagcagctgcgccgcctgcaggaggagcgcacctgcaaggtgtgcatggacaaggaggtgagcgtggtgttcatcccctgcggccacctggtggtgtgccaggagtgcgcccccagcctgcgcaagtgccccatctgccgcggcatcatcaagggcaccgtgcgcaccttcctgagc

SEQ ID NO: 4673 - DNA, 1791 bp, synthetic construct
  misc_feature 1..1791: note = Description of Artificial Sequence: Synthetic coding sequence
  source 1..1791: mol_type = other DNA
atggaggacagcaccatcctgagcgactggaccaacagcaacaagcagaagatgaagtacgacttcagctgcgagctgtaccgcatgagcacctacagcaccttccccgccggcgtgcccgtgagcgagcgcagcctggcccgcgccggcttctactacaccggcgtgaacgacaaggtgaagtgcttctgctgcggcctgatgctggacaactggaagctgggcgacagccccatccagaagcacaagcagctgtaccccagctgcagcttcatccagaacctggtgagcgccagcctgggcagcaccagcaagaacaccagccccatgcgcaacagcttcgcccacagcctgagccccaccctggagcacagcagcctgttcagcggcagctacagcagcctgagccccaaccccctgaacagccgcgccgtggaggacatcagcagcagccgcaccaacccctacagctacgccatgagcaccgaggaggcccgcttcctgacctaccacatgtggcccctgaccttcctgagccccagcgagctggcccgcgccggcttctactacatcggccccggcgaccgcgtggcctgcttcgcctgcggcggcaagctgagcaactgggagcccaaggacgacgccatgagcgagcaccgccgccacttccccaactgccccttcctggagaacagcctggagaccctgcgcttcagcatcagcaacctgagcatgcagacccacgccgcccgcatgcgcaccttcatgtactggcccagcagcgtgcccgtgcagcccgagcagctggccagcgccggcttctactacgtgggccgcaacgacgacgtgaagtgcttctgctgcgacggcggcctgcgctgctgggagagcggcgacgacccctgggtggagcacgccaagtggttcccccgctgcgagttcctgatccgcatgaagggccaggagttcgtggacgagatccagggccgctacccccacctgctggagcagctgctgagcaccagcgacaccaccggcgaggagaacgccgacccccccatcatccacttcggccccggcgagagcagcagcgaggacgccgtgatgatgaacacccccgtggtgaagagcgccctggagatgggcttcaaccgcgacctggtgaagcagaccgtgcagagcaagatcctgaccaccggcgagaactacaagaccgtgaacgacatcgtgagcgccctgctgaacgccgaggacgagaagcgcgaggaggagaaggagaagcaggccgaggagatggccagcgacgacctgagcctgatccgcaagaaccgcatggccctgttccagcagctgacctgcgtgctgcccatcctggacaacctgctgaaggccaacgtgatcaacaagcaggagcacgacatcatcaagcagaagacccagatccccctgcaggcccgcgagctgatcgacaccatcctggtgaagggcaacgccgccgccaacatcttcaagaactgcctgaaggagatcgacagcaccctgtacaagaacctgttcgtggacaagaacatgaagtacatccccaccgaggacgtgagcggcctgagcctggaggagcagctgcgccgcctgcaggaggagcgcacctgcaaggtgtgcatggacaaggaggtgagcgtggtgttcatcccctgcggccacctggtggtgtgccaggagtgcgcccccagcctgcgcaagtgccccatctgccgcggcatcatcaagggcaccgtgcgcaccttcctgagc

SEQ ID NO: 4674 - DNA, 1812 bp, synthetic construct
  misc_feature 1..1812: note = Description of Artificial Sequence: Synthetic coding sequence
  source 1..1812: mol_type = other DNA
atgaacatcgtggagaacagcatcttcctgagcaacctgatgaagagcgccaacaccttcgagctgaagtacgacctgagctgcgagctgtaccgcatgagcacctacagcaccttccccgccggcgtgcccgtgagcgagcgcagcctggcccgcgccggcttctactacaccggcgtgaacgacaaggtgaagtgcttctgctgcggcctgatgctggacaactggaagcgcggcgacagccccaccgagaagcacaagaagctgtaccccagctgccgcttcgtgcagagcctgaacagcgtgaacaacctggaggccaccagccagcccaccttccccagcagcgtgaccaacagcacccacagcctgctgcccggcaccgagaacagcggctacttccgcggcagctacagcaacagccccagcaaccccgtgaacagccgcgccaaccaggacttcagcgccctgatgcgcagcagctaccactgcgccatgaacaacgagaacgcccgcctgctgaccttccagacctggcccctgaccttcctgagccccaccgacctggccaaggccggcttctactacatcggccccggcgaccgcgtggcctgcttcgcctgcggcggcaagctgagcaactgggagcccaaggacaacgccatgagcgagcacctgcgccacttccccaagtgccccttcatcgagaaccagctgcaggacaccagccgctacaccgtgagcaacctgagcatgcagacccacgccgcccgcttcaagaccttcttcaactggcccagcagcgtgctggtgaaccccgagcagctggccagcgccggcttctactacgtgggcaacagcgacgacgtgaagtgcttctgctgcgacggcggcctgcgctgctgggagagcggcgacgacccctgggtgcagcacgccaagtggttcccccgctgcgagtacctgatccgcatcaagggccaggagttcatccgccaggtgcaggccagctacccccacctgctggagcagctgctgagcaccagcgacagccccggcgacgagaacgccgagagcagcatcatccacttcgagcccggcgaggaccacagcgaggacgccatcatgatgaacacccccgtgatcaacgccgccgtggagatgggcttcagccgcagcctggtgaagcagaccgtgcagcgcaagatcctggccaccggcgagaactaccgcctggtgaacgacctggtgctggacctgctgaacgccgaggacgagatccgcgaggaggagcgcgagcgcgccaccgaggagaaggagagcaacgacctgctgctgatccgcaagaaccgcatggccctgttccagcacctgacctgcgtgatccccatcctggacagcctgctgaccgccggcatcatcaacgagcaggagcacgacgtgatcaagcagaagacccagaccagcctgcaggcccgcgagctgatcgacaccatcctggtgaagggcaacatcgccgccaccgtgttccgcaacagcctgcaggaggccgaggccgtgctgtacgagcacctgttcgtgcagcaggacatcaagtacatccccaccgaggacgtgagcgacctgcccgtggaggagcagctgcgccgcctgcaggaggagcgcacctgcaaggtgtgcatggacaaggaggtgagcatcgtgttcatcccctgcggccacctggtggtgtgcaaggactgcgcccccagcctgcgcaagtgccccatctgccgcagcaccatcaagggcaccgtgcgcaccttcctgagc

SEQ ID NO: 4675 - DNA, 558 bp, synthetic construct
  misc_feature 1..558: note = Description of Artificial Sequence: Synthetic coding sequence
  source 1..558: mol_type = other DNA
atgaagagcgacttctacttccagaagagcgagccccacagcctgagcagcgaggccctgatgcgccgcgccgtgagcctggtgaccgacagcaccagcaccttcctgagccagaccacctacgccctgatcgaggccatcaccgagtacaccaaggccgtgtacaccctgaccagcctgtaccgccagtacaccagcctgctgggcaagatgaacagcgaggaggaggacgaggtgtggcaggtgatcatcggcgcccgcgccgagatgaccagcaagcaccaggagtacctgaagctggagaccacctggatgaccgccgtgggcctgagcgagatggccgccgaggccgcctaccagaccggcgccgaccaggccagcatcaccgcccgcaaccacatccagctggtgaagctgcaggtggaggaggtgcaccagctgagccgcaaggccgagaccaagctggccgaggcccagatcgaggagctgcgccagaagacccaggaggagggcgaggagcgcgccgagagcgagcaggaggcctacctgcgcgaggac

SEQ ID NO: 4676 - DNA, 585 bp, synthetic construct
  misc_feature 1..585: note = Description of Artificial Sequence: Synthetic coding sequence
  source 1..585: mol_type = other DNA
atggccgccctgaagagctggctgagccgcagcgtgaccagcttcttccgctaccgccagtgcctgtgcgtgcccgtggtggccaacttcaagaagcgctgcttcagcgagctgatccgcccctggcacaagaccgtgaccatcggcttcggcgtgaccctgtgcgccgtgcccatcgcccaggccgtgtacaccctgaccagcctgtaccgccagtacaccagcctgctgggcaagatgaacagcgaggaggaggacgaggtgtggcaggtgatcatcggcgcccgcgccgagatgaccagcaagcaccaggagtacctgaagctggagaccacctggatgaccgccgtgggcctgagcgagatggccgccgaggccgcctaccagaccggcgccgaccaggccagcatcaccgcccgcaaccacatccagctggtgaagctgcaggtggaggaggtgcaccagctgagccgcaaggccgagaccaagctggccgaggcccagatcgaggagctgcgccagaagacccaggaggagggcgaggagcgcgccgagagcgagcaggaggcctacctgcgcgaggac

SEQ ID NO: 4677 - DNA, 717 bp, synthetic construct
  misc_feature 1..717: note = Description of Artificial Sequence: Synthetic coding sequence
  source 1..717: mol_type = other DNA
atggccgccctgaagagctggctgagccgcagcgtgaccagcttcttccgctaccgccagtgcctgtgcgtgcccgtggtggccaacttcaagaagcgctgcttcagcgagctgatccgcccctggcacaagaccgtgaccatcggcttcggcgtgaccctgtgcgccgtgcccatcgcccagaagagcgagccccacagcctgagcagcgaggccctgatgcgccgcgccgtgagcctggtgaccgacagcaccagcaccttcctgagccagaccacctacgccctgatcgaggccatcaccgagtacaccaaggccgtgtacaccctgaccagcctgtaccgccagtacaccagcctgctgggcaagatgaacagcgaggaggaggacgaggtgtggcaggtgatcatcggcgcccgcgccgagatgaccagcaagcaccaggagtacctgaagctggagaccacctggatgaccgccgtgggcctgagcgagatggccgccgaggccgcctaccagaccggcgccgaccaggccagcatcaccgcccgcaaccacatccagctggtgaagctgcaggtggaggaggtgcaccagctgagccgcaaggccgagaccaagctggccgaggcccagatcgaggagctgcgccagaagacccaggaggagggcgaggagcgcgccgagagcgagcaggaggcctacctgcgcgaggac

SEQ ID NO: 4678 - DNA, 582 bp, synthetic construct
  misc_feature 1..582: note = Description of Artificial Sequence: Synthetic coding sequence
  source 1..582: mol_type = other DNA
atgcacaagtggatcctgacctggatcctgcccaccctgctgtaccgcagctgcttccacatcatctgcctggtgggcaccatcagcctggcctgcaacgacatgacccccgagcagatggccaccaacgtgaactgcagcagccccgagcgccacacccgcagctacgactacatggagggcggcgacatccgcgtgcgccgcctgttctgccgcacccagtggtacctgcgcatcgacaagcgcggcaaggtgaagggcacccaggagatgaagaacaactacaacatcatggagatccgcaccgtggccgtgggcatcgtggccatcaagggcgtggagagcgagttctacctggccatgaacaaggagggcaagctgtacgccaagaaggagtgcaacgaggactgcaacttcaaggagctgatcctggagaaccactacaacacctacgccagcgccaagtggacccacaacggcggcgagatgttcgtggccctgaaccagaagggcatccccgtgcgcggcaagaagaccaagaaggagcagaagaccgcccacttcctgcccatggccatcacc

SEQ ID NO: 4679 - DNA, 435 bp, synthetic construct
  misc_feature 1..435: note = Description of Artificial Sequence: Synthetic coding sequence
  source 1..435: mol_type = other DNA
atggccacctgggccctgctgctgctggccgccatgctgctgggcaaccccggcctggtgttcagccgcctgagccccgagtactacgacctggcccgcgcccacctgcgcgacgaggagaagagctgcccctgcctggcccaggagggcccccagggcgacctgctgaccaagacccaggagctgggccgcgactaccgcacctgcctgaccatcgtgcagaagctgaagaagatggtggacaagcccacccagcgcagcgtgagcaacgccgccacccgcgtgtgccgcaccggccgcagccgctggcgcgacgtgtgccgcaacttcatgcgccgctaccagagccgcgtgacccagggcctggtggccggcgagaccgcccagcagatctgcgaggacctgcgcctgtgcatccccagcaccggccccctg

SEQ ID NO: 4680 - DNA, 390 bp, synthetic construct
  misc_feature 1..390: note = Description of Artificial Sequence: Synthetic coding sequence
  source 1..390: mol_type = other DNA
atggagggcctggtgttcagccgcctgagccccgagtactacgacctggcccgcgcccacctgcgcgacgaggagaagagctgcccctgcctggcccaggagggcccccagggcgacctgctgaccaagacccaggagctgggccgcgactaccgcacctgcctgaccatcgtgcagaagctgaagaagatggtggacaagcccacccagcgcagcgtgagcaacgccgccacccgcgtgtgccgcaccggccgcagccgctggcgcgacgtgtgccgcaacttcatgcgccgctaccagagccgcgtgacccagggcctggtggccggcgagaccgcccagcagatctgcgaggacctgcgcctgtgcatccccagcaccggccccctg

SEQ ID NO: 4681 - DNA, 2478 bp, synthetic construct
  misc_feature 1..2478: note = Description of Artificial Sequence: Synthetic coding sequence
  source 1..2478: mol_type = other DNA
atggagggcgccggcggcgccaacgacaagaagaagatcagcagcgagcgccgcaaggagaagagccgcgacgccgcccgcagccgccgcagcaaggagagcgaggtgttctacgagctggcccaccagctgcccctgccccacaacgtgagcagccacctggacaaggccagcgtgatgcgcctgaccatcagctacctgcgcgtgcgcaagctgctggacgccggcgacctggacatcgaggacgacatgaaggcccagatgaactgcttctacctgaaggccctggacggcttcgtgatggtgctgaccgacgacggcgacatgatctacatcagcgacaacgtgaacaagtacatgggcctgacccagttcgagctgaccggccacagcgtgttcgacttcacccacccctgcgaccacgaggagatgcgcgagatgctgacccaccgcaacggcctggtgaagaagggcaaggagcagaacacccagcgcagcttcttcctgcgcatgaagtgcaccctgaccagccgcggccgcaccatgaacatcaagagcgccacctggaaggtgctgcactgcaccggccacatccacgtgtacgacaccaacagcaaccagccccagtgcggctacaagaagccccccatgacctgcctggtgctgatctgcgagcccatcccccaccccagcaacatcgagatccccctggacagcaagaccttcctgagccgccacagcctggacatgaagttcagctactgcgacgagcgcatcaccgagctgatgggctacgagcccgaggagctgctgggccgcagcatctacgagtactaccacgccctggacagcgaccacctgaccaagacccaccacgacatgttcaccaagggccaggtgaccaccggccagtaccgcatgctggccaagcgcggcggctacgtgtgggtggagacccaggccaccgtgatctacaacaccaagaacagccagccccagtgcatcgtgtgcgtgaactacgtggtgagcggcatcatccagcacgacctgatcttcagcctgcagcagaccgagtgcgtgctgaagcccgtggagagcagcgacatgaagatgacccagctgttcaccaaggtggagagcgaggacaccagcagcctgttcgacaagctgaagaaggagcccgacgccctgaccctgctggcccccgccgccggcgacaccatcatcagcctggacttcggcagcaacgacaccgagaccgacgaccagcagctggaggaggtgcccctgtacaacgacgtgatgctgcccagccccaacgagaagctgcagaacatcaacctggccatgagccccctgcccaccgccgagacccccaagcccctgcgcagcagcgccgaccccgccctgaaccaggaggtggccctgaagctggagcccaaccccgagagcctggagctgagcttcaccatgccccagatccaggaccagacccccagccccagcgacggcagcacccgccagagcagccccgagcccaacagccccagcgagtactgcttctacgtggacagcgacatggtgaacgagttcaagctggagctggtggagaagctgttcgccgaggacaccgaggccaagaaccccttcagcacccaggacaccgacctggacctggagatgctggccccctacatccccatggacgacgacttccagctgcgcagcttcgaccagctgagccccctggagagcagcagcgccagccccgagagcgccagcccccagagcaccgtgaccgtgttccagcagacccagatccaggagcccaccgccaacgccaccaccaccaccgccaccaccgacgagctgaagaccgtgaccaaggaccgcatggaggacatcaagatcctgatcgccagccccagccccacccacatccacaaggagaccaccagcgccaccagcagcccctaccgcgacacccagagccgcaccgccagccccaaccgcgccggcaagggcgtgatcgagcagaccgagaagagccacccccgcagccccaacgtgctgagcgtggccctgagccagcgcaccaccgtgcccgaggaggagctgaaccccaagatcctggccctgcagaacgcccagcgcaagcgcaagatggagcacgacggcagcctgttccaggccgtgggcatcggcaccctgctgcagcagcccgacgaccacgccgccaccaccagcctgagctggaagcgcgtgaagggctgcaagagcagcgagcagaacggcatggagcagaagaccatcatcctgatccccagcgacctggcctgccgcctgctgggccagagcatggacgagagcggcctgccccagctgaccagctacgactgcgaggtgaacgcccccatccagggcagccgcaacctgctgcagggcgaggagctgctgcgcgccctggaccaggtgaac

SEQ ID NO: 4682 - DNA, 2481 bp, synthetic construct
  misc_feature 1..2481: note = Description of Artificial Sequence: Synthetic coding sequence
  source 1..2481: mol_type = other DNA
atggagggcgccggcggcgccaacgacaagaagaaccgcatcagcagcgagcgccgcaaggagaagagccgcgacgccgcccgcagccgccgcagcaaggagagcgaggtgttctacgagctggcccaccagctgcccctgccccacaacgtgagcagccacctggacaaggccagcgtgatgcgcctgaccatcagctacctgcgcgtgcgcaagctgctggacgccggcgacctggacatcgaggacgacatgaaggcccagatgaactgcttctacctgaaggccctggacggcttcgtgatggtgctgaccgacgacggcgacatgatctacatcagcgacaacgtgaacaagtacatgggcctgacccagttcgagctgaccggccacagcgtgttcgacttcacccacccctgcgaccacgaggagatgcgcgagatgctgacccaccgcaacggcctggtgaagaagggcaaggagcagaacacccagcgcagcttcttcctgcgcatgaagtgcaccctgaccagccgcggccgcaccatgaacatcaagagcgccacctggaaggtgctgcactgcaccggccacatccacgtgtacgacaccaacagcaaccagccccagtgcggctacaagaagccccccatgacctgcctggtgctgatctgcgagcccatcccccaccccagcaacatcgagatccccctggacagcaagaccttcctgagccgccacagcctggacatgaagttcagctactgcgacgagcgcatcaccgagctgatgggctacgagcccgaggagctgctgggccgcagcatctacgagtactaccacgccctggacagcgaccacctgaccaagacccaccacgacatgttcaccaagggccaggtgaccaccggccagtaccgcatgctggccaagcgcggcggctacgtgtgggtggagacccaggccaccgtgatctacaacaccaagaacagccagccccagtgcatcgtgtgcgtgaactacgtggtgagcggcatcatccagcacgacctgatcttcagcctgcagcagaccgagtgcgtgctgaagcccgtggagagcagcgacatgaagatgacccagctgttcaccaaggtggagagcgaggacaccagcagcctgttcgacaagctgaagaaggagcccgacgccctgaccctgctggcccccgccgccggcgacaccatcatcagcctggacttcggcagcaacgacaccgagaccgacgaccagcagctggaggaggtgcccctgtacaacgacgtgatgctgcccagccccaacgagaagctgcagaacatcaacctggccatgagccccctgcccaccgccgagacccccaagcccctgcgcagcagcgccgaccccgccctgaaccaggaggtggccctgaagctggagcccaaccccgagagcctggagctgagcttcaccatgccccagatccaggaccagacccccagccccagcgacggcagcacccgccagagcagccccgagcccaacagccccagcgagtactgcttctacgtggacagcgacatggtgaacgagttcaagctggagctggtggagaagctgttcgccgaggacaccgaggccaagaaccccttcagcacccaggacaccgacctggacctggagatgctggccccctacatccccatggacgacgacttccagctgcgcagcttcgaccagctgagccccctggagagcagcagcgccagccccgagagcgccagcccccagagcaccgtgaccgtgttccagcagacccagatccaggagcccaccgccaacgccaccaccaccaccgccaccaccgacgagctgaagaccgtgaccaaggaccgcatggaggacatcaagatcctgatcgccagccccagccccacccacatccacaaggagaccaccagcgccaccagcagcccctaccgcgacacccagagccgcaccgccagccccaaccgcgccggcaagggcgtgatcgagcagaccgagaagagccacccccgcagccccaacgtgctgagcgtggccctgagccagcgcaccaccgtgcccgaggaggagctgaaccccaagatcctggccctgcagaacgcccagcgcaagcgcaagatggagcacgacggcagcctgttccaggccgtgggcatcggcaccctgctgcagcagcccgacgaccacgccgccaccaccagcctgagctggaagcgcgtgaagggctgcaagagcagcgagcagaacggcatggagcagaagaccatcatcctgatccccagcgacctggcctgccgcctgctgggccagagcatggacgagagcggcctgccccagctgaccagctacgactgcgaggtgaacgcccccatccagggcagccgcaacctgctgcagggcgaggagctgctgcgcgccctggaccaggtgaac

SEQ ID NO: 4683 - DNA, 2550 bp, synthetic construct
  misc_feature 1..2550: note = Description of Artificial Sequence: Synthetic coding sequence
  source 1..2550: mol_type = other DNA
atgagcagccagtgccgcagcctggagaacaagttcgtgttcctgaaggagggcctgggcaacagcaagcccgaggagctggaggagatccgcatcgagaacggccgcatcagcagcgagcgccgcaaggagaagagccgcgacgccgcccgcagccgccgcagcaaggagagcgaggtgttctacgagctggcccaccagctgcccctgccccacaacgtgagcagccacctggacaaggccagcgtgatgcgcctgaccatcagctacctgcgcgtgcgcaagctgctggacgccggcgacctggacatcgaggacgacatgaaggcccagatgaactgcttctacctgaaggccctggacggcttcgtgatggtgctgaccgacgacggcgacatgatctacatcagcgacaacgtgaacaagtacatgggcctgacccagttcgagctgaccggccacagcgtgttcgacttcacccacccctgcgaccacgaggagatgcgcgagatgctgacccaccgcaacggcctggtgaagaagggcaaggagcagaacacccagcgcagcttcttcctgcgcatgaagtgcaccctgaccagccgcggccgcaccatgaacatcaagagcgccacctggaaggtgctgcactgcaccggccacatccacgtgtacgacaccaacagcaaccagccccagtgcggctacaagaagccccccatgacctgcctggtgctgatctgcgagcccatcccccaccccagcaacatcgagatccccctggacagcaagaccttcctgagccgccacagcctggacatgaagttcagctactgcgacgagcgcatcaccgagctgatgggctacgagcccgaggagctgctgggccgcagcatctacgagtactaccacgccctggacagcgaccacctgaccaagacccaccacgacatgttcaccaagggccaggtgaccaccggccagtaccgcatgctggccaagcgcggcggctacgtgtgggtggagacccaggccaccgtgatctacaacaccaagaacagccagccccagtgcatcgtgtgcgtgaactacgtggtgagcggcatcatccagcacgacctgatcttcagcctgcagcagaccgagtgcgtgctgaagcccgtggagagcagcgacatgaagatgacccagctgttcaccaaggtggagagcgaggacaccagcagcctgttcgacaagctgaagaaggagcccgacgccctgaccctgctggcccccgccgccggcgacaccatcatcagcctggacttcggcagcaacgacaccgagaccgacgaccagcagctggaggaggtgcccctgtacaacgacgtgatgctgcccagccccaacgagaagctgcagaacatcaacctggccatgagccccctgcccaccgccgagacccccaagcccctgcgcagcagcgccgaccccgccctgaaccaggaggtggccctgaagctggagcccaaccccgagagcctggagctgagcttcaccatgccccagatccaggaccagacccccagccccagcgacggcagcacccgccagagcagccccgagcccaacagccccagcgagtactgcttctacgtggacagcgacatggtgaacgagttcaagctggagctggtggagaagctgttcgccgaggacaccgaggccaagaaccccttcagcacccaggacaccgacctggacctggagatgctggccccctacatccccatggacgacgacttccagctgcgcagcttcgaccagctgagccccctggagagcagcagcgccagccccgagagcgccagcccccagagcaccgtgaccgtgttccagcagacccagatccaggagcccaccgccaacgccaccaccaccaccgccaccaccgacgagctgaagaccgtgaccaaggaccgcatggaggacatcaagatcctgatcgccagccccagccccacccacatccacaaggagaccaccagcgccaccagcagcccctaccgcgacacccagagccgcaccgccagccccaaccgcgccggcaagggcgtgatcgagcagaccgagaagagccacccccgcagccccaacgtgctgagcgtggccctgagccagcgcaccaccgtgcccgaggaggagctgaaccccaagatcctggccctgcagaacgcccagcgcaagcgcaagatggagcacgacggcagcctgttccaggccgtgggcatcggcaccctgctgcagcagcccgacgaccacgccgccaccaccagcctgagctggaagcgcgtgaagggctgcaagagcagcgagcagaacggcatggagcagaagaccatcatcctgatccccagcgacctggcctgccgcctgctgggccagagcatggacgagagcggcctgccccagctgaccagctacgactgcgaggtgaacgcccccatccagggcagccgcaacctgctgcagggcgaggagctgctgcgcgccctggaccaggtgaac

SEQ ID NO: 4684 - DNA, 2301 bp, synthetic construct
  misc_feature 1..2301: note = Description of Artificial Sequence: Synthetic coding sequence
  source 1..2301: mol_type = other DNA
atgcgcctgaccatcagctacctgcgcgtgcgcaagctgctggacgccggcgacctggacatcgaggacgacatgaaggcccagatgaactgcttctacctgaaggccctggacggcttcgtgatggtgctgaccgacgacggcgacatgatctacatcagcgacaacgtgaacaagtacatgggcctgacccagttcgagctgaccggccacagcgtgttcgacttcacccacccctgcgaccacgaggagatgcgcgagatgctgacccaccgcaacggcctggtgaagaagggcaaggagcagaacacccagcgcagcttcttcctgcgcatgaagtgcaccctgaccagccgcggccgcaccatgaacatcaagagcgccacctggaaggtgctgcactgcaccggccacatccacgtgtacgacaccaacagcaaccagccccagtgcggctacaagaagccccccatgacctgcctggtgctgatctgcgagcccatcccccaccccagcaacatcgagatccccctggacagcaagaccttcctgagccgccacagcctggacatgaagttcagctactgcgacgagcgcatcaccgagctgatgggctacgagcccgaggagctgctgggccgcagcatctacgagtactaccacgccctggacagcgaccacctgaccaagacccaccacgacatgttcaccaagggccaggtgaccaccggccagtaccgcatgctggccaagcgcggcggctacgtgtgggtggagacccaggccaccgtgatctacaacaccaagaacagccagccccagtgcatcgtgtgcgtgaactacgtggtgagcggcatcatccagcacgacctgatcttcagcctgcagcagaccgagtgcgtgctgaagcccgtggagagcagcgacatgaagatgacccagctgttcaccaaggtggagagcgaggacaccagcagcctgttcgacaagctgaagaaggagcccgacgccctgaccctgctggcccccgccgccggcgacaccatcatcagcctggacttcggcagcaacgacaccgagaccgacgaccagcagctggaggaggtgcccctgtacaacgacgtgatgctgcccagccccaacgagaagctgcagaacatcaacctggccatgagccccctgcccaccgccgagacccccaagcccctgcgcagcagcgccgaccccgccctgaaccaggaggtggccctgaagctggagcccaaccccgagagcctggagctgagcttcaccatgccccagatccaggaccagacccccagccccagcgacggcagcacccgccagagcagccccgagcccaacagccccagcgagtactgcttctacgtggacagcgacatggtgaacgagttcaagctggagctggtggagaagctgttcgccgaggacaccgaggccaagaaccccttcagcacccaggacaccgacctggacctggagatgctggccccctacatccccatggacgacgacttccagctgcgcagcttcgaccagctgagccccctggagagcagcagcgccagccccgagagcgccagcccccagagcaccgtgaccgtgttccagcagacccagatccaggagcccaccgccaacgccaccaccaccaccgccaccaccgacgagctgaagaccgtgaccaaggaccgcatggaggacatcaagatcctgatcgccagccccagccccacccacatccacaaggagaccaccagcgccaccagcagcccctaccgcgacacccagagccgcaccgccagccccaaccgcgccggcaagggcgtgatcgagcagaccgagaagagccacccccgcagccccaacgtgctgagcgtggccctgagccagcgcaccaccgtgcccgaggaggagctgaaccccaagatcctggccctgcagaacgcccagcgcaagcgcaagatggagcacgacggcagcctgttccaggccgtgggcatcggcaccctgctgcagcagcccgacgaccacgccgccaccaccagcctgagctggaagcgcgtgaagggctgcaagagcagcgagcagaacggcatggagcagaagaccatcatcctgatccccagcgacctggcctgccgcctgctgggccagagcatggacgagagcggcctgccccagctgaccagctacgactgcgaggtgaacgcccccatccagggcagccgcaacctgctgcagggcgaggagctgctgcgcgccctggaccaggtgaac

SEQ ID NO: 4685 - DNA, 486 bp, synthetic construct
  misc_feature 1..486: note = Description of Artificial Sequence: Synthetic coding sequence
  source 1..486: mol_type = other DNA
atgcgcatcagcaagccccacctgcgcagcatcagcatccagtgctacctgtgcctgctgctgaacagccacttcctgaccgaggccggcatccacgtgttcatcctgggctgcttcagcgccggcctgcccaagaccgaggccaactgggtgaacgtgatcagcgacctgaagaagatcgaggacctgatccagagcatgcacatcgacgccaccctgtacaccgagagcgacgtgcaccccagctgcaaggtgaccgccatgaagtgcttcctgctggagctgcaggtgatcagcctggagagcggcgacgccagcatccacgacaccgtggagaacctgatcatcctggccaacaacagcctgagcagcaacggcaacgtgaccgagagcggctgcaaggagtgcgaggagctggaggagaagaacatcaaggagttcctgcagagcttcgtgcacatcgtgcagatgttcatcaacaccagc

SEQ ID NO: 4686 - DNA, 405 bp, synthetic construct
  misc_feature 1..405: note = Description of Artificial Sequence: Synthetic coding sequence
  source 1..405: mol_type = other DNA
atggtgctgggcaccatcgacctgtgcagctgcttcagcgccggcctgcccaagaccgaggccaactgggtgaacgtgatcagcgacctgaagaagatcgaggacctgatccagagcatgcacatcgacgccaccctgtacaccgagagcgacgtgcaccccagctgcaaggtgaccgccatgaagtgcttcctgctggagctgcaggtgatcagcctggagagcggcgacgccagcatccacgacaccgtggagaacctgatcatcctggccaacaacagcctgagcagcaacggcaacgtgaccgagagcggctgcaaggagtgcgaggagctggaggagaagaacatcaaggagttcctgcagagcttcgtgcacatcgtgcagatgttcatcaacaccagc

SEQ ID NO: 4687 - DNA, 1377 bp, synthetic construct
  misc_feature 1..1377: note = Description of Artificial Sequence: Synthetic coding sequence
  source 1..1377: mol_type = other DNA
atgatcaagcgcttcctggaggacaccaccgacgacggcgagctgagcaagttcgtgaaggacttcagcggcaacgccagctgccacccccccgaggccaagacctgggccagccgcccccaggtgcccgagccccgcccccaggcccccgacctgtacgacgacgacctggagttccgcccccccagccgcccccagagcagcgacaaccagcagtacttctgcgcccccgcccccctgagccccagcgcccgcccccgcagcccctggggcaagctggacccctacgacagcagcgaggacgacaaggagtacgtgggcttcgccaccctgcccaaccaggtgcaccgcaagagcgtgaagaagggcttcgacttcaccctgatggtggccggcgagagcggcctgggcaagagcaccctggtgaacagcctgttcctgaccgacctgtaccgcgaccgcaagctgctgggcgccgaggagcgcatcatgcagaccgtggagatcaccaagcacgccgtggacatcgaggagaagggcgtgcgcctgcgcctgaccatcgtggacacccccggcttcggcgacgccgtgaacaacaccgagtgctggaagcccgtggccgagtacatcgaccagcagttcgagcagtacttccgcgacgagagcggcctgaaccgcaagaacatccaggacaaccgcgtgcactgctgcctgtacttcatcagccccttcggccacggcctgcgccccctggacgtggagttcatgaaggccctgcaccagcgcgtgaacatcgtgcccatcctggccaaggccgacaccctgaccccccccgaggtggaccacaagaagcgcaagatccgcgaggagatcgagcacttcggcatcaagatctaccagttccccgactgcgacagcgacgaggacgaggacttcaagctgcaggaccaggccctgaaggagagcatccccttcgccgtgatcggcagcaacaccgtggtggaggcccgcggccgccgcgtgcgcggccgcctgtacccctggggcatcgtggaggtggagaaccccggccactgcgacttcgtgaagctgcgcaccatgctggtgcgcacccacatgcaggacctgaaggacgtgacccgcgagacccactacgagaactaccgcgcccagtgcatccagagcatgacccgcctggtggtgaaggagcgcaaccgcaacaagctgacccgcgagagcggcaccgacttccccatccccgccgtgccccccggcaccgaccccgagaccgagaagctgatccgcgagaaggacgaggagctgcgccgcatgcaggagatgctgcacaagatccagaagcagatgaaggagaactac

SEQ ID NO: 4688 - DNA, 1434 bp, synthetic construct
  misc_feature 1..1434: note = Description of Artificial Sequence: Synthetic coding sequence
  source 1..1434: mol_type = other DNA
atggaccgcagcctgggctggcagggcaacagcgtgcccgaggaccgcaccgaggccggcatcaagcgcttcctggaggacaccaccgacgacggcgagctgagcaagttcgtgaaggacttcagcggcaacgccagctgccacccccccgaggccaagacctgggccagccgcccccaggtgcccgagccccgcccccaggcccccgacctgtacgacgacgacctggagttccgcccccccagccgcccccagagcagcgacaaccagcagtacttctgcgcccccgcccccctgagccccagcgcccgcccccgcagcccctggggcaagctggacccctacgacagcagcgaggacgacaaggagtacgtgggcttcgccaccctgcccaaccaggtgcaccgcaagagcgtgaagaagggcttcgacttcaccctgatggtggccggcgagagcggcctgggcaagagcaccctggtgaacagcctgttcctgaccgacctgtaccgcgaccgcaagctgctgggcgccgaggagcgcatcatgcagaccgtggagatcaccaagcacgccgtggacatcgaggagaagggcgtgcgcctgcgcctgaccatcgtggacacccccggcttcggcgacgccgtgaacaacaccgagtgctggaagcccgtggccgagtacatcgaccagcagttcgagcagtacttccgcgacgagagcggcctgaaccgcaagaacatccaggacaaccgcgtgcactgctgcctgtacttcatcagccccttcggccacggcctgcgccccctggacgtggagttcatgaaggccctgcaccagcgcgtgaacatcgtgcccatcctggccaaggccgacaccctgaccccccccgaggtggaccacaagaagcgcaagatccgcgaggagatcgagcacttcggcatcaagatctaccagttccccgactgcgacagcgacgaggacgaggacttcaagctgcaggaccaggccctgaaggagagcatccccttcgccgtgatcggcagcaacaccgtggtggaggcccgcggccgccgcgtgcgcggccgcctgtacccctggggcatcgtggaggtggagaaccccggccactgcgacttcgtgaagctgcgcaccatgctggtgcgcacccacatgcaggacctgaaggacgtgacccgcgagacccactacgagaactaccgcgcccagtgcatccagagcatgacccgcctggtggtgaaggagcgcaaccgcaacaagctgacccgcgagagcggcaccgacttccccatccccgccgtgccccccggcaccgaccccgagaccgagaagctgatccgcgagaaggacgaggagctgcgccgcatgcaggagatgctgcacaagatccagaagcagatgaaggagaactac

SEQ ID NO: 4689 - DNA, 1410 bp, synthetic construct
  misc_feature 1..1410: note = Description of Artificial Sequence: Synthetic coding sequence
  source 1..1410: mol_type = other DNA
atgcccggcttctacagcgtgatgaccgacgaggagatcaagcgcttcctggaggacaccaccgacgacggcgagctgagcaagttcgtgaaggacttcagcggcaacgccagctgccacccccccgaggccaagacctgggccagccgcccccaggtgcccgagccccgcccccaggcccccgacctgtacgacgacgacctggagttccgcccccccagccgcccccagagcagcgacaaccagcagtacttctgcgcccccgcccccctgagccccagcgcccgcccccgcagcccctggggcaagctggacccctacgacagcagcgaggacgacaaggagtacgtgggcttcgccaccctgcccaaccaggtgcaccgcaagagcgtgaagaagggcttcgacttcaccctgatggtggccggcgagagcggcctgggcaagagcaccctggtgaacagcctgttcctgaccgacctgtaccgcgaccgcaagctgctgggcgccgaggagcgcatcatgcagaccgtggagatcaccaagcacgccgtggacatcgaggagaagggcgtgcgcctgcgcctgaccatcgtggacacccccggcttcggcgacgccgtgaacaacaccgagtgctggaagcccgtggccgagtacatcgaccagcagttcgagcagtacttccgcgacgagagcggcctgaaccgcaagaacatccaggacaaccgcgtgcactgctgcctgtacttcatcagccccttcggccacggcctgcgccccctggacgtggagttcatgaaggccctgcaccagcgcgtgaacatcgtgcccatcctggccaaggccgacaccctgaccccccccgaggtggaccacaagaagcgcaagatccgcgaggagatcgagcacttcggcatcaagatctaccagttccccgactgcgacagcgacgaggacgaggacttcaagctgcaggaccaggccctgaaggagagcatccccttcgccgtgatcggcagcaacaccgtggtggaggcccgcggccgccgcgtgcgcggccgcctgtacccctggggcatcgtggaggtggagaaccccggccactgcgacttcgtgaagctgcgcaccatgctggtgcgcacccacatgcaggacctgaaggacgtgacccgcgagacccactacgagaactaccgcgcccagtgcatccagagcatgacccgcctggtggtgaaggagcgcaaccgcaacaagctgacccgcgagagcggcaccgacttccccatccccgccgtgccccccggcaccgaccccgagaccgagaagctgatccgcgagaaggacgaggagctgcgccgcatgcaggagatgctgcacaagatccagaagcagatgaaggagaactac

SEQ ID NO: 4690 - DNA, 822 bp, synthetic construct
  misc_feature 1..822: note = Description of Artificial Sequence: Synthetic coding sequence
  source 1..822: mol_type = other DNA
atgatcaagcgcttcctggaggacaccaccgacgacggcgagctgagcaagttcgtgaaggacttcagcggcaacgccagctgccacccccccgaggccaagacctgggccagccgcccccaggtgcccgagccccgcccccaggcccccgacctgtacgacgacgacctggagttccgcccccccagccgcccccagagcagcgacaaccagcagtacttctgcgcccccgcccccctgagccccagcgcccgcccccgcagcccctggggcaagctggacccctacgacagcagcgaggacgacaaggagtacgtgggcttcgccaccctgcccaaccaggtgcaccgcaagagcgtgaagaagggcttcgacttcaccctgatggtggccggcgagagcggcctgggcaagagcaccctggtgaacagcctgttcctgaccgacctgtaccgcgaccgcaagctgctgggcgccgaggagcgcatcatgcagaccgtggagatcaccaagcacgccgtggacatcgaggagaagggcgtgcgcctgcgcctgaccatcgtggacacccccggcttcggcgacgccgtgaacaacaccgagtgctggaagcccgtggccgagtacatcgaccagcagttcgagcagtacttccgcgacgagagcggcctgaaccgcaagaacatccaggacaaccgcgtgcactgctgcctgtacttcatcagccccttcggccacggctacggccccagcctgcgcctgctggccccccccggcgccgtgaagggcaccggccaggagcaccagggccagggctgccac

SEQ ID NO: 4691 - DNA, 1479 bp, synthetic construct
  misc_feature 1..1479: note = Description of Artificial Sequence: Synthetic coding sequence
  source 1..1479: mol_type = other DNA
atgcgcagcagccccgccctgttcagcagccgcgccgccccccagaagccccgcaaggagggcagccaggccgccggcctgctggtgttcagcgacagcctggagatcaagcgcttcctggaggacaccaccgacgacggcgagctgagcaagttcgtgaaggacttcagcggcaacgccagctgccacccccccgaggccaagacctgggccagccgcccccaggtgcccgagccccgcccccaggcccccgacctgtacgacgacgacctggagttccgcccccccagccgcccccagagcagcgacaaccagcagtacttctgcgcccccgcccccctgagccccagcgcccgcccccgcagcccctggggcaagctggacccctacgacagcagcgaggacgacaaggagtacgtgggcttcgccaccctgcccaaccaggtgcaccgcaagagcgtgaagaagggcttcgacttcaccctgatggtggccggcgagagcggcctgggcaagagcaccctggtgaacagcctgttcctgaccgacctgtaccgcgaccgcaagctgctgggcgccgaggagcgcatcatgcagaccgtggagatcaccaagcacgccgtggacatcgaggagaagggcgtgcgcctgcgcctgaccatcgtggacacccccggcttcggcgacgccgtgaacaacaccgagtgctggaagcccgtggccgagtacatcgaccagcagttcgagcagtacttccgcgacgagagcggcctgaaccgcaagaacatccaggacaaccgcgtgcactgctgcctgtacttcatcagccccttcggccacggcctgcgccccctggacgtggagttcatgaaggccctgcaccagcgcgtgaacatcgtgcccatcctggccaaggccgacaccctgaccccccccgaggtggaccacaagaagcgcaagatccgcgaggagatcgagcacttcggcatcaagatctaccagttccccgactgcgacagcgacgaggacgaggacttcaagctgcaggaccaggccctgaaggagagcatccccttcgccgtgatcggcagcaacaccgtggtggaggcccgcggccgccgcgtgcgcggccgcctgtacccctggggcatcgtggaggtggagaaccccggccactgcgacttcgtgaagctgcgcaccatgctggtgcgcacccacatgcaggacctgaaggacgtgacccgcgagacccactacgagaactaccgcgcccagtgcatccagagcatgacccgcctggtggtgaaggagcgcaaccgcaacaagctgacccgcgagagcggcaccgacttccccatccccgccgtgccccccggcaccgaccccgagaccgagaagctgatccgcgagaaggacgaggagctgcgccgcatgcaggagatgctgcacaagatccagaagcagatgaaggagaactac

SEQ ID NO: 4692 - DNA, 939 bp, synthetic construct
  misc_feature 1..939: note = Description of Artificial Sequence: Synthetic coding sequence
  source 1..939: mol_type = other DNA
atgaccggcaaggccaccccccccagcctgtacagctggcgcggcgtgctgttcacctgcctgcccgccgcccgcacccgcaagcgcaaggagatgagccgccagaccgccaccgccctgcccaccggcaccagcaagtgcccccccagccagcgcgtgcccgccctgaccggcaccaccgccagcaacaacgacctggccagcctgttcgagtgccccgtgtgcttcgactacgtgctgccccccatcctgcagtgccagagcggccacctggtgtgcagcaactgccgccccaagctgacctgctgccccacctgccgcggccccctgggcagcatccgcaacctggccatggagaaggtggccaacagcgtgctgttcccctgcaagtacgccagcagcggctgcgagatcaccctgccccacaccgagaaggccgaccacgaggagctgtgcgagttccgcccctacagctgcccctgccccggcgccagctgcaagtggcagggcagcctggacgccgtgatgccccacctgatgcaccagcacaagagcatcaccaccctgcagggcgaggacatcgtgttcctggccaccgacatcaacctgcccggcgccgtggactgggtgatgatgcagagctgcttcggcttccacttcatgctggtgctggagaagcaggagaagtacgacggccaccagcagttcttcgccatcgtgcagctgatcggcacccgcaagcaggccgagaacttcgcctaccgcctggagctgaacggccaccgccgccgcctgacctgggaggccaccccccgcagcatccacgagggcatcgccaccgccatcatgaacagcgactgcctggtgttcgacaccagcatcgcccagctgttcgccgagaacggcaacctgggcatcaacgtgaccatcagcatgtgc

SEQ ID NO: 4693 - DNA, 846 bp, synthetic construct
  misc_feature 1..846: note = Description of Artificial Sequence: Synthetic coding sequence
  source 1..846: mol_type = other DNA
atgagccgccagaccgccaccgccctgcccaccggcaccagcaagtgcccccccagccagcgcgtgcccgccctgaccggcaccaccgccagcaacaacgacctggccagcctgttcgagtgccccgtgtgcttcgactacgtgctgccccccatcctgcagtgccagagcggccacctggtgtgcagcaactgccgccccaagctgacctgctgccccacctgccgcggccccctgggcagcatccgcaacctggccatggagaaggtggccaacagcgtgctgttcccctgcaagtacgccagcagcggctgcgagatcaccctgccccacaccgagaaggccgaccacgaggagctgtgcgagttccgcccctacagctgcccctgccccggcgccagctgcaagtggcagggcagcctggacgccgtgatgccccacctgatgcaccagcacaagagcatcaccaccctgcagggcgaggacatcgtgttcctggccaccgacatcaacctgcccggcgccgtggactgggtgatgatgcagagctgcttcggcttccacttcatgctggtgctggagaagcaggagaagtacgacggccaccagcagttcttcgccatcgtgcagctgatcggcacccgcaagcaggccgagaacttcgcctaccgcctggagctgaacggccaccgccgccgcctgacctgggaggccaccccccgcagcatccacgagggcatcgccaccgccatcatgaacagcgactgcctggtgttcgacaccagcatcgcccagctgttcgccgagaacggcaacctgggcatcaacgtgaccatcagcatgtgc

SEQ ID NO: 4694 - DNA, 1395 bp, synthetic construct
  misc_feature 1..1395: note = Description of Artificial Sequence: Synthetic coding sequence
  source 1..1395: mol_type = other DNA
atgggcggcgccgtggtggacgagggccccaccggcgtgaaggcccccgacggcggctggggctgggccgtgctgttcggctgcttcgtgatcaccggcttcagctacgccttccccaaggccgtgagcgtgttcttcaaggagctgatccaggagttcggcatcggctacagcgacaccgcctggatcagcagcatcctgctggccatgctgtacggcaccggccccctgtgcagcgtgtgcgtgaaccgcttcggctgccgccccgtgatgctggtgggcggcctgttcgccagcctgggcatggtggccgccagcttctgccgcagcatcatccaggtgtacctgaccaccggcgtgatcaccggcctgggcctggccctgaacttccagcccagcctgatcatgctgaaccgctacttcagcaagcgccgccccatggccaacggcctggccgccgccggcagccccgtgttcctgtgcgccctgagccccctgggccagctgctgcaggaccgctacggctggcgcggcggcttcctgatcctgggcggcctgctgctgaactgctgcgtgtgcgccgccctgatgcgccccctggtggtgaccgcccagcccggcagcggccccccccgccccagccgccgcctgctggacctgagcgtgttccgcgaccgcggcttcgtgctgtacgccgtggccgccagcgtgatggtgctgggcctgttcgtgccccccgtgttcgtggtgagctacgccaaggacctgggcgtgcccgacaccaaggccgccttcctgctgaccatcctgggcttcatcgacatcttcgcccgccccgccgccggcttcgtggccggcctgggcaaggtgcgcccctacagcgtgtacctgttcagcttcagcatgttcttcaacggcctggccgacctggccggcagcaccgccggcgactacggcggcctggtggtgttctgcatcttcttcggcatcagctacggcatggtgggcgccctgcagttcgaggtgctgatggccatcgtgggcacccacaagttcagcagcgccatcggcctggtgctgctgatggaggccgtggccgtgctggtgggcccccccagcggcggcaagctgctggacgccacccacgtgtacatgtacgtgttcatcctggccggcgccgaggtgctgaccagcagcctgatcctgctgctgggcaacttcttctgcatccgcaagaagcccaaggagccccagcccgaggtggccgccgccgaggaggagaagctgcacaagccccccgccgacagcggcgtggacctgcgcgaggtggagcacttcctgaaggccgagcccgagaagaacggcgaggtggtgcacacccccgagaccagcgtg

SEQ ID NO: 4695 - DNA, 702 bp, synthetic construct
  misc_feature 1..702: note = Description of Artificial Sequence: Synthetic coding sequence
  source 1..702: mol_type = other DNA
atggagcccagcagcaagaagctgaccggccgcctgatgctggccgtgggcggcgccgtgctgggcagcctgcagttcggctacaacaccggcgtgatcaacgccccccagaaggtgatcgaggagttctacaaccagacctgggtgcaccgctacggcgagagcatcctgcccaccaccctgaccaccctgtggagcctgagcgtggccatcttcagcgtgggcggcatgatcggcagcttcagcgtgggcctgttcgtgaaccgcttcggccgccgcaacagcatgctgatgatgaacctgctggccttcgtgagcgccgtgctgatgggcttcagcaagctgggcaagagcttcgagatgctgatcctgggccgcttcatcatcggcgtgtactgcggcctgaccaccggcttcgtgcccatgtacgtgggcgaggtgagccccaccgccctgcgcggcgccctgggcaccctgcaccagctgggcatcgtggtgggcatcctgatcgcccaggtgagctggggccgcatctacctgcccggcaccgcccccgcccacagcttcagcggcagccgcatctgcgcccagcagggccgcgtgagcctgccccccagcccccacagcctggccgaggacaactacggcacccaggtgcagcgcacccagcaccacggcctgcccgtggacagcaagatgacc

SEQ ID NO: 4696 - DNA, 525 bp, synthetic construct
  misc_feature 1..525: note = Description of Artificial Sequence: Synthetic coding sequence
  source 1..525: mol_type = other DNA
atggagcccagcagcaagaagctgaccggccgcctgatgctggccgtgggcggcgccgtgctgggcagcctgcagttcggctacaacaccggcgtgatcaacgccccccagaaggtgatcgaggagttctacaaccagacctgggtgcaccgctacggcgagagcatcctgcccaccaccctgaccaccctgtggagcctgagcgtggccatcttcagcgtgggcggcatgatcggcagcttcagcgtgggcctgttcgtgaaccgcttcggccgccgcaacagcatgctgatgatgaacctgctggccttcgtgagcgccgtgctgatgggcttcagcaagctgggcaaccccaagctggagaccaccgacacccccctgcccaagaagttccccttccgcccccaggcccgcaaggtgaccgccgtgcagtgccccttctgcctgagcatctgccccctgcacagcctgctgatcctgggccccaccagcaccgccaccgaggccggcaagggccacaacgtg

SEQ ID NO: 4697 - DNA, 1476 bp, synthetic construct
  misc_feature 1..1476: note = Description of Artificial Sequence: Synthetic coding sequence
  source 1..1476: mol_type = other DNA
atggagcccagcagcaagaagctgaccggccgcctgatgctggccgtgggcggcgccgtgctgggcagcctgcagttcggctacaacaccggcgtgatcaacgccccccagaaggtgatcgaggagttctacaaccagacctgggtgcaccgctacggcgagagcatcctgcccaccaccctgaccaccctgtggagcctgagcgtggccatcttcagcgtgggcggcatgatcggcagcttcagcgtgggcctgttcgtgaaccgcttcggccgccgcaacagcatgctgatgatgaacctgctggccttcgtgagcgccgtgctgatgggcttcagcaagctgggcaagagcttcgagatgctgatcctgggccgcttcatcatcggcgtgtactgcggcctgaccaccggcttcgtgcccatgtacgtgggcgaggtgagccccaccgccctgcgcggcgccctgggcaccctgcaccagctgggcatcgtggtgggcatcctgatcgcccaggtgttcggcctggacagcatcatgggcaacaaggacctgtggcccctgctgctgagcatcatcttcatccccgccctgctgcagtgcatcgtgctgcccttctgccccgagagcccccgcttcctgctgatcaaccgcaacgaggagaaccgcgccaagagcgtgctgaagaagctgcgcggcaccgccgacgtgacccacgacctgcaggagatgaaggaggagagccgccagatgatgcgcgagaagaaggtgaccatcctggagctgttccgcagccccgcctaccgccagcccatcctgatcgccgtggtgctgcagctgagccagcagctgagcggcatcaacgccgtgttctactacagcaccagcatcttcgagaaggccggcgtgcagcagcccgtgtacgccaccatcggcagcggcatcgtgaacaccgccttcaccgtggtgagcctgttcgtggtggagcgcgccggccgccgcaccctgcacctgatcggcctggccggcatggccggctgcgccatcctgatgaccatcgccctggccctgctggagcagctgccctggatgagctacctgagcatcgtggccatcttcggcttcgtggccttcttcgaggtgggccccggccccatcccctggttcatcgtggccgagctgttcagccagggcccccgccccgccgccatcgccgtggccggcttcagcaactggaccagcaacttcatcgtgggcatgtgcttccagtacgtggagcagctgtgcggcccctacgtgttcatcatcttcaccgtgctgctggtgctgttcttcatcttcacctacttcaaggtgcccgagaccaagggccgcaccttcgacgagatcgccagcggcttccgccagggcggcgccagccagagcgacaagacccccgaggagctgttccaccccctgggcgccgacagccaggtg

SEQ ID NO: 4698 - DNA, 750 bp, synthetic construct
  misc_feature 1..750: note = Description of Artificial Sequence: Synthetic coding sequence
  source 1..750: mol_type = other DNA
atgctgatgatgaacctgctggccttcgtgagcgccgtgctgatgggcttcagcaagctgggcaagagcttcgagatgctgatcctgggccgcttcatcatcggcgtgtactgcggcctgaccaccggcttcgtgcccatgtacgtgggcgaggtgagccccaccgccctgcgcggcgccctgggcaccctgcaccagctgggcatcgtggtgggcatcctgatcgcccaggtgttcggcctggacagcatcatgggcaacaaggacctgtggcccctgctgctgagcatcatcttcatccccgccctgctgcagtgcatcgtgctgcccttctgccccgagagcccccgcttcctgctgatcaaccgcaacgaggagaaccgcgccaagagcgtgctgaagaagctgcgcggcaccgccgacgtgacccacgacctgcaggagatgaaggaggagagccgccagatgatgcgcgagaagaaggtgaccatcctggagctgttccgcagccccgcctaccgccagcccatcctgatcgccgtggtgctgcagctgagccagcagctgagcggcatcaacgccgtgttctactacagcaccagcatcttcgagaaggccggcgtgcagcagcccgtgtacgccaccatcggcagcggcatcgtgaacaccgccttcaccgtggtgagcgtgagcctgtgcctgctggccccccccgccaagccccagggcggcggcagcgccatcttcccc

SEQ ID NO: 4699 - DNA, 1491 bp, synthetic construct
  misc_feature 1..1491: note = Description of Artificial Sequence: Synthetic coding sequence
  source 1..1491: mol_type = other DNA
atgaccttcaacagcttcgagggcagcaagacctgcgtgcccgccgacatcaacaaggaggaggagttcgtggaggagttcaaccgcctgaagaccttcgccaacttccccagcggcagccccgtgagcgccagcaccctggcccgcgccggcttcctgtacaccggcgagggcgacaccgtgcgctgcttcagctgccacgccgccgtggaccgctggcagtacggcgacagcgccgtgggccgccaccgcaaggtgagccccaactgccgcttcatcaacggcttctacctggagaacagcgccacccagagcaccaacagcggcatccagaacggccagtacaaggtggagaactacctgggcagccgcgaccacttcgccctggaccgccccagcgagacccacgccgactacctgctgcgcaccggccaggtggtggacatcagcgacaccatctacccccgcaaccccgccatgtacagcgaggaggcccgcctgaagagcttccagaactggcccgactacgcccacctgaccccccgcgagctggccagcgccggcctgtactacaccggcatcggcgaccaggtgcagtgcttctgctgcggcggcaagctgaagaactgggagccctgcgaccgcgcctggagcgagcaccgccgccacttccccaactgcttcttcgtgctgggccgcaacctgaacatccgcagcgagagcgacgccgtgagcagcgaccgcaacttccccaacagcaccaacctgccccgcaaccccagcatggccgactacgaggcccgcatcttcaccttcggcacctggatctacagcgtgaacaaggagcagctggcccgcgccggcttctacgccctgggcgagggcgacaaggtgaagtgcttccactgcggcggcggcctgaccgactggaagcccagcgaggacccctgggagcagcacgccaagtggtaccccggctgcaagtacctgctggagcagaagggccaggagtacatcaacaacatccacctgacccacagcctggaggagtgcctggtgcgcaccaccgagaagacccccagcctgacccgccgcatcgacgacaccatcttccagaaccccatggtgcaggaggccatccgcatgggcttcagcttcaaggacatcaagaagatcatggaggagaagatccagatcagcggcagcaactacaagagcctggaggtgctggtggccgacctggtgaacgcccagaaggacagcatgcaggacgagagcagccagaccagcctgcagaaggagatcagcaccgaggagcagctgcgccgcctgcaggaggagaagctgtgcaagatctgcatggaccgcaacatcgccatcgtgttcgtgccctgcggccacctggtgacctgcaagcagtgcgccgaggccgtggacaagtgccccatgtgctacaccgtgatcaccttcaagcagaagatcttcatgagc

SEQ ID NO: 4700 - DNA, 48 bp, synthetic construct
  misc_feature 1..48: note = Description of Artificial Sequence: Synthetic coding sequence
  source 1..48: mol_type = other DNA
atgaccttcaacagcttcgagggcagcaagacctgcgtgcccgccgac

SEQ ID NO: 4701 - DNA, 468 bp, synthetic construct
  misc_feature 1..468: note = Description of Artificial Sequence: Synthetic coding sequence
  source 1..468: mol_type = other DNA
atgaccttcaacagcttcgagggcagcaagacctgcgtgcccgccgacatcaacaaggaggaggagttcgtggaggagttcaaccgcctgaagaccttcgccaacttccccagcggcagccccgtgagcgccagcaccctggcccgcgccggcttcctgtacaccggcgagggcgacaccgtgcgctgcttcagctgccacgccgccgtggaccgctggcagtacggcgacagcgccgtgggccgccaccgcaaggtgagccccaactgccgcttcatcaacggcttctacctggagaacagcgccacccagagcaccaacagcggcatccagaacggccagtacaaggtggagaactacctgggcagccgcgaccacttcgccctggaccgccccagcgagacccacgccgactacctgctgcgcaccggccaggtggtggacatcagcgacaccatctacccccgc

SEQ ID NO: 4702 - RNA, 4244 nt, synthetic construct
  misc_feature 1..4244: note = Description of Artificial Sequence: Synthetic coding sequence
  source 1..4244: mol_type = other RNA
gggaaataagagagaaaagaagagtaagaagaaatataagagccaccatgctgtcgttcgtggacacacgaacccttctgcttctcgcagtgactttgtgtcttgcgacatgtcagtcgctccaagaagaaacggtgcgaaaagggcctgccggtgacaggggtcctcggggagaaagaggtccaccaggccctccgggaagggatggggaagatgggcccactggaccacccggtccgcctggacctccgggtccgcctggtttgggtggcaactttgcggcacaatatgatgggaagggagtgggacttggtccagggccgatgggacttatgggaccccgaggtccgccaggggctgcgggagccccagggccacagggttttcaaggaccggcaggggagcccggtgagcccggacagaccgggccggcgggtgctaggggaccagctgggcctcccggaaaggctggtgaagatggtcatccgggtaaacctggccgacccggtgaacgcggagtcgtcggacctcagggcgcacggggattccccggaacacccgggttgcctggtttcaagggaattcgaggccacaatggactggacgggctgaagggtcagccgggagcgccaggtgtcaagggcgaaccaggggctccgggagagaacggcacaccgggtcagactggtgccagagggttgccaggggaacggggaagggtgggtgcgcctgggccagcgggtgcacgcggaagcgatgggtcggtagggcctgtcggcccagcgggtccgattgggtccgctggtccgcctgggtttccgggtgcccctgggcccaagggcgagatcggggcagtggggaatgcgggacctgccggacccgcagggccgaggggcgaggtggggctgcccggtttgtccggaccggtaggaccaccagggaacccgggagcaaacggtctgacgggtgccaagggtgcagcgggtttgccgggagtagccggtgcgccagggcttccgggacccagaggtatccccggacccgtgggggctgcaggggccacgggagcaagaggcctcgtcggggagccgggtcctgctggctcaaaaggggaatcagggaataagggtgagcctggctcagcaggtccccaaggtccgcctggcccatcgggagaagaggggaagaggggtcccaatggagaagcggggtcagcgggaccacctgggccaccaggattgcgaggtagccctggttcacggggactccctggagcggacggtcgggctggagtaatggggccacccgggtcgagaggcgcgtcaggtcctgccggagtcaggggacccaatggtgacgccggacggccaggtgaaccgggactcatgggtccgaggggattgcctggatcaccgggcaacatcgggcctgccggtaaagagggaccggtgggacttcccggaattgacggtagaccagggcccattgggcctgctggggcacggggagagcccggaaacatcgggtttccaggccccaaaggacctactggggaccctggcaagaatggagacaaaggtcacgcagggctggcgggagccagaggggcaccgggacccgacggaaacaacggggcacaaggaccgccaggtcctcaaggggtgcagggcggaaagggtgaacagggtccgccaggcccacctggttttcagggtctgccaggtccctcgggaccggcaggagaggtggggaagccaggcgaaagagggctgcacggagagttcggactccccggtcccgcggggcccagaggcgaacggggaccaccgggagagtcgggagcggcagggcctacgggacccatcggatcgagaggaccgtccggtcctccgggaccggatggaaacaagggagaacccggagtggtgggagcagtcggaactgcgggaccaagcggtccatcggggctccctggtgagaggggagctgcgggaatcccagggggcaaaggcgagaagggcgagccaggactcaggggagaaattgggaatcctggcagggacggagcgaggggagcaccgggagcggtcggtgcacctggtccagccggagcgacgggggataggggagaagcaggggcagccggaccggctgggcctgccggtccacgagggtcacccggagaacggggagaagtcggaccagcaggtccgaacgggttcgcgggtccagcaggtgctgcgggacagccgggtgcgaaaggggagcgcggagcaaagggtcccaagggggaaaacggtgtcgtcggtccgacaggtccggtaggggcagcagggccagctggacctaatggtcctcccggaccagccggatcaagaggtgatggcggaccaccgggaatgacagggttccccggtgcagccggtcgcaccggaccaccaggtccgtcgggaatttccggtccccctggcccacccggaccggctgggaaagaggggctgagagggcctagaggggatcagggacccgtcggaagaacgggggaagtgggtgcggtcgggccaccgggattcgctggggaaaaagggccctcgggcgaggccggaaccgcaggtccacccggtacaccgggaccgcagggtctgttgggagcacccggcatccttggtctgcccggtagcagaggcgagagaggactgcctggagtcgcgggagccgtgggggagcctggaccgttggggatcgccggaccccctggggcgaggggaccgcctggtgccgtcggttcgcctggtgtcaatggagcacctggtgaggctggacgggacggtaatcccggaaacgatggtccaccgggacgagatgggcagcctggacacaagggtgagagaggttatccggggaacattggtcccgtcggtgcggcaggagcaccagggcctcacgggccagtcgggccagccggaaagcacgggaatcgaggcgagactggaccttccggtccggtggggccagcgggagctgtaggaccaaggggtcctagcggaccacagggcattcgaggggacaaaggtgaacccggtgagaaaggaccgagagggctccccggactgaagggacacaacggactccaggggttgccgggaatcgcagggcatcatggcgatcagggagcgcctggatcggtcggaccggcaggtccgcgaggacccgctgggccttcgggaccagcggggaaagatggaaggacgggtcatcccgggacagtcggtcctgccggcatccgcggaccccagggtcatcagggtccagcgggaccccctggtccacctggcccaccaggacctcccggagtgtcgggtggcgggtacgattttggttatgacggagacttctatagggcggatcagccccgatcagcgccgtcgcttcggcctaaagactatgaggtggatgcaactctcaagtcgctcaacaatcagattgaaacgctgcttacgcccgaaggctcacgcaagaatccagctagaacttgtcgggatctgagactctcacacccagagtggtcgtccggctattactggatcgaccccaatcagggatgtaccatggacgccatcaaagtgtactgcgacttttcgacgggtgagacttgcatcagggctcagcccgagaatatcccagcgaagaactggtatcggtccagcaaagacaagaagcacgtgtggttgggggaaaccatcaacgccggaagccagtttgagtacaatgtagagggggtgacgtcgaaagagatggcaacgcaactggccttcatgaggctcttggcgaattacgcgtcacagaacatcacataccattgcaaaaacagcattgcgtacatggacgaagagacagggaatttgaaaaaggccgtaatcttgcaagggtcgaacgacgtggaacttgtagcggaaggtaactcgcgcttcacatacacggtgttggtggatggatgctccaaaaagacaaacgaatggggaaagacgatcatcgaatacaaaaccaacaaaccctcacgactccctttcttggatatcgcgcctcttgacattggtggagccgaccaggaattctttgtggatattggcccagtatgcttcaaatgataagctgccttctgcggggcttgccttctggccatgcccttcttctctcccttgcacctgtacctcttggtctttgaataaagcctgagtaggaag

SEQ ID NO: 4703 - RNA, 1613 nt, synthetic construct
  misc_feature 1..1613: note = Description of Artificial Sequence: Synthetic coding sequence
  source 1..1613: mol_type = other RNA
gggaaataagagagaaaagaagagtaagaagaaatataagagccaccatggcccctgtcgcggtgtgggcggctcttgcggtaggcctcgaactctgggcggcagctcacgccctgccagcccaagtcgccttcacgccttacgcgccagaacccgggtcaacttgtcgccttagggagtattatgaccaaacggctcagatgtgttgcagcaaatgctcgccagggcagcacgcaaaagtgttttgtactaagacgtccgatacggtatgtgattcatgtgaggactccacctacactcagctttggaattgggtgcccgagtgcctgtcatgcgggtcgcgctgctcgtcggatcaggtagaaactcaagcgtgcactcgagaacagaacagaatttgtacgtgcaggcccggttggtactgcgccttgtcgaagcaggaaggctgcaggctttgtgcgccgcttcgcaagtgtaggcctggatttggagtcgcgaggccgggaaccgagacatccgacgtagtctgtaagccctgtgctccgggaacgttctccaacacaacttcgagcacggacatctgtcggccccaccagatttgcaatgtagtggcaatccccgggaacgcgtcaatggacgccgtctgtacgtccacctcgcccactagatccatggcaccgggagcagtgcatttgccgcagcccgtgtcgacgcgatcacagcacacacagcccacaccagagccttcgacagcgccgtcgacatcattcttgctgccgatggggccgtcgccgcctgccgagggctcaactggtgatgagccgaaaagctgcgacaaaacgcatacatgtccgccctgccccgctcccgaactcctcggtgggcctagcgtgtttctgttcccaccaaaaccgaaagataccttgatgatctcacggacccctgaagtgacgtgcgtggtcgtcgatgtctcgcatgaggaccccgaggtgaagtttaactggtacgtcgacggagtggaagtgcacaatgccaagaccaagcccagagaggaacagtacaactccacttacagagtcgtgtcggtactcactgtcttgcatcaggattggctgaacggaaaggagtataagtgcaaagtatcgaacaaagcgctgccagcgccgatcgagaaaacaatcagcaaagcgaagggacagcctcgcgaacctcaagtgtatacgttgccgccctcacgagaggaaatgacgaagaatcaggtcagcctcacgtgcttggtgaaaggcttctatccgagcgatattgccgtggagtgggagtccaatggtcagccagagaacaattacaagacgacaccgcctgtcttggattcggacgggagctttttcttgtactcgaaactcacggtagacaagagcagatggcaacaggggaatgtattctcgtgttcagtgatgcacgaggcgctccacaaccattatacacaaaagtcgctctcgttgtcaccgggaaagtgataagctgccttctgcggggcttgccttctggccatgcccttcttctctcccttgcacctgtacctcttggtctttgaataaagcctgagtaggaag

SEQ ID NO: 4704 - protein, 888 aa, Homo sapiens [sequence omitted]

SEQ ID NO: 4705 - protein, 835 aa, Homo sapiens
MLSRLFRMHGLFVASHPWEVIVGTVTLTICMMSMNMFTGNNKICGWNYECPKFEEDVLSSDIIILTITRCIAILYIYFQFQNLRQLGSKYILGIAGLFTIFSSFVFSTVVIHFLDKELTGLNEALPFFLLLIDLSRASTLAKFALSSNSQDEVRENIARGMAILGPTFTLDALVECLVIGVGTMSGVRQLEIMCCFGCMSVLANYFVFMTFFPACVSLVLELSRESREGRPIWQLSHFARVLEEEENKPNPVTQRVKMIMSLGLVLVHAHSRWIADPSPQNSTADTSKVSLGLDENVSKRIEPSVSLWQFYLSKMISMDIEQVITLSLALLLAVKYIFFEQTETESTLSLKNPITSPVVTQKKVPDNCCRREPMLVRNNQKCDSVEEETGINRERKVEVIKPLVAETDTPNRATFVVGNSSLLDTSSVLVTQEPEIELPREPRPNEECLQILGNAEKGAKFLSDAEIIQLVNAKHIPAYKLETLMETHERGVSIRRQLLSKKLSEPSSLQYLPYRDYNYSLLGGGASSRVLADGMTRGPVVRLPRACDSAEVKAWLETSEGFAVIKEAFDSTSRFARLQKLHTSIAGRNLYIRFQSRSGDAMGMNMISKGTEKALSKLHEYFPEMQILAVSGNYCTDKKPAAINWIEGRGKSVVCEAVIPAKVVREVLKTTTEAMIEVNINKNLVGSAMAGSIGGYNAHAANIVTAIYIACGQDAAQNVGSSNCITLMEASGPTNEDLYISCTMPSIEIGTVGGGTNLLPQQACLQMLGVQGACKDNPGENARQLARIVCGTVMAGELSLMAALAAGHLVKSHMIHNRSKINLQDLQGACTKKTA

SEQ ID NO: 4706 - protein, 265 aa, Homo sapiens
MLSRLFRMHGLFVASHPWEVIVGTVTLTICMMSMNMFTEGTEKALSKLHEYFPEMQILAVSGNYCTDKKPAAINWIEGRGKSVVCEAVIPAKVVREVLKTTTEAMIEVNINKNLVGSAMAGSIGGYNAHAANIVTAIYIACGQDAAQNVGSSNCITLMEASGPTNEDLYISCTMPSIEIGTVGGGTNLLPQQACLQMLGVQGACKDNPGENARQLARIVCGTVMAGELSLMAALAAGHLVKSHMIHNRSKINLQDLQGACTKKTA

SEQ ID NO: 4707 - protein, 18 aa, Homo sapiens
MLSRLFRMHGLFVASHPW

SEQ ID NO: 4708 - protein, 111 aa, Homo sapiens
MLSRLFRMHGLFVASHPWEVIVGTVTLTICMMSMNMFTGNNKICGWNYECPKFEEDVLSSDIIILTITRCIAILYIYFQFQNLRQLGSKYILGIAGLFTIFSSFVFSTVVI

SEQ ID NO: 4709 - protein, 888 aa, Homo sapiens [sequence omitted]

SEQ ID NO: 4710 - protein, 819 aa, Homo sapiens
MHSHPVYLLPVPEFTSTWIKIYFGYCWPFHNFLKFCIQYSCHSLLRQRIDRLEEALPFFLLLIDLSRASTLAKFALSSNSQDEVRENIARGMAILGPTFTLDALVECLVIGVGTMSGVRQLEIMCCFGCMSVLANYFVFMTFFPACVSLVLELSRESREGRPIWQLSHFARVLEEEENKPNPVTQRVKMIMSLGLVLVHAHSRWIADPSPQNSTADTSKVSLGLDENVSKRIEPSVSLWQFYLSKMISMDIEQVITLSLALLLAVKYIFFEQTETESTLSLKNPITSPVVTQKKVPDNCCRREPMLVRNNQKCDSVEEETGINRERKVEVIKPLVAETDTPNRATFVVGNSSLLDTSSVLVTQEPEIELPREPRPNEECLQILGNAEKGAKFLSDAEIIQLVNAKHIPAYKLETLMETHERGVSIRRQLLSKKLSEPSSLQYLPYRDYNYSLVMGACCENVIGYMPIPVGVAGPLCLDEKEFQVPMATTEGCLVASTNRGCRAIGLGGGASSRVLADGMTRGPVVRLPRACDSAEVKAWLETSEGFAVIKEAFDSTSRFARLQKLHTSIAGRNLYIRFQSRSGDAMGMNMISKGTEKALSKLHEYFPEMQILAVSGNYCTDKKPAAINWIEGRGKSVVCEAVIPAKVVREVLKTTTEAMIEVNINKNLVGSAMAGSIGGYNAHAANIVTAIYIACGQDAAQNVGSSNCITLMEASGPTNEDLYISCTMPSIEIGTVGGGTNLLPQQACLQMLGVQGACKDNPGENARQLARIVCGTVMAGELSLMAALAAGHLVKSHMIHNRSKINLQDLQGACTKKTA

SEQ ID NO: 4711 - protein, 556 aa, Homo sapiens
MARTTSQLYDAVPIQSSVVLCSCPSPSMVRTQTESSTPPGIPGGSRQGPAMDGTAAEPRPGAGSLQHAQPPPQPRKKRPEDFKFGKILGEGSFSTVVLARELATSREYAIKILEKRHIIKENKVPYVTRERDVMSRLDHPFFVKLYFTFQDDEKLYFGLSYAKNGELLKYIRKIGSFDETCTRFYTAEIVSALEYLHGKGIIHRDLKPENILLNEDMHIQITDFGTAKVLSPESKQARANSFVGTAQYVSPELLTEKSACKSSDLWALGCIIYQLVAGLPPFRAGNEYLIFQKIIKLEYDFPEKFFPKARDLVEKLLVLDATKRLGCEEMEGYGPLKAHPFFESVTWENLHQQTPPKLTAYLPAMSEDDEDCYGNYDNLLSQFGCMQVSSSSSSHSLSASDTGLPQRSGSNIEQYIHDLDSNSFELDLQFSEDEKRLLLEKQAGGNPWHQFVENNLILKMGPVDKRKGLFARRRQLLLTEGPHLYYVDPVNKVLKGEIPWSQELRPEAKNFKTFFVHTPNRTYYLMDPSGNAHKWCRKIQEVWRQRYQSHPDAAVQ

SEQ ID NO: 4712 - protein, 532 aa, Homo sapiens
MARTTSQLYDAVPIQSSVVLCSCPSPSMVRTQTESSTPPGIPGGSRQGPAMDGTAAEPRPGAGSLQHAQPPPQPRKKRPEDFKFGKILGEGSFSTVVLARELATSREYAIKILEKRHIIKENKVPYVTRERDVMSRLDHPFFVKLYFTFQDDEKLYFGLSYAKNGELLKYIRKIGSFDETCTRFYTAEIVSALEYLHGKGIIHRDLKPENILLNEDMHIQITDFGTAKVLSPESKQGVSDLWALGCIIYQLVAGLPPFRAGNEYLIFQKIIKLEYDFPEKFFPKARDLVEKLLVLDATKRLGCEEMEGYGPLKAHPFFESVTWENLHQQTPPKLTAYLPAMSEDDEDCYGNYDNLLSQFGCMQVSSSSSSHSLSASDTGLPQRSGSNIEQYIHDLDSNSFELDLQFSEDEKRLLLEKQAGGNPWHQFVENNLILKMGPVDKRKGLFARRRQLLLTEGPHLYYVDPVNKVLKGEIPWSQELRPEAKNFKTFFVHTPNRTYYLMDPSGNAHKWCRKIQEVWRQRYQSHPDAAVQ

SEQ ID NO: 4713 - protein, 492 aa, Homo sapiens
RAQDEGGHCWGSASGRRTLRRRRAAQRCGGGARADAGPMARTTSQLYDAVPIQSSVVLCSCPSPSMVRTQTESSTPPGIPGGSRQGPAMDGTAAEPRPGAGSLQHAQPPPQPRKKRPEDFKFGKILGEGSFSTVVLARELATSREYAIKILEKRHIIKENKVPYVTRERDVMSRLDHPFFVKLYFTFQDDEKLYFGLSYAKNGELLKYIRKIGSFDETCTRFYTAEIVSALEYLHGKGIIHRDLKPENILLNEDMHIQITDFGTAKVLSPESKQARANSFVGTAQYVSPELLTEKSACKSSDLWALGCIIYQLVAGLPPFRAGNEYLIFQKIIKLEYDFPEKFFPKARDLVEKLLVLDATKRLGCEEMEGYGPLKAHPFFESVTWENLHQQTPPKLTAYLPAMSEDDEDCYGNYDNLLSQFGCMQVSSSSSSHSLSASDTGLPQRSGSNIEQYIHDLDSNSFELDLQFSEDEKRLLLEKQAGGNPCLTGRII

SEQ ID NO: 4714 - protein, 429 aa, Homo sapiens
MARTTSQLYDAVPIQSSVVLCSCPSPSMVRTQTESSTPPGIPGGSRQGPAMDGTAAEPRPGAGSLQHAQPPPQPRKKRPEDFKFGKILGEGSFSTVVLARELATSREYATRANSFVGTAQYVSPELLTEKSACKSSDLWALGCIIYQLVAGLPPFRAGNEYLIFQKIIKLEYDFPEKFFPKARDLVEKLLVLDATKRLGCEEMEGYGPLKAHPFFESVTWENLHQQTPPKLTAYLPAMSEDDEDCYGNYDNLLSQFGCMQVSSSSSSHSLSASDTGLPQRSGSNIEQYIHDLDSNSFELDLQFSEDEKRLLLEKQAGGNPWHQFVENNLILKMGPVDKRKGLFARRRQLLLTEGPHLYYVDPVNKVLKGEIPWSQELRPEAKNFKTFFVHTPNRTYYLMDPSGNAHKWCRKIQEVWRQRYQSHPDAAVQ

SEQ ID NO: 4715 - protein, 1706 aa, Homo sapiens
MGVPKFYRWISERYPCLSEVVKEHQIPEFDNLYLDMNGIIHQCSHPNDDDVHFRISDDKIFTDIFHYLEVLFRIIKPRKVFFMAVDGVAPRAKMNQQRGRRFRSAKEAEDKIKKAIEKGETLPTEARFDSNCITPGTEFMARLHEHLKYFVNMKISTDKSWQGVTIYFSGHETPGEGEHKIMEFIRSEKAKPDHDPNTRHCLYGLDADLIMLGLTSHEAHFSLLREEVRFGGKKTQRVCAPEETTFHLLHLSLMREYIDYEFSVLKEKITFKYDIERIIDDWILMGFLVGNDFIPHLPHLHINHDALPLLYGTYVTILPELGGYINESGHLNLPRFEKYLVKLSDFDREHFSEVFVDLKWFESKVGNKYLNEAAGVAAEEARNYKEKKKLKGQENSLCWTALDKNEGEMITSKDNLEDETEDDDLFETEFRQYKRTYYMTKMGVDVVSDDFLADQAACYVQAIQWILHYYYHGVQSWSWYYPYHYAPFLSDIHNISTLKIHFELGKPFKPFEQLLAVLPAASKNLLPACYQHLMTNEDSPIIEYYPPDFKTDLNGKQQEWEAVVLIPFIDEKRLLEAMETCNHSLKKEERKRNQHSECLMCWYDRDTEFIYPSPWPEKFPAIERCCTRYKIISLDAWRVDINKNKITRIDQKALYFCGFPTLKHIRHKFFLKKSGVQVFQQSSRGENMMLEILVDAESDELTVENVASSVLGKSVFVNWPHLEEARVVAVSDGETKFYLEEPPGTQKLYSGRTAPPSKVVHLGDKEQSNWAKEVQGISEHYLRRKGIIINETSAVVYAQLLTGRKYQINQNGEVRLEKQWSKQVVPFVYQTIVKDIRAFDSRFSNIKTLDDLFPLRSMVFMLGTPYYGCTGEVQDSGDVITEGRIRVIFSIPCEPNLDALIQNQHKYSIKYNPGYVLASRLGVSGYLVSRFTGSIFIGRGSRRNPHGDHKANVGLNLKFNKKNEEVPGYTKKVGSEWMYSSAAEQLLAEYLERAPELFSYIAKNSQEDVFYEDDIWPGENENGAEKVQEIITWLKGHPVSTLSRSSCDLQILDAAIVEKIEEEVEKCKQRKNNKKVRVTVKPHLLYRPLEQQHGVIPDRDAEFCLFDRVVNVRENFSVPVGLRGTIIGIKGANREADVLFEVLFDEEFPGGLTIRCSPGRGYRLPTSALVNLSHGSRSETGNQKLTAIVKPQPAVHQHSSSSSVSSGHLGALNHSPQSLFVPTQVPTKDDDEFCNIWQSLQGSGKMQYFQPTIQEKGAVLPQEISQVNQHHKSGFNDNSVKYQQRKHDPHRKFKEECKSPKAECWSQKMSNKQPNSGIENFLASLNISKENEVQSSHHGEPPSEEHLSPQSFAMGTRMLKEILKIDGSNTVDHKNEIKQIANEIPVSSNRRDEYGLPSQPKQNKKLASYMNKPHSANEYHNVQSMDNMCWPAPSQIPPVSTPVTELSRICSLVGMPQPDFSFLRMPQTMTVCQVKLSNGLLVHGPQCHSENEAKEKAALFALQQLGSLGMNFPLPSQVFANYPSAVPPGTIPPAFPPPTGWDHYGSNYALGAANIMPSSSHLFGSMPWGPSVPVPGKPFHHTLYSGTMPMAGGIPGGVHNQFIPLQVTKKRVANKKNFENKEAQSSQATPVQTSQPDSSNIVKVSPRESSSASLKSSPIAQPASSFQVETASQGHSISHHKSTPISSSRRKSRKLAVNFGVSKPSE

SEQ ID NO: 4716 - protein, 1694 aa, Homo sapiens
MGVPKFYRWISERYPCLSEVVKEHQIPEFDNLYLDMNGIIHQCSHPNDDDVHFRISDDKIFTDIFHYLEVLFRIIKPRKVFFMAVDGVAPRAKMNQQRGRRFRSAKEAEDKIKKAIEKGETLPTEARFDSNCITPGTEFMARLHEHLKYFVNMKISTDKSWQGVTIYFSGHETPGEGEHKIMEFIRSEKAKPDHDPNTRHCLYGLDADLIMLGLTSHEAHFSLLREEVRFGGKKTQRVCAPEETTFHLLHLSLMREYIDYEFSVLKEKITFKYDIERIIDDWILMGFLVGNDFIPHLPHLHINHDALPLLYGTYVTILPELGGYINESGHLNLPRFEKYLVKLSDFDREHFSEVFVDLKWFESKVGNKYLNEAAGVAAEEARNYKEKKKLKGQENSLCWTALDKNEGEMITSKDNLEDETEDDDLFETEFRQYKRTYYMTKMGVDVVSDDFLADQAACYVQAIQWILHYYYHGVQSWSWYYPYHYAPFLSDIHNISTLKIHFELGKPFKPFEQLLAVLPAASKNLLPACYQHLMTNEDSPIIEYYPPDFKTDLNGKQQEWEAVVLIPFIDEKRLLEAMETCNHSLKKEERKRNQHSECLMCWYDRDTEFIYPSPWPEKFPAIERCCTRYKIISLDAWRVDINKNKITRIDQKALYFCGFPTLKHIRHKFFLKKSGVQVFQQSSRGENMMLEILVDAESDELTVENVASSVLGKSVFVNWPHLEEARVVAVSDGETKFYLEEPPGTQKLYSGRTAPPSKVVHLGDKEQSNWAKEVQGISEHYLRRKGIIINETSAVVYAQLLTGRKYQINQNGEVRLEKQWSKQVVPFVYQTIVKDIRAFDSRFSNIKTLDDLFPLRSMVFMLGTPYYGCTGEVQDSGDVITEGRIRVIFSIPCEPNLDALIQNQHKYSIKYNPGYVLASRLGVSGYLVSRFTGSIFIGRGSRRNPHGDHKANVGLNLKFNKKNEEVPGYTKKVGSEWMYSSAAEQLLAEYLERAPELFSYIAKNSQEDVFYEDDIWPGENENGAEKVQEIITWLKGHPVSTLSRSSCDLQILDAAIVEKIEEEVEKCKQRKNNKKVRVTVKPHLLYRPLEQQHGVIPDRDAEFCLFDRVVNVRENFSVPVGLRGTIIGIKGANREADVLFEVLFDEEFPGGLTIRCSPGRGYRLPTSALVNLSHGSRSETGNQKLTAIVKPQPAVHQHSSSSSVSSGHLGALNHSPQSLFVPTQVPTKDDDEFCNIWQSLQGSGKMQYFQPTIQEKGAVLPQEISQVNQHHKSGFNDNSVKYQQRKHDPHRKFKEECKSPKAECWSQKMSNKQPNSGIENFLASLNISKENEVQSSHHGEPPSEEHLSPQSFAMKGTRMLKEILKIDGSNTVDHKNEIKQIANEIPVSSNRRDEYGLPSQPKQNKKLASYMNKPHSANEYHNVQSMDNMCWPAPSQIPPVSTPVTELSRICSLVGMPQPDFSFLRMPQTMTVCQVKLSNGLLVHGPQCHSENEAKEKAALFALQQLGSLGMNFPLPSQVFANYPSAVPPGTIPPAFPPPTANIMPSSSHLFGSMPWGPSVPVPGKPFHHTLYSGTMPMAGGIPGGVHNQFIPLQVTKKRVANKKNFENKEAQSSQATPVQTSQPDSSNIVKVSPRESSSASLKSSPIAQPASSFQVETASQGHSISHHKSTPISSSRRKSRKLAVNFGVSKPSE

SEQ ID NO: 4717 - protein, 459 aa, Homo sapiens
MGVPKFYRWISERYPCLSEVVKEHQIPEFDNLYLDMNGIIHQCSHPNDDDVHFRISDDKIFTDIFHYLEVLFRIIKPRKVFFMAVDGVAPRAKMNQQRGRRFRSAKEAEDKIKKAIEKGETLPTEARFDSNCITPGTEFMARLHEHLKYFVNMKISTDKSWQGVTIYFSGHETPGEGEHKIMEFIRSEKAKPDHDPNTRHCLYGLDADLIMLGLTSHEAHFSLLREEVRFGGKKTQRVCAPEETTFHLLHLSLMREYIDYEFSVLKEKITFKYDIERIIDDWILMGFLVGNDFIPHLPHLHINHDALPLLYGTYVTILPELGGYINESGHLNLPRFEKYLVKLSDFDREHFSEVFVDLKWFESKVGNKYLNEAAGVAAEEARNYKEKKKLKGQENSLCWTALDKNEGEMITSKDNLEDETEDDDLFETEFRQYKRTYYMTKMGVDVVSEYVFANAFILK

SEQ ID NO: 4718 - protein, 249 aa, Homo sapiens
MLGLTSHEAHFSLLREEVRFGGKKTQRVCAPEETTFHLLHLSLMREYIDYEFSVLKEKITFKYDIERIIDDWILMGFLVGNDFIPHLPHLHINHDALPLLYGTYVTILPELGGYINESGHLNLPRFEKYLVKLSDFDREHFSEVFVDLKWFESKVGNKYLNEAAGVAAEEARNYKEKKKLKGQENSLCWTALDKNEGEMITSKDNLEDETEDDDLFETEFRQYKRTYYMTKMGVDVVSEYVFANAFILK

SEQ ID NO: 4719 - protein, 1160 aa, Homo sapiens
  VARIANT 1: note = MOD_RES - Any amino acid
XTNEDSPIIEYYPPDFKTDLNGKQQEWEAVVLIPFIDERLLEAMETCNHSLKKEERKRNQHSECLMCWYDRDTEFIYPSPWPEKFPAIERCCTRYKIISLDAWRVDINKNKITRIDQKALYFCGFPTLKHIRHKFFLKKSGVQVFQQSSRGENMMLEILVDAESDELTVENVASSVLGKSVFVNWPHLEEARVVAVSDGETKFYLEEPPGTQKLYSGRTAPPSKVVHLGDKEQSNWAKEVQGISEHYLRRKGIIINETSAVVYAQLLTGRKYQINQNGEVRLEKQWSKQVVPFVYQTIVKDIRAFDSRFSNIKTLDDLFPLRSMVFMLGTPYYGCTGEVQDSGDVITEGRIRVIFSIPCEPNLDALIQNQHKYSIKYNPGYVLASRLGVSGYLVSRFTGSIFIGRGSRRNPHGDHKANVGLNLKFNKKNEEVPGYTKKVGSEWMYSSAAEQLLAEYLERAPELFSYIAKNSQEDVFYEDDIWPGENENGAEKVQEIITWLKGHPVSTLSRSSCDLQILDAAIVEKIEEEVEKCKQRKNNKKVRVTVKPHLLYRPLEQQHGVIPDRDAEFCLFDRVVNVRENFSVPVGLRGTIIGIKGANREADVLFEVLFDEEFPGGLTIRCSPGRGYRLPTSALVNLSHGSRSETGNQKLTAIVKPQPAVHQHSSSSSVSSGHLGALNHSPQSLFVPTQVPTKDDDEFCNIWQSLQGSGKMQYFQPTIQEKGAVLPQEISQVNQHHKSGFNDNSVKYQQRKHDPHRKFKEECKSPKAECWSQKMSNKQPNSGIENFLASLNISKENEVQSSHHGEPPSEEHLSPQSFAMKGTRMLKEILKIDGSNTVDHKNEIKQIANEIPVSSNRRDEYGLPSQPKQNKKLASYMNKPHSANEYHNVQSMDNMCWPAPSQIPPVSTPVTELSRICSLVGMPQPDFSFLRMPQTMTVCQVKLSNGLLVHGPQCHSENEAKEKAALFALQQLGSLGMNFPLPSQVFANYPSAVPPGTIPPAFPPPTANIMPSSSHLFGSMPWGPSVPVPGKPFHHTLYSGTMPMAGGIPGGVHNQFIPLQVTKKRVANKKNFENKEAQSSQATPVQTSQPDSSNIVKVSPRESSSASLKSSPIAQPASSFQVETASQGHSISHHKSTPISSSRRKSRKLAVNFGVSKPSE

SEQ ID NO: 4720 - protein, 410 aa, Homo sapiens
MPARALLPRRMGHRTLASTPALWASIPCPRSELRLDLVLPSGQSFRWREQSPAHWSGVLADQVWTLTQTEEQLHCTVYRGDKSQASRPTPDELEAVRKYFQLDVTLAQLYHHWGSVDSHFQEVAQKFQGVRLLRQDPIECLFSFICSSNNNIARITGMVERLCQAFGPRLIQLDDVTYHGFPSLQALAGPEVEAHLRKLGLGYRARYVSASARAILEEQGGLAWLQQLRESSYEEAHKALCILPGVGTKVADCICLMALDKPQAVPVDVHMWHIAQRDYSWHPTTSQAKGPSPQTNKELGNFFRSLWGPYAGWAQATPPSYRCCSVPTCANPAMLRSHQQSAERVPKGRKARWGTLDKEIPQAPSPPFPTSLSPSPPSLMLGRGLPVTTSKARHPQIKQSVCTTRWGGGY

SEQ ID NO: 4721 - protein, 356 aa, Homo sapiens
MPARALLPRRMGHRTLASTPALWASIPCPRSELRLDLVLPSGQSFRWREQSPAHWSGVLADQVWTLTQTEEQLHCTVYRGDKSQASRPTPDELEAVRKYFQLDVTLAQLYHHWGSVDSHFQEVAQKFQGVRLLRQDPIECLFSFICSSNNNIARITGMVERLCQAFGPRLIQLDDVTYHGFPSLQALAGPEVEAHLRKLGLGYRARYVSASARAILEEQGGLAWLQQLRESSYEEAHKALCILPGVGTKVADCICLMALDKPQAVPVDVHMWHIAQRDYSWHPTTSQAKGPSPQTNKELGNFFRSLWGPYAGWAQALCQVITTFMTFLGPHRLDQMPPEELQTSSSRLGGPPWQCI

SEQ ID NO: 4722 - protein, 424 aa, Homo sapiens
MPARALLPRRMGHRTLASTPALWASIPCPRSELRLDLVLPSGQSFRWREQSPAHWSGVLADQVWTLTQTEEQLHCTVYRGDKSQASRPTPDELEAVRKYFQLDVTLAQLYHHWGSVDSHFQEVAQKFQGVRLLRQDPIECLFSFICSSNNNIARITGMVERLCQAFGPRLIQLDDVTYHGFPSLQALAGPEVEAHLRKLGLGYRARYVSASARAILEEQGGLAWLQQLRESSYEEAHKALCILPGVGTKVADCICLMALDKPQAVPVDVHMWHIAQRDYSWHPTTSQAKGPSPQTNKELGNFFRSLWGPYAGWAQAGLLGNAFDGHQLLRPLIFCQDHLREGPPIGRGDSQGEELEPQLPSSLSSIPYGFCDHCWTKDVDDPPLVTHPSPGSRDGHMTQAWPVKVVSPLATVIGHVMQASLLAL

SEQ ID NO: 4723 - protein, 324 aa, Homo sapiens
MPARALLPRRMGHRTLASTPALWASIPCPRSELRLDLVLPSGQSFRWREQSPAHWSGVLADQVWTLTQTEEQLHCTVYRGDKSQASRPTPDELEAVRKYFQLDVTLAQLYHHWGSVDSHFQEVAQKFQGVRLLRQDPIECLFSFICSSNNNIARITGMVERLCQAFGPRLIQLDDVTYHGFPSLQALAGPEVEAHLRKLGLGYRARYVSASARAILEEQGGLAWLQQLRESSYEEAHKALCILPGVGTKVADCICLMALDKPQAVPVDVHMWHIAQRDYSWHPTTSQAKGPSPQTNKELGNFFRSLWGPYAGWAQAVSVPRCPP

SEQ ID NO: 4724 - protein, 197 aa, Homo sapiens
MVERLCQAFGPRLIQLDDVTYHGFPSLQALAGPEVEAHLRKLGLGYRARYVSASARAILEEQGGLAWLQQLRESSYEEAHKALCILPGVGTKETFSGACGDLMLAGPKRCCSVPTCANPAMLRSHQQSAERVPKGRKARWGTLDKEIPQAPSPPFPTSLSPSPPSLMLGRGLPVTTSKARHPQIKQSVCTTRWGGGY

SEQ ID NO: 4725 - protein, 345 aa, Homo sapiens
MPARALLPRRMGHRTLASTPALWASIPCPRSELRLDLVLPSGQSFRWREQSPAHWSGVLADQVWTLTQTEEQLHCTVYRGDKSQASRPTPDELEAVRKYFQLDVTLAQLYHHWGSVDSHFQEVAQKFQGVRLLRQDPIECLFSFICSSNNNIARITGMVERLCQAFGPRLIQLDDVTYHGFPSLQALAGPEVEAHLRKLGLGYRARYVSASARAILEEQGGLAWLQQLRESSYEEAHKALCILPGVGTKVADCICLMALDKPQAVPVDVHMWHIAQRDYSWHPTTSQAKGPSPQTNKELGNFFRSLWGPYAGWAQAVLFSADLRQSRHAQEPPAKRRKGSKGPEG

SEQ ID NO: 4726 - protein, 357 aa, Homo sapiens
MPARALLPRRMGHRTLASTPALWASIPCPRSELRLDLVLPSGQSFRWREQSPAHWSGVLADQVWTLTQTEEQLHCTVYRGDKSQASRPTPDELEAVRKYFQLDVTLAQLYHHWGSVDSHFQEVAQKFQGVRLLRQDPIECLFSFICSSNNNIARITGMVERLCQAFGPRLIQLDDVTYHGFPSLQALAGPEVEAHLRKLGLGYRARYVSASARAILEEQGGLAWLQQLRESSYEEAHKALCILPGVGTKGLLGNAFDGHQLLRPLIFCQDHLREGPPIGRGDSQGEELEPQLPSSLSSIPYGFCDHCWTKDVDDPPLVTHPSPGSRDGHMTQAWPVKVVSPLATVIGHVMQASLLAL

SEQ ID NO: 4727 - protein, 195 aa, Homo sapiens
MPARALLPRRMGHRTLASTPALWASIPCPRSELRLDLVLPSGQSFRWREQSPAHWSGVLADQVWTLTQTEEQLHCTVYRGDKSQASRPTPDELEAVRKYFQLDVTLAQLYHHWGSVDSHFQEVAQKFQGVRLLRQDPIECLFSFICSSNNNIARITGMVERLCQAFGPRLIQLDDVTYHGFPSLQALAGPPWQCI

SEQ ID NO: 4728 - protein, 322 aa, Homo sapiens
MPARALLPRRMGHRTLASTPALWASIPCPRSELRLDLVLPSGQSFRWREQSPAHWSGVLADQVWTLTQTEEQLHCTVYRGDKSQASRPTPDELEAVRKYFQLDVTLAQLYHHWGSVDSHFQEVAQKFQGVRLLRQDPIECLFSFICSSNNNIARITGMVERLCQAFGPRLIQLDDVTYHGFPSLQALAGPEVEAHLRKLGLGYRARYVSASARAILEEQGGLAWLQQLRESSYEEAHKALCILPGVGTKVADCICLMALDKPQAVPVDVHMWHIAQRDYSWHPTTSQAKGPSPQTNKELGNFFRSLWGPYAGWAQAAGSDAS

SEQ ID NO: 4729 - protein, 2268 aa, Homo sapiens
MSGLHLVKQGRDRKKIDSQRDFTVASPAEFVTRFGGNKVIEKVLIANNGIAAVKCMRSIRRWSYEMFRNERAIRFVVMVTPEDLKANAEYIKMADHYVPVPGGPNNNNYANVELILDIAKRIPVQAVWAGWGHASENPKLPELLLKNGIAFMGPPSQAMWALGDKIASSIVAQTAGIPTLPWSGSGLRVDWQENDFSKRILNVPQELYEKGYVKDVDDGLQAAEEVGYPVMIKASEGGGGKGIRKVNNADDFPNLFRQVQAEVPGSPIFVMRLAKQSRHLEVQILADQYGNAISLFGRDCSVQRRHQKIIEEAPATIATPAVFEHMEQCAVKLAKMVGYVSAGTVEYLYSQDGSFYFLELNPRLQVEHPCTEMVADVNLPAAQLQIAMGIPLYRIKDIRMMYGVSPWGDSPIDFEDSAHVPCPRGHVIAARITSENPDEGFKPSSGTVQELNFRSNKNVWGYFSVAAAGGLHEFADSQFGHCFSWGENREEAISNMVVALKELSIRGDFRTTVEYLIKLLETESFQMNRIDTGWLDRLIAEKVQAERPDTMLGVVCGALHVADVSLRNSVSNFLHSLERGQVLPAHTLLNTVDVELIYEGVKYVLKVTRQSPNSYVVIMNGSCVEVDVHRLSDGGLLLSYDGSSYTTYMKEEVDRYRITIGNKTCVFEKENDPSVMRSPSAGKLIQYIVEDGGHVFAGQCYAEIEVMKMVMTLTAVESGCIHYVKRPGAALDPGCVLAKMQLDNPSKVQQAELHTGSLPRIQSTALRGEKLHRVFHYVLDNLVNVMNGYCLPDPFFSSKVKDWVERLMKTLRDPSLPLLELQDIMTSVSGRIPPNVEKSIKKEMAQYASNITSVLCQFPSQQIANILDSHAATLNRKSEREVFFMNTQSIVQLVQRYRSGIRGHMKAVVMDLLRQYLRVETQFQNGHYDKCVFALREENKSDMNTVLNYIFSHAQVTKKNLLVTMLIDQLCGRDPTLTDELLNILTELTQLSKTTNAKVALRARQVLIASHLPSYELRHNQVESIFLSAIDMYGHQFCIENLQKLILSETSIFDVLPNFFYHSNQVVRMAALEVYVRRAYIAYELNSVQHRQLKDNTCVVEFQFMLPTSHPNRGNIPTLNRMSFSSNLNHYGMTHVASVSDVLLDNSFTPPCQRMGGMVSFRTFEDFVRIFDEVMGCFSDSPPQSPTFPEAGHTSLYDEDKVPRDEPIHILNVAIKTDCDIEDDRLAAMFREFTQQNKATLVDHGIRRLTFLVAQKDFRKQVNYEVDRRFHREFPKFFTFRARDKFEEDRIYRHLEPALAFQLELNRMRNFDLTAIPCANHKMHLYLGAAKVEVGTEVTDYRFFVRAIIRHSDLVTKEASFEYLQNEGERLLLEAMDELEVAFNNTNVRTDCNHIFLNFVPTVIMDPSKIEESVRSMVMRYGSRLWKLRVLQAELKINIRLTPTGKAIPIRLFLTNESGYYLDISLYKEVTDSRTAQIMFQAYGDKQGPLHGMLINTPYVTKDLLQSKRFQAQSLGTTYIYDIPEMFRQSLIKLWESMSTQAFLPSPPLPSDMLTYTELVLDDQGQLVHMNRLPGGNEIGMVAWKMTFKSPEYPEGRDIIVIGNDITYRIGSFGPQEDLLFLRASELARAEGIPRIYVSANSGARIGLAEEIRHMFHVAWVDPEDPYKGYRYLYLTPQDYKRVSALNSVHCEHVEDEGESRYKITDIIGKEEGIGPENLRGSGMIAGESSLAYNEIITISLVTCRAIGIGAYLVRLGQRTIQVENSHLILTGAGALNKVLGREVYTSNNQLGGIQIMHNNGVTHCTVCDDFEGVFTVLHWLSYMPKSVHSSVPLLNSKDPIDRIIEFVPTKTPYDPRWMLAGRPHPTQKGQWLSGFFDYGSFSEIMQPWAQTVVVGRARLGGIPVGVVAVETRTVELSIPADPANLDSEAKIIQQAGQVWFPDSAFKTYQAIKDFNREGLPLMVFANWRGFSGGMKDMYDQVLKFGAYIVDGLRECCQPVLVYIPPQAELRGGSWVVIDSSINPRHMEMYADRESRGSVLEPEGTVEIKFRRKDLVKTMRRVDPVYIHLAERLGTPELSTAERKELENKLKEREEFLIPIYHQVAVQFADLHDTPGRMQEKGVISDILDWKTSRTFFYWRLRRLLLEDLVKKKIHNANPELTDGQIQAMLRRWFVEVEGTVKAYVWDNNKDLAEWLEKQLTEEDGVHSVIEENIKCISRDYVLKQIRSLVQANPEVAMDSIIHMTQHISPTQRAEVIRILSTMDSPST

SEQ ID NO: 4730 - protein, 2383 aa, Homo sapiens
MWWSTLMSILRARSFWKWISTQTVRIIRAVRAHFGGIMDEPSPLAQPLELNQHSRFIIGSVSEDNSEDEISNLVKLDLLEEKEGSLSPASVGSDTLSDLGISSLQDGLALHIRSSMSGLHLVKQGRDRKKIDSQRDFTVASPAEFVTRFGGNKVIEKVLIANNGIAAVKCMRSIRRWSYEMFRNERAIRFVVMVTPEDLKANAEYIKMADHYVPVPGGPNNNNYANVELILDIAKRIPVQAVWAGWGHASENPKLPELLLKNGIAFMGPPSQAMWALGDKIASSIVAQTAGIPTLPWSGSGLRVDWQENDFSKRILNVPQELYEKGYVKDVDDGLQAAEEVGYPVMIKASEGGGGKGIRKVNNADDFPNLFRQVQAEVPGSPIFVMRLAKQSRHLEVQILADQYGNAISLFGRDCSVQRRHQKIIEEAPATIATPAVFEHMEQCAVKLAKMVGYVSAGTVEYLYSQDGSFYFLELNPRLQVEHPCTEMVADVNLPAAQLQIAMGIPLYRIKDIRMMYGVSPWGDSPIDFEDSAHVPCPRGHVIAARITSENPDEGFKPSSGTVQELNFRSNKNVWGYFSVAAAGGLHEFADSQFGHCFSWGENREEAISNMVVALKELSIRGDFRTTVEYLIKLLETESFQMNRIDTGWLDRLIAEKVQAERPDTMLGVVCGALHVADVSLRNSVSNFLHSLERGQVLPAHTLLNTVDVELIYEGVKYVLKVTRQSPNSYVVIMNGSCVEVDVHRLSDGGLLLSYDGSSYTTYMKEEVDRYRITIGNKTCVFEKENDPSVMRSPSAGKLIQYIVEDGGHVFAGQCYAEIEVMKMVMTLTAVESGCIHYVKRPGAALDPGCVLAKMQLDNPSKVQQAELHTGSLPRIQSTALRGEKLHRVFHYVLDNLVNVMNGYCLPDPFFSSKVKDWVERLMKTLRDPSLPLLELQDIMTSVSGRIPPNVEKSIKKEMAQYASNITSVLCQFPSQQIANILDSHAATLNRKSEREVFFMNTQSIVQLVQRYRSGIRGHMKAVVMDLLRQYLRVETQFQNGHYDKCVFALREENKSDMNTVLNYIFSHAQVTKKNLLVTMLIDQLCGRDPTLTDELLNILTELTQLSKTTNAKVALRARQVLIASHLPSYELRHNQVESIFLSAIDMYGHQFCIENLQKLILSETSIFDVLPNFFYHSNQVVRMAALEVYVRRAYIAYELNSVQHRQLKDNTCVVEFQFMLPTSHPNRGNIPTLNRMSFSSNLNHYGMTHVASVSDVLLDNSFTPPCQRMGGMVSFRTFEDFVRIFDEVMGCFSDSPPQSPTFPEAGHTSLYDEDKVPRDEPIHILNVAIKTDCDIEDDRLAAMFREFTQQNKATLVDHGIRRLTFLVAQKDFRKQVNYEVDRRFHREFPKFFTFRARDKFEEDRIYRHLEPALAFQLELNRMRNFDLTAIPCANHKMHLYLGAAKVEVGTEVTDYRFFVRAIIRHSDLVTKEASFEYLQNEGERLLLEAMDELEVAFNNTNVRTDCNHIFLNFVPTVIMDPSKIEESVRSMVMRYGSRLWKLRVLQAELKINIRLTPTGKAIPIRLFLTNESGYYLDISLYKEVTDSRTAQIMFQAYGDKQGPLHGMLINTPYVTKDLLQSKRFQAQSLGTTYIYDIPEMFRQSLIKLWESMSTQAFLPSPPLPSDMLTYTELVLDDQGQLVHMNRLPGGNEIGMVAWKMTFKSPEYPEGRDIIVIGNDITYRIGSFGPQEDLLFLRASELARAEGIPRIYVSANSGARIGLAEEIRHMFHVAWVDPEDPYKGYRYLYLTPQDYKRVSALNSVHCEHVEDEGESRYKITDIIGKEEGIGPENLRGSGMIAGESSLAYNEIITISLVTCRAIGIGAYLVRLGQRTIQVENSHLILTGAGALNKVLGREVYTSNNQLGGIQIMHNNGVTHCTVCDDFEGVFTVLHWLSYMPKSVHSSVPLLNSKDPIDRIIEFVPTKTPYDPRWMLAGRPHPTQKGQWLSGFFDYGSFSEIMQPWAQTVVVGRARLGGIPVGVVAVETRTVELSIPADPANLDSEAKIIQQAGQVWFPDSAFKTYQAIKDFNREGLPLMVFANWRGFSGGMKDMYDQVLKFGAYIVDGLRECCQPVLVYIPPQAELRGGSWVVIDSSINPRHMEMYADRESRGSVLEPEGTVEIKFRRKDLVKTMRRVDPVYIHLAERLGTPELSTAERKELENKLKEREEFLIPIYHQVAVQFADLHDTPGRMQEKGVISDILDWKTSRTFFYWRLRRLLLEDLVKKKIHNANPELTDGQIQAMLRRWFVEVEGTVKAYVWDNNKDLAEWLEKQLTEEDGVHSVIEENIKCISRDYVLKQIRSLVQANPEVAMDSIIHMTQHISPTQRAEVIRILSTMDSPST

SEQ ID NO: 4731 - protein, 2288 aa, Homo sapiens
MEGSPEENKEMRYYMLQRSSMSGLHLVKQGRDRKKIDSQRDFTVASPAEFVTRFGGNKVIEKVLIANNGIAAVKCMRSIRRWSYEMFRNERAIRFVVMVTPEDLKANAEYIKMADHYVPVPGGPNNNNYANVELILDIAKRIPVQAVWAGWGHASENPKLPELLLKNGIAFMGPPSQAMWALGDKIASSIVAQTAGIPTLPWSGSGLRVDWQENDFSKRILNVPQELYEKGYVKDVDDGLQAAEEVGYPVMIKASEGGGGKGIRKVNNADDFPNLFRQVQAEVPGSPIFVMRLAKQSRHLEVQILADQYGNAISLFGRDCSVQRRHQKIIEEAPATIATPAVFEHMEQCAVKLAKMVGYVSAGTVEYLYSQDGSFYFLELNPRLQVEHPCTEMVADVNLPAAQLQIAMGIPLYRIKDIRMMYGVSPWGDSPIDFEDSAHVPCPRGHVIAARITSENPDEGFKPSSGTVQELNFRSNKNVWGYFSVAAAGGLHEFADSQFGHCFSWGENREEAISNMVVALKELSIRGDFRTTVEYLIKLLETESFQMNRIDTGWLDRLIAEKVQAERPDTMLGVVCGALHVADVSLRNSVSNFLHSLERGQVLPAHTLLNTVDVELIYEGVKYVLKVTRQSPNSYVVIMNGSCVEVDVHRLSDGGLLLSYDGSSYTTYMKEEVDRYRITIGNKTCVFEKENDPSVMRSPSAGKLIQYIVEDGGHVFAGQCYAEIEVMKMVMTLTAVESGCIHYVKRPGAALDPGCVLAKMQLDNPSKVQQAELHTGSLPRIQSTALRGEKLHRVFHYVLDNLVNVMNGYCLPDPFFSSKVKDWVERLMKTLRDPSLPLLELQDIMTSVSGRIPPNVEKSIKKEMAQYASNITSVLCQFPSQQIANILDSHAATLNRKSEREVFFMNTQSIVQLVQRYRSGIRGHMKAVVMDLLRQYLRVETQFQNGHYDKCVFALREENKSDMNTVLNYIFSHAQVTKKNLLVTMLIDQLCGRDPTLTDELLNILTELTQLSKTTNAKVALRARQVLIASHLPSYELRHNQVESIFLSAIDMYGHQFCIENLQKLILSETSIFDVLPNFFYHSNQVVRMAALEVYVRRAYIAYELNSVQHRQLKDNTCVVEFQFMLPTSHPNRGNIPTLNRMSFSSNLNHYGMTHVASVSDVLLDNSFTPPCQRMGGMVSFRTFEDFVRIFDEVMGCFSDSPPQSPTFPEAGHTSLYDEDKVPRDEPIHILNVAIKTDCDIEDDRLAAMFREFTQQNKATLVDHGIRRLTFLVAQKDFRKQVNYEVDRRFHREFPKFFTFRARDKFEEDRIYRHLEPALAFQLELNRMRNFDLTAIPCANHKMHLYLGAAKVEVGTEVTDYRFFVRAIIRHSDLVTKEASFEYLQNEGERLLLEAMDELEVAFNNTNVRTDCNHIFLNFVPTVIMDPSKIEESVRSMVMRYGSRLWKLRVLQAELKINIRLTPTGKAIPIRLFLTNESGYYLDISLYKEVTDSRTAQIMFQAYGDKQGPLHGMLINTPYVTKDLLQSKRFQAQSLGTTYIYDIPEMFRQSLIKLWESMSTQAFLPSPPLPSDMLTYTELVLDDQGQLVHMNRLPGGNEIGMVAWKMTFKSPEYPEGRDIIVIGNDITYRIGSFGPQEDLLFLRASELARAEGIPRIYVSANSGARIGLAEEIRHMFHVAWVDPEDPYKGYRYLYLTPQDYKRVSALNSVHCEHVEDEGESRYKITDIIGKEEGIGPENLRGSGMIAGESSLAYNEIITISLVTCRAIGIGAYLVRLGQRTIQVENSHLILTGAGALNKVLGREVYTSNNQLGGIQIMHNNGVTHCTVCDDFEGVFTVLHWLSYMPKSVHSSVPLLNSKDPIDRIIEFVPTKTPYDPRWMLAGRPHPTQKGQWLSGFFDYGSFSEIMQPWAQTVVVGRARLGGIPVGVVAVETRTVELSIPADPANLDSEAKIIQQAGQVWFPDSAFKTYQAIKDFNREGLPLMVFANWRGFSGGMKDMYDQVLKFGAYIVDGLRECCQPVLVYIPPQAELRGGSWVVIDSSINPRHMEMYADRESRGSVLEPEGTVEIKFRRKDLVKTMRRVDPVYIHLAERLGTPELSTAERKELENKLKEREEFLIPIYHQVAVQFADLHDTPGRMQEKGVISDILDWKTSRTFFYWRLRRLLLEDLVKKKIHNANPELTDGQIQAMLRRWFVEVEGTVKAYVWDNNKDLAEWLEKQLTEEDGVHSVIEENIKCISRDYVLKQIRSLVQANPEVAMDSIIHMTQHISPTQRAEVIRILSTMDSPST

SEQ ID NO: 4732 - protein, 472 aa, Homo sapiens [sequence omitted]

SEQ ID NO: 4733 - protein, 42 aa, Homo sapiens
MSGLHLVKQGRDRKKIDSQRDFTVASPAEFVTRFGGNKVIEK

SEQ ID NO: 4734 - protein, 2346 aa, Homo sapiens
MDEPSPLAQPLELNQHSRFIIGSVSEDNSEDEISNLVKLDLLEEKEGSLSPASVGSDTLSDLGISSLQDGLALHIRSSMSGLHLVKQGRDRKKIDSQRDFTVASPAEFVTRFGGNKVIEKVLIANNGIAAVKCMRSIRRWSYEMFRNERAIRFVVMVTPEDLKANAEYIKMADHYVPVPGGPNNNNYANVELILDIAKRIPVQAVWAGWGHASENPKLPELLLKNGIAFMGPPSQAMWALGDKIASSIVAQTAGIPTLPWSGSGLRVDWQENDFSKRILNVPQELYEKGYVKDVDDGLQAAEEVGYPVMIKASEGGGGKGIRKVNNADDFPNLFRQVQAEVPGSPIFVMRLAKQSRHLEVQILADQYGNAISLFGRDCSVQRRHQKIIEEAPATIATPAVFEHMEQCAVKLAKMVGYVSAGTVEYLYSQDGSFYFLELNPRLQVEHPCTEMVADVNLPAAQLQIAMGIPLYRIKDIRMMYGVSPWGDSPIDFEDSAHVPCPRGHVIAARITSENPDEGFKPSSGTVQELNFRSNKNVWGYFSVAAAGGLHEFADSQFGHCFSWGENREEAISNMVVALKELSIRGDFRTTVEYLIKLLETESFQMNRIDTGWLDRLIAEKVQAERPDTMLGVVCGALHVADVSLRNSVSNFLHSLERGQVLPAHTLLNTVDVELIYEGVKYVLKVTRQSPNSYVVIMNGSCVEVDVHRLSDGGLLLSYDGSSYTTYMKEEVDRYRITIGNKTCVFEKENDPSVMRSPSAGKLIQYIVEDGGHVFAGQCYAEIEVMKMVMTLTAVESGCIHYVKRPGAALDPGCVLAKMQLDNPSKVQQAELHTGSLPRIQSTALRGEKLHRVFHYVLDNLVNVMNGYCLPDPFFSSKVKDWVERLMKTLRDPSLPLLELQDIMTSVSGRIPPNVEKSIKKEMAQYASNITSVLCQFPSQQIANILDSHAATLNRKSEREVFFMNTQSIVQLVQRYRSGIRGHMKAVVMDLLRQYLRVETQFQNGHYDKCVFALREENKSDMNTVLNYIFSHAQVTKKNLLVTMLIDQLCGRDPTLTDELLNILTELTQLSKTTNAKVALRARQVLIASHLPSYELRHNQVESIFLSAIDMYGHQFCIENLQKLILSETSIFDVLPNFFYHSNQVVRMAALEVYVRRAYIAYELNSVQHRQLKDNTCVVEFQFMLPTSHPNRGNIPTLNRMSFSSNLNHYGMTHVASVSDVLLDNSFTPPCQRMGGMVSFRTFEDFVRIFDEVMGCFSDSPPQSPTFPEAGHTSLYDEDKVPRDEPIHILNVAIKTDCDIEDDRLAAMFREFTQQNKATLVDHGIRRLTFLVAQKDFRKQVNYEVDRRFHREFPKFFTFRARDKFEEDRIYRHLEPALAFQLELNRMRNFDLTAIPCANHKMHLYLGAAKVEVGTEVTDYRFFVRAIIRHSDLVTKEASFEYLQNEGERLLLEAMDELEVAFNNTNVRTDCNHIFLNFVPTVIMDPSKIEESVRSMVMRYGSRLWKLRVLQAELKINIRLTPTGKAIPIRLFLTNESGYYLDISLYKEVTDSRTAQIMFQAYGDKQGPLHGMLINTPYVTKDLLQSKRFQAQSLGTTYIYDIPEMFRQSLIKLWESMSTQAFLPSPPLPSDMLTYTELVLDDQGQLVHMNRLPGGNEIGMVAWKMTFKSPEYPEGRDIIVIGNDITYRIGSFGPQEDLLFLRASELARAEGIPRIYVSANSGARIGLAEEIRHMFHVAWVDPEDPYKGYRYLYLTPQDYKRVSALNSVHCEHVEDEGESRYKITDIIGKEEGIGPENLRGSGMIAGESSLAYNEIITISLVTCRAIGIGAYLVRLGQRTIQVENSHLILTGAGALNKVLGREVYTSNNQLGGIQIMHNNGVTHCTVCDDFEGVFTVLHWLSYMPKSVHSSVPLLNSKDPIDRIIEFVPTKTPYDPRWMLAGRPHPTQKGQWLSGFFDYGSFSEIMQPWAQTVVVGRARLGGIPVGVVAVETRTVELSIPADPANLDSEAKIIQQAGQVWFPDSAFKTYQAIKDFNREGLPLMVFANWRGFSGGMKDMYDQVLKFGAYIVDGLRECCQPVLVYIPPQAELRGGSWVVIDSSINPRHMEMYADRESRGSVLEPEGTVEIKFRRKDLVKTMRRVDPVYIHLAERLGTPELSTAERKELENKLKEREEFLIPIYHQVAVQFADLHDTPGRMQEKGVISDILDWKTSRTFFYWRLRRLLLEDLVKKKIHNANPELTDGQIQAMLRRWFVEVEGTVKAYVWDNNKDLAEWLEKQLTEEDGVHSVIEENIKCISRDYVLKQIRSLVQANPEVAMDSIIHMTQHISPTQRAEVIRILSTMDSPST

SEQ ID NO: 4735 - protein, 42 aa, Homo sapiens; identical to SEQ ID NO: 4733

SEQ ID NO: 4736 - protein, 77 aa, Homo sapiens
MDEPSPLAQPLELNQHSRFIIGSVSEDNSEDEISNLVKLDLLEEKEGSLSPASVGSDTLSDLGISSLQDGLALHIRL

SEQ ID NO: 4737 - protein, 1045 aa, Homo sapiens
MGCFSDSPPQSPTFPEAGHTSLYDEDKVPRDEPIHILNVAIKTDCDIEDDRLAAMFREFTQQNKATLVDHGIRRLTFLVAQKDFRKQVNYEVDRRFHREFPKFFTFRARDKFEEDRIYRHLEPALAFQLELNRMRNFDLTAIPCANHKMHLYLGAAKVEVGTEVTDYRFFVRAIIRHSDLVTKEASFEYLQNEGERLLLEAMDELEVAFNNTNVRTDCNHIFLNFVPTVIMDPSKIEESVRSMVMRYGSRLWKLRVLQAELKINIRLTPTGKAIPIRLFLTNESGYYLDISLYKEVTDSRTAQIMFQAYGDKQGPLHGMLINTPYVTKDLLQSKRFQAQSLGTTYIYDIPEMFRQIGMVAWKMTFKSPEYPEGRDIIVIGNDITYRIGSFGPQEDLLFLRASELARAEGIPRIYVSANSGARIGLAEEIRHMFHVAWVDPEDPYKGYRYLYLTPQDYKRVSALNSVHCEHVEDEGESRYKITDIIGKEEGIGPENLRGSGMIAGESSLAYNEIITISLVTCRAIGIGAYLVRLGQRTIQVENSHLILTGAGALNKVLGREVYTSNNQLGGIQIMHNNGVTHCTVCDDFEGVFTVLHWLSYMPKSVHSSVPLLNSKDPIDRIIEFVPTKTPYDPRWMLAGRPHPTQKGQWLSGFFDYGSFSEIMQPWAQTVVVGRARLGGIPVGVVAVETRTVELSIPADPANLDSEAKIIQQAGQVWFPDSAFKTYQAIKDFNREGLPLMVFANWRGFSGGMKDMYDQVLKFGAYIVDGLRECCQPVLVYIPPQAELRGGSWVVIDSSINPRHMEMYADRESRGSVLEPEGTVEIKFRRKDLVKTMRRVDPVYIHLAERLGTPELSTAERKELENKLKEREEFLIPIYHQVAVQFADLHDTPGRMQEKGVISDILDWKTSRTFFYWRLRRLLLEDLVKKKIHNANPELTDGQIQAMLRRWFVEVEGTVKAYVWDNNKDLAEWLEKQLTEEDGVHSVIEENIKCISRDYVLKQIRSLVQANPEVAMDSIIHMTQHISPTQRAEVIRILSTMDSPST

SEQ ID NO: 4738 - protein, 120 aa, Homo sapiens
MDEPSPLAQPLELNQHSRFIIGSVSEDNSEDEISNLVKLDLLEEKEGSLSPASVGSDTLSDLGISSLQDGLALHIRSSMSGLHLVKQGRDRKKIDSQRDFTVASPAEFVTRFGGNKVIEK

SEQ ID NO: 4739 - protein, 2370 aa, Homo sapiens
SFWKWISTQTVRIIRAVRAHFGGIMDEPSPLAQPLELNQHSRFIIGSVSEDNSEDEISNLVKLDLLEEKEGSLSPASVGSDTLSDLGISSLQDGLALHIRSSMSGLHLVKQGRDRKKIDSQRDFTVASPAEFVTRFGGNKVIEKVLIANNGIAAVKCMRSIRRWSYEMFRNERAIRFVVMVTPEDLKANAEYIKMADHYVPVPGGPNNNNYANVELILDIAKRIPVQAVWAGWGHASENPKLPELLLKNGIAFMGPPSQAMWALGDKIASSIVAQTAGIPTLPWSGSGLRVDWQENDFSKRILNVPQELYEKGYVKDVDDGLQAAEEVGYPVMIKASEGGGGKGIRKVNNADDFPNLFRQVQAEVPGSPIFVMRLAKQSRHLEVQILADQYGNAISLFGRDCSVQRRHQKIIEEAPATIATPAVFEHMEQCAVKLAKMVGYVSAGTVEYLYSQDGSFYFLELNPRLQVEHPCTEMVADVNLPAAQLQIAMGIPLYRIKDIRMMYGVSPWGDSPIDFEDSAHVPCPRGHVIAARITSENPDEGFKPSSGTVQELNFRSNKNVWGYFSVAAAGGLHEFADSQFGHCFSWGENREEAISNMVVALKELSIRGDFRTTVEYLIKLLETESFQMNRIDTGWLDRLIAEKVQAERPDTMLGVVCGALHVADVSLRNSVSNFLHSLERGQVLPAHTLLNTVDVELIYEGVKYVLKVTRQSPNSYVVIMNGSCVEVDVHRLSDGGLLLSYDGSSYTTYMKEEVDRYRITIGNKTCVFEKENDPSVMRSPSAGKLIQYIVEDGGHVFAGQCYAEIEVMKMVMTLTAVESGCIHYVKRPGAALDPGCVLAKMQLDNPSKVQQAELHTGSLPRIQSTALRGEKLHRVFHYVLDNLVNVMNGYCLPDPFFSSKVKDWVERLMKTLRDPSLPLLELQDIMTSVSGRIPPNVEKSIKKEMAQYASNITSVLCQFPSQQIANILDSHAATLNRKSEREVFFMNTQSIVQLVQRYRSGIRGHMKAVVMDLLRQYLRVETQFQNGHYDKCVFALREENKSDMNTVLNYIFSHAQVTKKNLLVTMLIDQLCGRDPTLTDELLNILTELTQLSKTTNAKVALRARQVLIASHLPSYELRHNQVESIFLSAIDMYGHQFCIENLQKLILSETSIFDVLPNFFYHSNQVVRMAALEVYVRRAYIAYELNSVQHRQLKDNTCVVEFQFMLPTSHPNRGNIPTLNRMSFSSNLNHYGMTHVASVSDVLLDNSFTPPCQRMGGMVSFRTFEDFVRIFDEVMGCFSDSPPQSPTFPEAGHTSLYDEDKVPRDEPIHILNVAIKTDCDIEDDRLAAMFREFTQQNKATLVDHGIRRLTFLVAQKDFRKQVNYEVDRRFHREFPKFFTFRARDKFEEDRIYRHLEPALAFQLELNRMRNFDLTAIPCANHKMHLYLGAAKVEVGTEVTDYRFFVRAIIRHSDLVTKEASFEYLQNEGERLLLEAMDELEVAFNNTNVRTDCNHIFLNFVPTVIMDPSKIEESVRSMVMRYGSRLWKLRVLQAELKINIRLTPTGKAIPIRLFLTNESGYYLDISLYKEVTDSRTAQIMFQAYGDKQGPLHGMLINTPYVTKDLLQSKRFQAQSLGTTYIYDIPEMFRQSLIKLWESMSTQAFLPSPPLPSDMLTYTELVLDDQGQLVHMNRLPGGNEIGMVAWKMTFKSPEYPEGRDIIVIGNDITYRIGSFGPQEDLLFLRASELARAEGIPRIYVSANSGARIGLAEEIRHMFHVAWVDPEDPYKGYRYLYLTPQDYKRVSALNSVHCEHVEDEGESRYKITDIIGKEEGIGPENLRGSGMIAGESSLAYNEIITISLVTCRAIGIGAYLVRLGQRTIQVENSHLILTGAGALNKVLGREVYTSNNQLGGIQIMHNNGVTHCTVCDDFEGVFTVLHWLSYMPKSVHSSVPLLNSKDPIDRIIEFVPTKTPYDPRWMLAGRPHPTQKGQWLSGFFDYGSFSEIMQPWAQTVVVGRARLGGIPVGVVAVETRTVELSIPADPANLDSEAKIIQQAGQVWFPDSAFKTYQAIKDFNREGLPLMVFANWRGFSGGMKDMYDQVLKFGAYIVDGLRECCQPVLVYIPPQAELRGGSWVVIDSSINPRHMEMYADRESRGSVLEPEGTVEIKFRRKDLVKTMRRVDPVYIHLAERLGTPELSTAERKELENKLKEREEFLIPIYHQVAVQFADLHDTPGRMQEKGVISDILDWKTSRTFFYWRLRRLLLEDLVKKKIHNANPELTDGQIQAMLRRWFVEVEGTVKAYVWDNNKDLAEWLEKQLTEEDGVHSVIEENIKCISRDYVLKQIRSLVQANPEVAMDSIIHMTQHISPTQRAEVIRILSTMDSPST

SEQ ID NO: 4740 - protein, 258 aa, Homo sapiens
MSGLHLVKQGRDRKKIDSQRDFTVASPAEFVTRFGGNKVIEKVLIANNGIAAVKCMRSIRRWSYEMFRNERAIRFVVMVTPEDLKANAEYIKMADHYVPVPGGPNNNNYANVELILDIAKRIPVQAVWAGWGHASENPKLPELLLKNGIAFMGPPSQAMWALGDKIASSIVAQTAGIPTLPWSGSGLRVDWQENDFSKRILNVPQELYEKGYVKDVDDGLQAAEEVGYPVMIKASEGGGGKGIRKVNNADDFPNLFRQ

SEQ ID NO: 4741 - protein, 47 aa, Homo sapiens
MDEPSPLAQPLELNQHSRFIIGSVSEDNSEDEISNLVKLDLLEEKEG

SEQ ID NO: 4742 - protein, 892 aa, Homo sapiens
MDHYDSQQTNDYMQPEEDWDRDLLLDPAWEKQQRKTFTAWCNSHLRKAGTQIENIEEDFRDGLKLMLLLEVISGERLAKPERGKMRVHKISNVNKALDFIASKGVKLVSIGAEEIVDGNVKMTLGMIWTIILRFAIQDISVEETSAKEGLLLWCQRKTAPYKNVNIQNFHISWKDGLGFCALIHRHRPELIDYGKLRKDDPLTNLNTAFDVAEKYLDIPKMLDAEDIVGTARPDEKAIMTYVSSFYHAFSGAQKAETAANRICKVLAVNQENEQLMEDYEKLASDLLEWIRRTIPWLENRVPENTMHAMQQKLEDFRDYRRLHKPPKVQEKCQLEINFNTLQTKLRLSNRPAFMPSEGRMVSDINNAWGCLEQVEKGYEEWLLNEIRRLERLDHLAEKFRQKASIHEAWTDGKEAMLRQKDYETATLSEIKALLKKHEAFESDLAAHQDRVEQIAAIAQELNELDYYDSPSVNARCQKICDQWDNLGALTQKRREALERTEKLLETIDQLYLEYAKRAAPFNNWMEGAMEDLQDTFIVHTIEEIQGLTTAHEQFKATLPDADKERLAILGIHNEVSKIVQTYHVNMAGTNPYTTITPQEINGKWDHVRQLVPRRDQALTEEHARQQHNERLRKQFGAQANVIGPWIQTKMEEIGRISIEMHGTLEDQLSHLRQYEKSIVNYKPKIDQLEGDHQLIQEALIFDNKHTNYTMEHIRVGWEQLLTTIARTINEVENQILTRDAKGISQEQMNEFRASFNHFDRDHSGTLGPEEFKACLISLGYDIGNDPQGEAEFARIMSIVDPNRLGVVTFQAFIDFMSRETADTDTADQVMASFKILAGDKNYITMDELRRELPPDQAEYCIARMAPYTGPDSVPGALDYMSFSTALYGESDL

SEQ ID NO: 4743 - protein, 914 aa, Homo sapiens
MDHYDSQQTNDYMQPEEDWDRDLLLDPAWEKQQRKTFTAWCNSHLRKAGTQIENIEEDFRDGLKLMLLLEVISGERLAKPERGKMRVHKISNVNKALDFIASKGVKLVSIGAEEIVDGNVKMTLGMIWTIILRFAIQDISVEETSAKEGLLLWCQRKTAPYKNVNIQNFHISWKDGLGFCALIHRHRPELIDYGKLRKDDPLTNLNTAFDVAEKYLDIPKMLDAEDIVGTARPDEKAIMTYVSSFYHAFSGAQKAETAANRICKVLAVNQENEQLMEDYEKLASDLLEWIRRTIPWLENRVPENTMHAMQQKLEDFRDYRRLHKPPKVQEKCQLEINFNTLQTKLRLSNRPAFMPSEGRMVSDINNAWGCLEQVEKGYEEWLLNEIRRLERLDHLAEKFRQKASIHEAWTDGKEAMLRQKDYETATLSEIKALLKKHEAFESDLAAHQDRVEQIAAIAQELNELDYYDSPSVNARCQKICDQWDNLGALTQKRREALERTEKLLETIDQLYLEYAKRAAPFNNWMEGAMEDLQDTFIVHTIEEIQGLTTAHEQFKATLPDADKERLAILGIHNEVSKIVQTYHVNMAGTNPYTTITPQEINGKWDHVRQLVPRRDQALTEEHARQQHNERLRKQFGAQANVIGPWIQTKMEEIGRISIEMHGTLEDQLSHLRQYEKSIVNYKPKIDQLEGDHQLIQEALIFDNKHTNYTMEHIRVGWEQLLTTIARTINEVENQILTRDAKGISQEQMNEFRASFNHFDRDHSGTLGPEEFKACLISLGYDIGNDPQKKTGMMDTDDFRACLISMGYNMGEAEFARIMSIVDPNRLGVVTFQAFIDFMSRETADTDTADQVMASFKILAGDKNYITMDELRRELPPDQAEYCIARMAPYTGPDSVPGALDYMSFSTALYGESDL

SEQ ID NO: 4744 - protein, 887 aa, Homo sapiens
MDHYDSQQTNDYMQPEEDWDRDLLLDPAWEKQQRKTFTAWCNSHLRKAGTQIENIEEDFRDGLKLMLLLEVISGERLAKPERGKMRVHKISNVNKALDFIASKGVKLVSIGAEEIVDGNVKMTLGMIWTIILRFAIQDISVEETSAKEGLLLWCQRKTAPYKNVNIQNFHISWKDGLGFCALIHRHRPELIDYGKLRKDDPLTNLNTAFDVAEKYLDIPKMLDAEDIVGTARPDEKAIMTYVSSFYHAFSGAQKAETAANRICKVLAVNQENEQLMEDYEKLASDLLEWIRRTIPWLENRVPENTMHAMQQKLEDFRDYRRLHKPPKVQEKCQLEINFNTLQTKLRLSNRPAFMPSEGRMVSDINNAWGCLEQVEKGYEEWLLNEIRRLERLDHLAEKFRQKASIHEAWTDGKEAMLRQKDYETATLSEIKALLKKHEAFESDLAAHQDRVEQIAAIAQELNELDYYDSPSVNARCQKICDQWDNLGALTQKRREALERTEKLLETIDQLYLEYAKRAAPFNNWMEGAMEDLQDTFIVHTIEEIQGLTTAHEQFKATLPDADKERLAILGIHNEVSKIVQTYHVNMAGTNPYTTITPQEINGKWDHVRQLVPRRDQALTEEHARQQHNERLRKQFGAQANVIGPWIQTKMEEIGRISIEMHGTLEDQLSHLRQYEKSIVNYKPKIDQLEGDHQLIQEALIFDNKHTNYTMEHIRVGWEQLLTTIARTINEVENQILTRDAKGISQEQMNEFRASFNHFDRKKTGMMDTDDFRACLISMGYNMGEAEFARIMSIVDPNRLGVVTFQAFIDFMSRETADTDTADQVMASFKILAGDKNYITMDELRRELPPDQAEYCIARMAPYTGPDSVPGALDYMSFSTALYGESDL

SEQ ID NO: 4745 - protein, 911 aa, Homo sapiens
MVDYHAANQSYQYGPSSAGNGAGGGGSMGDYMAQEDDWDRDLLLDPAWEKQQRKTFTAWCNSHLRKAGTQIENIDEDFRDGLKLMLLLEVISGERLPKPERGKMRVHKINNVNKALDFIASKGVKLVSIGAEEIVDGNAKMTLGMIWTIILRFAIQDISVEETSAKEGLLLWCQRKTAPYKNVNVQNFHISWKDGLAFNALIHRHRPELIEYDKLRKDDPVTNLNNAFEVAEKYLDIPKMLDAEDIVNTARPDEKAIMTYVSSFYHAFSGAQKAETAANRICKVLAVNQENEHLMEDYEKLASDLLEWIRRTIPWLEDRVPQKTIQEMQQKLEDFRDYRRVHKPPKVQEKCQLEINFNTLQTKLRLSNRPAFMPSEGKMVSDINNGWQHLEQAEKGYEEWLLNEIRRLERLDHLAEKFRQKASIHEAWTDGKEAMLKHRDYETATLSDIKALIRKHEAFESDLAAHQDRVEQIAAIAQELNELDYYDSHNVNTRCQKICDQWDALGSLTHSRREALEKTEKQLEAIDQLHLEYAKRAAPFNNWMESAMEDLQDMFIVHTIEEIEGLISAHDQFKSTLPDADREREAILAIHKEAQRIAESNHIKLSGSNPYTTVTPQIINSKWEKVQQLVPKRDHALLEEQSKQQSNEHLRRQFASQANVVGPWIQTKMEEIGRISIEMNGTLEDQLSHLKQYERSIVDYKPNLDLLEQQHQLIQEALIFDNKHTNYTMEHIRVGWEQLLTTIARTINEVENQILTRDAKGISQEQMQEFRASFNHFDKDHGGALGPEEFKACLISLGYDVENDRQGEAEFNRIMSLVDPNHSGLVTFQAFIDFMSRETTDTDTADQVIASFKVLAGDKNFITAEELRRELPPDQAEYCIARMAPYQGPDAVPGALDYKSFSTALYGESDL

SEQ ID NO: 4746 - protein, 692 aa, Homo sapiens
MVDYHAANQSYQYGPSSAGNGAGGGGSMGDYMAQEDDWDRDLLLDPAWEKQQRKAETAANRICKVLAVNQENEHLMEDYEKLASDLLEWIRRTIPWLEDRVPQKTIQEMQQKLEDFRDYRRVHKPPKVQEKCQLEINFNTLQTKLRLSNRPAFMPSEGKMVSDINNGWQHLEQAEKGYEEWLLNEIRRLERLDHLAEKFRQKASIHEAWTDGKEAMLKHRDYETATLSDIKALIRKHEAFESDLAAHQDRVEQIAAIAQELNELDYYDSHNVNTRCQKICDQWDALGSLTHSRREALEKTEKQLEAIDQLHLEYAKRAAPFNNWMESAMEDLQDMFIVHTIEEIEGLISAHDQFKSTLPDADREREAILAIHKEAQRIAESNHIKLSGSNPYTTVTPQIINSKWEKVQQLVPKRDHALLEEQSKQQSNEHLRRQFASQANVVGPWIQTKMEEIGRISIEMNGTLEDQLSHLKQYERSIVDYKPNLDLLEQQHQLIQEALIFDNKHTNYTMEHIRVGWEQLLTTIARTINEVENQILTRDAKGISQEQMQEFRASFNHFDKDHGGALGPEEFKACLISLGYDVENDRQGEAEFNRIMSLVDPNHSGLVTFQAFIDFMSRETTDTDTADQVIASFKVLAGDKNFITAEELRRELPPDQAEYCIARMAPYQGPDAVPGALDYKSFSTALYGESDL

SEQ ID NO: 4747 - protein, 521 aa, Homo sapiens
MVDYHAANQSYQYGPSSAGNGAGGGGSMGDYMAQEDDWDRDLLLDPAWEKQQRKTFTAWCNSHLRKAGTQIENIDEDFRDGLKLMLLLEVHELDYYDSHNVNTRCQKICDQWDALGSLTHSRREALEKTEKQLEAIDQLHLEYAKRAAPFNNWMESAMEDLQDMFIVHTIEEIEGLISAHDQFKSTLPDADREREAILAIHKEAQRIAESNHIKLSGSNPYTTVTPQIINSKWEKVQQLVPKRDHALLEEQSKQQSNEHLRRQFASQANVVGPWIQTKMEEIGRISIEMNGTLEDQLSHLKQYERSIVDYKPNLDLLEQQHQLIQEALIFDNKHTNYTMEHIRVGWEQLLTTIARTINEVENQILTRDAKGISQEQMQEFRASFNHFDKDHGGALGPEEFKACLISLGYDVENDRQGEAEFNRIMSLVDPNHSGLVTFQAFIDFMSRETTDTDTADQVIASFKVLAGDKNFITAEELRRELPPDQAEYCIARMAPYQGPDAVPGALDYKSFSTALYGESDL

SEQ ID NO: 4748 - protein, 562 aa, Homo sapiens
MVDYHAANQSYQYGPSSAGNGAGGGGSMGDYMAQEDDWDRDLLLDPAWEKQQRKTFTAWCNSHLRKAGTQIENIDEDFRDGLKLMLLLEVISGERLPKPERGKMRVHKINNVNKALDFIASKGVKLVSIGAEEIVDGNAKMTLGMIWTIILRFAIQDISVEETSAKEGLLLWCQRKTAPYKNVNVQNFHISWKDGLAFNALIHRHRPELIEYDKLRKDDPVTNLNNAFEVAEKYLDIPKMLDAEDIVNTARPDEKAIMTYVSSFYHAFSGAQKAETAANRICKVLAVNQENEHLMEDYEKLASDLLEWIRRTIPWLEDRVPQKTIQEMQQKLEDFRDYRRVHKPPKVQEKCQLEINFNTLQTKLRLSNRPAFMPSEGKMVSDINNGWQHLEQAEKGYEEWLLNEIRRLERLDHLAEKFRQKASIHEAWTDGKEAMLKHRDYETATLSDIKALIRKHEAFESDLAAHQDRVEQIAAIAQELNELDYYDSHNVNTPDGLQEGPGQPHSPIPPLCIYAKHSLQSSGVGGWAGRGWGRLSPLSLCGLARRFPRPGWGDLGPALLVW

SEQ ID NO: 4749 - protein, 943 aa, Homo sapiens
MGIGLCVPPARCWKRLTRSSRGQPLERPAATIIIGLSIVERSKQTQRGPVDFSRSHSAPAAEQECKPRISAARSTPAPPSPAVPGFRTTPCQTFTAWCNSHLRKAGTQIENIEEDFRNGLKLMLLLEVISGERLPRPDKGKMRFHKIANVNKALDFIASKGVKLVSIGAEEIVDGNLKMTLGMIWTIILRFAIQDISVEETSAKEGLLLWCQRKTAPYRNVNVQNFHTSWKDGLALCALIHRHRPDLIDYAKLRKDDPIGNLNTAFEVAEKYLDIPKMLDAEDIVNTPKPDEKAIMTYVSCFYHAFAGAEQAETAANRICKVLAVNQENEKLMEEYEKLASELLEWIRRTVPWLENRVGEPSMSAMQRKLEDFRDYRRLHKPPRIQEKCQLEINFNTLQTKLRLSHRPAFMPSEGKLVSDIANAWRGLEQVEKGYEDWLLSEIRRLQRLQHLAEKFRQKASLHEAWTRGKEEMLSQRDYDSALLQEVRALLRRHEAFESDLAAHQDRVEHIAALAQELNELDYHEAASVNSRCQAICDQWDNLGTLTQKRRDALERMEKLLETIDRLQLEFARRAAPFNNWLDGAVEDLQDVWLVHSVEETQSLLTAHDQFKATLPEADERGAIMGIQGEIQKICQTYGLRPCSTNPYITLSPQDINTKWDMVRKLVPSCDQTLQEELARQQVNERLRRQFAAQANAIGPWIQAKVEEVGRLAAGLAGSLEEQMAGLRQQEQNIINYKTNIDRLEGDHQLLQESLVFDNKHTVYSMEHIRVGWEQLLTSIARTINEVENQVLTRDAKGLSQEQLNEFRASFNHFDRKQNGMMEPDDFRACLISMGYDLGEVEFARIMTMVDPNAAGVVTFQAFIDFMTRETAETDTTEQVVASFKILAGDKNYITPEELRRELPAKQAEYCIRRMVPYKGSGAPAGALDYVAFSSALYGESDL

SEQ ID NO: 4750 - protein, 72 aa, Homo sapiens
MMMVMQPEGLGAGEGRFAGGGGGGEYMEQEEDWDRDLLLDPAWEKQQRKENESSERERDWPRMHSKSVAELS

SEQ ID NO: 4751 - protein, 900 aa, Homo sapiens
MMMVMQPEGLGAGEGRFAGGGGGGEYMEQEEDWDRDLLLDPAWEKQQRKTFTAWCNSHLRKAGTQIENIEEDFRNGLKLMLLLEVISGERLPRPDKGKMRFHKIANVNKALDFIASKGVKLVSIGAEEIVDGNLKMTLGMIWTIILRFAIQDISVEETSAKEGLLLWCQRKTAPYRNVNVQNFHTSWKDGLALCALIHRHRPDLIDYAKLRKDDPIGNLNTAFEVAEKYLDIPKMLDAEDIVNTPKPDEKAIMTYVSCFYHAFAGAEQAETAANRICKVLAVNQENEKLMEEYEKLASELLEWIRRTVPWLENRVGEPSMSAMQRKLEDFRDYRRLHKPPRIQEKCQLEINFNTLQTKLRLSHRPAFMPSEGKLVSDIANAWRGLEQVEKGYEDWLLSEIRRLQRLQHLAEKFRQKASLHEAWTRGKEEMLSQRDYDSALLQEVRALLRRHEAFESDLAAHQDRVEHIAALAQELNELDYHEAASVNSRCQAICDQWDNLGTLTQKRRDALERMEKLLETIDRLQLEFARRAAPFNNWLDGAVEDLQDVWLVHSVEETQSLLTAHDQFKATLPEADERGAIMGIQGEIQKICQTYGLRPCSTNPYITLSPQDINTKWDMVRKLVPSCDQTLQEELARQQVNERLRRQFAAQANAIGPWIQAKVEEVGRLAAGLAGSLEEQMAGLRQQEQNIINYKTNIDRLEGDHQLLQESLVFDNKHTVYSMEHIRVGWEQLLTSIARTINEVENQVLTRDAKGLSQEQLNEFRASFNHFDRKQNGMMEPDDFRACLISMGYDLGEVEFARIMTMVDPNAAGVVTFQAFIDFMTRETAETDTTEQVVASFKILAGDKNYITPEELRRELPAKQAEYCIRRMVPYKGSGAPAGALDYVAFSSALYGESDL

SEQ ID NO: 4752 - protein, 505 aa, Homo sapiens
MKFKLHVNSARQYKDLWNMSDDKPFLCTAPGCGQRFTNEDHLAVHKHKHEMTLKFGPARNDSVIVADQTPTPTRFLKNCEEVGLFNELASPFENEFKKASEDDIKKMPLDLSPLATPIIRSKIEEPSVVETTHQDSPLPHPESTTSDEKEVPLAQTAQPTSAIVRPASLQVPNVLLTSSDSSVIIQQAVPSPTSSTVITQAPSSNRPIVPVPGPFPLLLHLPNGQTMPVAIPASITSSNVHVPAAVPLVRPVTMVPSVPGIPGPSSPQPVQSEAKMRLKAALTQQHPPVTNGDTVKGHGSGLVRTQSEESRPQSLQQPATSTTETPASPAHTTPQTQSTSGRRRRAANEDPDEKRRKFLERNRAAASRCRQKRKVWVQSLEKKAEDLSSLNGQLQSEVTLLRNEVAQLKQLLLAHKDCPVTAMQKKSGYHTADKDDSSEDISVPSSPHTEAIQHSSVSTSNGVSSTSKAEAVATSVLTQMADQSTEPALSQIVMAPSSQSQPSGS

SEQ ID NO: 4753 - protein, 447 aa, Homo sapiens
MYCAWMWPDQTPTPTRFLKNCEEVGLFNELASPFENEFKKASEDDIKKMPLDLSPLATPIIRSKIEEPSVVETTHQDSPLPHPESTTSDEKEVPLAQTAQPTSAIVRPASLQVPNVLLTSSDSSVIIQQAVPSPTSSTVITQAPSSNRPIVPVPGPFPLLLHLPNGQTMPVAIPASITSSNVHVPAAVPLVRPVTMVPSVPGIPGPSSPQPVQSEAKMRLKAALTQQHPPVTNGDTVKGHGSGLVRTQSEESRPQSLQQPATSTTETPASPAHTTPQTQSTSGRRRRAANEDPDEKRRKFLERNRAAASRCRQKRKVWVQSLEKKAEDLSSLNGQLQSEVTLLRNEVAQLKQLLLAHKDCPVTAMQKKSGYHTADKDDSSEDISVPSSPHTEAIQHSSVSTSNGVSSTSKAEAVATSVLTQMADQSTEPALSQIVMAPSSQSQPSGS

SEQ ID NO: 4754 - protein, 126 aa, Homo sapiens
MSDDKPFLCTAPGCGQSEVTLLRNEVAQLKQLLLAHKDCPVTAMQKKSGYHTADKDDSSEDISVPSSPHTEAIQHSSVSTSNGVSSTSKAEAVATSVLTQMADQSTEPALSQIVMAPSSQSQPSGS

SEQ ID NO: 4755 - protein, 505 aa, Homo sapiens; identical to SEQ ID NO: 4752

SEQ ID NO: 4756 - protein, 447 aa, Homo sapiens; identical to SEQ ID NO: 4753

SEQ ID NO: 4757 - protein, 209 aa, Homo sapiens
MKFKLHVNSARQYKDLWNMSDDKPFLCTAPGCGQRFTNEDHLAVHKHKHEMTLKFGPARNDSVIVADQTPTPTRFLKNCEEVGLFNELASPFENEFKKASEDDIKKMPLDLSPLATPIIRSKIEEPSVVETTHQDSPLPHPESTTSDEKEVPLAQTAQPTSAIVRPASLQVPNVLLTSSDSSVIIQQAVPSPTSSTVITQAPSSNRPIV

SEQ ID NO: 4758 - protein, 395 aa, Homo sapiens
MKFKLHVNSARQYKDLWNMSDDKPFLCTAPGCGQRFTNEDHLAVHKHKHEMTLKFGPARNDSVIVADQTPTPTRFLKNCEEVGLFNELASPFENEFKKASEDDIKKMPLDLSPLATPIIRSKIEEPSVVETTHQDSPLPHPESTTSDEKEVPLAQTAQPTSAIVRPASLQVPNVLLTSSDSSVIIQQAVPSPTSSTVITQAPSSNRPIVPVPGPFPLLLHLPNGQTMPVAIPASITSSNVHVPAAVPLVRPVTMVPSVPGIPGPSSPQPVQSEAKMRLKAALTQQHPPVTNGDTVKGHGSGLVRTQSEESRPQSLQQPATSTTETPASPAHTTPQTQSTSGRRRRAANEDPDEKRRKFLERNRAAASRCRQKRKVWVQSLEKKAEDLSSLNGQLQ

SEQ ID NO: 4759 - protein, 237 aa, Homo sapiens
MKFKLHVNSARQYKDLWNMSDDKPFLCTAPGCGQRFTNEDHLAVHKHKHEMTLKFGPARNDSVIVADQTPTPTRFLKNCEEVGLFNELASPFENEFKKASEDDIKKMPLDLSPLATPIIRSKIEEPSVVETTHQDSPLPHPESTTSDEKEVPLAQTAQPTSAIVRPASLQVPNVLLTSSDSSVIIQQAVPSPTSSTVITQAPSSNRPIVSFDQSPWCLVFQESQVLPLPNQYSQKQK

SEQ ID NO: 4760 - protein, 487 aa, Homo sapiens
MSDDKPFLCTAPGCGQRFTNEDHLAVHKHKHEMTLKFGPARNDSVIVADQTPTPTRFLKNCEEVGLFNELASPFENEFKKASEDDIKKMPLDLSPLATPIIRSKIEEPSVVETTHQDSPLPHPESTTSDEKEVPLAQTAQPTSAIVRPASLQVPNVLLTSSDSSVIIQQAVPSPTSSTVITQAPSSNRPIVPVPGPFPLLLHLPNGQTMPVAIPASITSSNVHVPAAVPLVRPVTMVPSVPGIPGPSSPQPVQSEAKMRLKAALTQQHPPVTNGDTVKGHGSGLVRTQSEESRPQSLQQPATSTTETPASPAHTTPQTQSTSGRRRRAANEDPDEKRRKFLERNRAAASRCRQKRKVWVQSLEKKAEDLSSLNGQLQSEVTLLRNEVAQLKQLLLAHKDCPVTAMQKKSGYHTADKDDSSEDISVPSSPHTEAIQHSSVSTSNGVSSTSKAEAVATSVLTQMADQSTEPALSQIVMAPSSQSQPSGS

SEQ ID NO: 4761 - protein, 395 aa, Homo sapiens; identical to SEQ ID NO: 4758

SEQ ID NO: 4762 - protein, 395 aa, Homo sapiens; identical to SEQ ID NO: 4758

SEQ ID NO: 4763 - protein, 219 aa, Homo sapiens
MSDDKPFLCTAPGCGQRFTNEDHLAVHKHKHEMTLKFGPARNDSVIVADQTPTPTRFLKNCEEVGLFNELASPFENEFKKASEDDIKKMPLDLSPLATPIIRSKIEEPSVVETTHQDSPLPHPESTTSDEKEVPLAQTAQPTSAIVRPASLQVPNVLLTSSDSSVIIQQAVPSPTSSTVITQAPSSNRPIVSFDQSPWCLVFQESQVLPLPNQYSQKQK

SEQ ID NO: 4764 - protein, 377 aa, Homo sapiens [sequence omitted]

SEQ ID NO: 4765 - protein, 482 aa, Homo sapiens
MKFKLHVNSARQYKDLWNMSDDKPFLCTAPGCGQRFTNEDHLADQTPTPTRFLKNCEEVGLFNELASPFENEFKKASEDDIKKMPLDLSPLATPIIRSKIEEPSVVETTHQDSPLPHPESTTSDEKEVPLAQTAQPTSAIVRPASLQVPNVLLTSSDSSVIIQQAVPSPTSSTVITQAPSSNRPIVPVPGPFPLLLHLPNGQTMPVAIPASITSSNVHVPAAVPLVRPVTMVPSVPGIPGPSSPQPVQSEAKMRLKAALTQQHPPVTNGDTVKGHGSGLVRTQSEESRPQSLQQPATSTTETPASPAHTTPQTQSTSGRRRRAANEDPDEKRRKFLERNRAAASRCRQKRKVWVQSLEKKAEDLSSLNGQLQSEVTLLRNEVAQLKQLLLAHKDCPVTAMQKKSGYHTADKDDSSEDISVPSSPHTEAIQHSSVSTSNGVSSTSKAEAVATSVLTQMADQSTEPALSQIVMAPSSQSQPSGS

SEQ ID NO: 4766 - protein, 711 aa, Homo sapiens
MKLKLNVLTIILLPVHLLITIYSALIFIPWYFLTNAKKKNAMAKRIKAKPTSDKPGSPYRSVTHFDSLAVIDIPGADTLDKLFDHAVSKFGKKDSLGTREILSEENEMQPNGKVFKKLILGNYKWMNYLEVNRRVNNFGSGLTALGLKPKNTIAIFCETRAEWMIAAQTCFKYNFPLVTLYATLGKEAVVHGLNESEASYLITSVELLESKLKTALLDISCVKHIIYVDNKAINKAEYPEGFEIHSMQSVEELGSNPENLGIPPSRPTPSDMAIVMYTSGSTGRPKGVMMHHSNLIAGMTGQCERIPGLGPKDTYIGYLPLAHVLELTAEISCFTYGCRIGYSSPLTLSDQSSKIKKGSKGDCTVLKPTLMAAVPEIMDRIYKNVMSKVQEMNYIQKTLFKIGYDYKLEQIKKGYDAPLCNLLLFKKVKALLGGNVRMMLSGGAPLSPQTHRFMNVCFCCPIGQGYGLTESCGAGTVTEVTDYTTGRVGAPLICCEIKLKDWQEGGYTINDKPNPRGEIVIGGQNISMGYFKNEEKTAEDYSVDENGQRWFCTGDIGEFHPDGCLQIIDRKKDLVKLQAGEYVSLGKVEAALKNCPLIDNICAFAKSDQSYVISFVVPNQKRLTLLAQQKGVEGTWVDICNNPAMEAEILKEIREAANAMKLERFEIPIKVRLSPEPWTPETGLVTDAFKLKRKELRNHYLKDIERMYGGK

SEQ ID NO: 4767 - protein, 670 aa, Homo sapiens
MAKRIKAKPTSDKPGSPYRSVTHFDSLAVIDIPGADTLDKLFDHAVSKFGKKDSLGTREILSEENEMQPNGKVFKKLILGNYKWMNYLEVNRRVNNFGSGLTALGLKPKNTIAIFCETRAEWMIAAQTCFKYNFPLVTLYATLGKEAVVHGLNESEASYLITSVELLESKLKTALLDISCVKHIIYVDNKAINKAEYPEGFEIHSMQSVEELGSNPENLGIPPSRPTPSDMAIVMYTSGSTGRPKGVMMHHSNLIAGMTGQCERIPGLGPKDTYIGYLPLAHVLELTAEISCFTYGCRIGYSSPLTLSDQSSKIKKGSKGDCTVLKPTLMAAVPEIMDRIYKNVMSKVQEMNYIQKTLFKIGYDYKLEQIKKGYDAPLCNLLLFKKVKALLGGNVRMMLSGGAPLSPQTHRFMNVCFCCPIGQGYGLTESCGAGTVTEVTDYTTGRVGAPLICCEIKLKDWQEGGYTINDKPNPRGEIVIGGQNISMGYFKNEEKTAEDYSVDENGQRWFCTGDIGEFHPDGCLQIIDRKKDLVKLQAGEYVSLGKVEAALKNCPLIDNICAFAKSDQSYVISFVVPNQKRLTLLAQQKGVEGTWVDICNNPAMEAEILKEIREAANAMKLERFEIPIKVRLSPEPWTPETGLVTDAFKLKRKELRNHYLKDIERMYGGK

SEQ ID NO: 4768 - protein, 711 aa, Homo sapiens; identical to SEQ ID NO: 4766

SEQ ID NO: 4769 - protein, 54 aa, Homo sapiens
MKLKLNVLTIILLPVHLLITIYSALIFIPWYFLTNAKKKNAMAKRIKAKPTSDK

SEQ ID NO: 4770 - protein, 145 aa, Homo sapiens
MKLKLNVLTIILLPVHLLITIYSALIFIPWYFLTNAKKKNAMAKRIKAKPTSDKPGSPYRSVTHFDSLAVIDIPGADTLDKLFDHAVSKFGKKDSLGTREILSEENEMQPNGKVFKKLILGNYKWMNYLEVNRRVNNFGSGLTAL

SEQ ID NO: 4771 - protein, 126 aa, Homo sapiens
MKLKLNVLTIILLPVHLLITIYSALIFIPWYFLTNAKKKNAMAKRIKAKPTSDKPGSPYRSVTHFDSLAVIDIPGADTLDKLFDHAVSKFGKKDSLGTREILSEENEMQPNGKVFKKLILGNYKWM

SEQ ID NO: 4772 - protein, 154 aa, Homo sapiens
MAKRIKAKPTSDKPGSPYRSVTHFDSLAVIDIPGADTLDKLFDHAVSKFGKKDSLGTREILSEENEMQPNGKVFKKLILGNYKWMNYLEVNRRVNNFGSGLTALGLKPKNTIAIFCETRAEWMIAAQTCFKYNFPLVTLYATLGKEAVVHGLNE

SEQ ID NO: 4773 - protein, 128 aa, Homo sapiens
MKLKLNVLTIILLPVHLLITIYSALIFIPWYFLTNAKKKNAMAKRIKAKPTSDKPGSPYRSVTHFDSLAVIDIPGADTLDKLFDHAVSKFGKKDSLGTREILSEENEMQPNGKVFKKLILGNYKWMNY

SEQ ID NO: 4774 - protein, 824 aa, Homo sapiens
MRQSLLFLTSVVPFVLAPRPPDDPGFGPHQRLEKLDSLLSDYDILSLSNIQQHSVRKRDLQTSTHVETLLTFSALKRHFKLYLTSSTERFSQNFKVVVVDGKNESEYTVKWQDFFTGHVVGEPDSRVLAHIRDDDVIIRINTDGAEYNIEPLWRFVNDTKDKRMLVYKSEDIKNVSRLQSPKVCGYLKVDNEELLPKGLVDREPPEELVHRVKRRADPDPMKNTCKLLVVADHRFYRYMGRGEESTTTNYLIELIDRVDDIYRNTSWDNAGFKGYGIQIEQIRILKSPQEVKPGEKHYNMAKSYPNEEKDAWDVKMLLEQFSFDIAEEASKVCLAHLFTYQDFDMGTLGLAYVGSPRANSHGGVCPKAYYSPVGKKNIYLNSGLTSTKNYGKTILTKEADLVTTHELGHNFGAEHDPDGLAECAPNEDQGGKYVMYPIAVSGDHENNKMFSNCSKQSIYKTIESKAQECFQERSNKVCGNSRVDEGEECDPGIMYLNNDTCCNSDCTLKEGVQCSDRNSPCCKNCQFETAQKKCQEAINATCKGVSYCTGNSSECPPPGNAEDDTVCLDLGKCKDGKCIPFCEREQQLESCACNETDNSCKVCCRDLSGRCVPYVDAEQKNLFLRKGKPCTVGFCDMNGKCEKRVQDVIERFWDFIDQLSINTFGKFLADNIVGSVLVFSLIFWIPFSILVHCVDKKLDKQYESLSLFHPSNVEMLSSMDSASVRIIKPFPAPQTPGRLQPAPVIPSAPAAPKLDHQRMDTIQEDPSTDSHMDEDGFEKDPFPNSSTAAKSFEDLTDHPVTRSEKAASFKLQRQNRVDSKETEC

SEQ ID NO: 4775 - protein, 258 aa, Homo sapiens
MRQSLLFLTSVVPFVLAPRPPDDPGFGPHQRLEKLDSLLSDYDILSLSNIQQHSVRKRDLQTSTHVETLLTFSALKRHFKLYLTSSTERFSQNFKVVVVDGKNESEYTVKWQDFFTGHVVGEPDSRVLAHIRDDDVIIRINTDGAEYNIEPLWRFVNDTKDKRMLVYKSEDIKNVSRLQSPKVCGYLKVDNEELLPKGLVDREPPEELVHRVKRRADPDPMKNTCKLLVVADHRFYRYMGRGEESTTTNYLIHTDRAN

SEQ ID NO: 4776 - protein, 832 aa, Homo sapiens
MKPPGSSSRQPPLAGCSLAGASCGPQRGPAGSVPASAPARTPPCRLLLVLLLLPPLAASSRPRAWGAAAPSAPHWNETAEKNLGVLADEDNTLQQNSSSNISYSNAMQKEITLPSRLIYYINQDSESPYHVLDTKARHQQKHNKAVHLAQASFQIEAFGSKFILDLILNNGLLSSDYVEIHYENGKPQYSKGGEHCYYHGSIRGVKDSKVALSTCNGLHGMFEDDTFVYMIEPLELVHDEKSTGRPHIIQKTLAGQYSKQMKNLTMERGDQWPFLSELQWLKRRKRAVNPSRGIFEEMKYLELMIVNDHKTYKKHRSSHAHTNNFAKSVVNLVDSIYKEQLNTRVVLVAVETWTEKDQIDITTNPVQMLHEFSKYRQRIKQHADAVHLISRVTFHYKRSSLSYFGGVCSRTRGVGVNEYGLPMAVAQVLSQSLAQNLGIQWEPSSRKPKCDCTESWGGCIMEETGVSHSRKFSKCSILEYRDFLQRGGGACLFNRPTKLFEPTECGNGYVEAGEECDCGFHVECYGLCCKKCSLSNGAHCSDGPCCNNTSCLFQPRGYECRDAVNECDITEYCTGDSGQCPPNLHKQDGYACNQNQGRCYNGECKTRDNQCQYIWGTKAAGSDKFCYEKLNTEGTEKGNCGKDGDRWIQCSKHDVFCGFLLCTNLTRAPRIGQLQGEIIPTSFYHQGRVIDCSGAHVVLDDDTDVGYVEDGTPCGPSMMCLDRKCLQIQALNMSSCPLDSKGKVCSGHGVCSNEATCICDFTWAGTDCSIRDPVRNLHPPKDEGPKGPSATNLIIGSIAGAILVAAIVLGGTGWGFKNVKKRRFDPTQQGPI

SEQ ID NO: 4777 - protein, 832 aa, Homo sapiens
MKPPGSSSRQPPLAGCSLAGASCGPQRGPAGSVPASAPARTPPCRLLLVLLLLPPLAASSRPRAWGAAAPSAPHWNETAEKNLGVLADEDNTLQQNSSSNISYSNAMQKEITLPSRLIYYINQDSESPYHVLDTKARHQQKHNKAVHLAQASFQIEAFGSKFILDLILNNGLLSSDYVEIHYENGKPQYSKGGEHCYYHGSIRGVKDSKVALSTCNGLHGMFEDDTFVYMIEPLELVHDEKSTGRPHIIQKTLAGQYSKQMKNLTMERGDQWPFLSELQWLKRRKRAVNPSRGIFEEMKYLELMIVNDHKTYKKHRSSHAHTNNFAKSVVNLVDSIYKEQLNTRVVLVAVETWTEKDQIDITTNPVQMLHEFSKYRQRIKQHADAVHLISRVTFHYKRSSLSYFGGVCSRTRGVGVNEYGLPMAVAQVLSQSLAQNLGIQWEPSSRKPKCDCTESWGGCIMEETGVSHSRKFSKCSILEYRDFLQRGGGACLFNRPTKLFEPTECGNGYVEAGEECDCGFHVECYGLCCKKCSLSNGAHCSDGPCCNNTSCLFQPRGYECRDAVNECDITEYCTGDSGQCPPNLHKQDGYACNQNQGRCYNGECKTRDNQCQYIWGTKAAGSDKFCYEKLNTEGTEKGNCGKDGDRWIQCSKHDVFCGFLLCTNLTRAPRIGQLQGEIIPTSFYHQGRVIDCSGAHVVLDDDTDVGYVEDGTPCGPSMMCLDRKCLQIQALNMSSCPLDSKGKVCSGHGVCSNEATCICDFTWAGTDCSIRDPVRNLHPPKDEGPKVNMATSRLIGAVAGTILALGVIFGGTGWGIENVKKRRFDPTQQGPI

SEQ ID NO: 4778 - protein, 832 aa, Homo sapiens
MKPPGSSSRQPPLAGCSLAGASCGPQRGPAGSVPASAPARTPPCRLLLVLLLLPPLAASSRPRAWGAAAPSAPHWNETAEKNLGVLADEDNTLQQNSSSNISYSNAMQKEITLPSRLIYYINQDSESPYHVLDTKARHQQKHNKAVHLAQASFQIEAFGSKFILDLILNNGLLSSDYVEIHYENGKPQYSKGGEHCYYHGSIRGVKDSKVALSTCNGLHGMFEDDTFVYMIEPLELVHDEKSTGRPHIIQKTLAGQYSKQMKNLTMERGDQWPFLSELQWLKRRKRAVNPSRGIFEEMKYLELMIVNDHKTYKKHRSSHAHTNNFAKSVVNLVDSIYKEQLNTRVVLVAVETWTEKDQIDITTNPVQMLHEFSKYRQRIKQHADAVHLISRVTFHYKRSSLSYFGGVCSRTRGVGVNEYGLPMAVAQVLSQSLAQNLGIQWEPSSRKPKCDCTESWGGCIMEETGVSHSRKFSKCSILEYRDFLQRGGGACLFNRPTKLFEPTECGNGYVEAGEECDCGFHVECYGLCCKKCSLSNGAHCSDGPCCNNTSCLFQPRGYECRDAVNECDITEYCTGDSGQCPPNLHKQDGYACNQNQGRCYNGECKTRDNQCQYIWGTKAAGSDKFCYEKLNTEGTEKGNCGKDGDRWIQCSKHDVFCGFLLCTNLTRAPRIGQLQGEIIPTSFYHQGRVIDCSGAHVVLDDDTDVGYVEDGTPCGPSMMCLDRKCLQIQALNMSSCPLDSKGKVCSGHGVCSNEATCICDFTWAGTDCSIRDPVRNLHPPKDEGPKEMSRREGSILLSKAPSESAALDGHRLALLDSGYDILAAVLLELLSL

SEQ ID NO: 4779 - protein, 699 aa, Homo sapiens
MQKEITLPSRLIYYINQDSESPYHVLDTKARHQQKHNKAVHLAQASFQIEAFGSKFILDLILNNGLLSSDYVEIHYENGKPQYSKGGEHCYYHGSIRGVKDSKVALSTCNGLHGMFEDDTFVYMIEPLELVHDEKSTGRPHIIQKTLAGQYSKQMKNLTMERGDQWPFLSELQWLKRRKRAVNPSRGIFEEMKYLELMIVNDHKTYKKHRSSHAHTNNFAKSVVNLVDSIYKEQLNTRVVLVAVETWTEKDQIDITTNPVQMLHEFSKYRQRIKQHADAVHLISRVTFHYKRSSLSYFGGVCSRTRGVGVNEYGLPMAVAQVLSQSLAQNLGIQWEPSSRKPKCDCTESWGGCIMEETGVSHSRKFSKCSILEYRDFLQRGGGACLFNRPTKLFEPTECGNGYVEAGEECDCGFHVECYGLCCKKCSLSNGAHCSDGPCCNNTSCLFQPRGYECRDAVNECDITEYCTGDSGQCPPNLHKQDGYACNQNQGRCYNGECKTRDNQCQYIWGTKAAGSDKFCYEKLNTEGTEKGNCGKDGDRWIQCSKHDVFCGFLLCTNLTRAPRIGQLQGEIIPTSFYHQGRVIDCSGAHVVLDDDTDVGYVEDGTPCGPSMMCLDRKCLQIQALNMSSCPLDSKDEGPKACFLKRTKCKSYPKHRKCQEEKVRSYSARPHLNQLRWMDTALHCWILGMTYSQQCYWNY

SEQ ID NO: 4780 - protein, 107 aa, Homo sapiens
  VARIANT 1: note = MOD_RES - Any amino acid
XQIQALNMSSCPLDSKGKVCSGHGVCSNEATCICDFTWAGTDCSIRDPVRNLHPPKDEGPKEMSRREGSILLSKAPSESAALDGHRLALLDSGYDILAAVLLELLSL

SEQ ID NO: 4781 - protein, 2843 aa, Homo sapiens
MAAASYDQLLKQVEALKMENSNLRQELEDNSNHLTKLETEASNMKEVLKQLQGSIEDEAMASSGQIDLLERLKELNLDSSNFPGVKLRSKMSLRSYGSREGSVSSRSGECSPVPMGSFPRRGFVNGSRESTGYLEELEKERSLLLADLDKEEKEKDWYYAQLQNLTKRIDSLPLTENFSLQTDMTRRQLEYEARQIRVAMEEQLGTCQDMEKRAQRRIARIQQIEKDILRIRQLLQSQATEAERSSQNKHETGSHDAERQNEGQGVGEINMATSGNGQGSTTRMDHETASVLSSSSTHSAPRRLTSHLGTKVEMVYSLLSMLGTHDKDDMSRTLLAMSSSQDSCISMRQSGCLPLLIQLLHGNDKDSVLLGNSRGSKEARARASAALHNIIHSQPDDKRGRREIRVLHLLEQIRAYCETCWEWQEAHEPGMDQDKNPMPAPVEHQICPAVCVLMKLSFDEEHRHAMNELGGLQAIAELLQVDCEMYGLTNDHYSITLRRYAGMALTNLTFGDVANKATLCSMKGCMRALVAQLKSESEDLQQVIASVLRNLSWRADVNSKKTLREVGSVKALMECALEVKKESTLKSVLSALWNLSAHCTENKADICAVDGALAFLVGTLTYRSQTNTLAIIESGGGILRNVSSLIATNEDHRQILRENNCLQTLLQHLKSHSLTIVSNACGTLWNLSARNPKDQEALWDMGAVSMLKNLIHSKHKMIAMGSAAALRNLMANRPAKYKDANIMSPGSSLPSLHVRKQKALEAELDAQHLSETFDNIDNLSPKASHRSKQRHKQSLYGDYVFDTNRHDDNRSDNFNTGNMTVLSPYLNTTVLPSSSSSRGSLDSSRSEKDRSLERERGIGLGNYHPATENPGTSSKRGLQISTTAAQIAKVMEEVSAIHTSQEDRSSGSTTELHCVTDERNALRRSSAAHTHSNTYNFTKSENSNRTCSMPYAKLEYKRSSNDSLNSVSSSDGYGKRGQMKPSIESYSEDDESKFCSYGQYPADLAHKIHSANHMDDNDGELDTPINYSLKYSDEQLNSGRQSPSQNERWARPKHIIEDEIKQSEQRQSRNQSTTYPVYTESTDDKHLKFQPHFGQQECVSPYRSRGANGSETNRVGSNHGINQNVSQSLCQEDDYEDDKPTNYSERYSEEEQHEEEERPTNYSIKYNEEKRHVDQPIDYSLKYATDIPSSQKQSFSFSKSSSGQSSKTEHMSSSSENTSTPSSNAKRQNQLHPSSAQSRSGQPQKAATCKVSSINQETIQTYCVEDTPICFSRCSSLSSLSSAEDEIGCNQTTQEADSANTLQIAEIKEKIGTRSAEDPVSEVPAVSQHPRTKSSRLQGSSLSSESARHKAVEFSSGAKSPSKSGAQTPKSPPEHYVQETPLMFSRCTSVSSLDSFESRSIASSVQSEPCSGMVSGIISPSDLPDSPGQTMPPSRSKTPPPPPQTAQTKREVPKNKAPTAEKRESGPKQAAVNAAVQRVQVLPDADTLLHFATESTPDGFSCSSSLSALSLDEPFIQKDVELRIMPPVQENDNGNETESEQPKESNENQEKEAEKTIDSEKDLLDDSDDDDIEILEECIISAMPTKSSRKAKKPAQTASKLPPPVARKPSQLPVYKLLPSQNRLQPQKHVSFTPGDDMPRVYCVEGTPINFSTATSLSDLTIESPPNELAAGEGVRGGAQSGEFEKRDTIPTEGRSTDEAQGGKTSSVTIPELDDNKAEEGDILAECINSAMPKGKSHKPFRVKKIMDQVQQASASSSAPNKNQLDGKKKKPTSPVKPIPQNTEYRTRVRKNADSKNNLNAERVFSDNKDSKKQNLKNNSKVFNDKLPNNEDRVRGSFAFDSPHHYTPIEGTPYCFSRNDSLSSLDFDDDDVDLSREKAELRKAKENKESEAKVTSHTELTSNQQSANKTQAIAKQPINRGQPKPILQKQSTFPQSSKDIPDRGAATDEKLQNFAIENTPVCFSHNSSLSSLSDIDQENNNKENEPIKETEPPDSQGEPSKPQASGYAPKSFHVEDTPVCFSRNSSLSSLSIDSEDDLLQECISSAMPKKKKPSRLKGDNEKHSPRNMGGILGEDLTLDLKDIQRPDSEHGLSPDSENFDWKAIQEGANSIVSSLHQAAAAACLSRQASSDSDSILSLKSGISLGSPFHLTPDQEEKPFTSNKGPRILKPGEKSTLETKKIESESKGIKGGKKVYKSLITGKVRSNSEISGQMKQPLQANMPSISRGRTMIHIPGVRNSSSSTSPVSKKGPPLKTPASKSPSEGQTATTSPRGAKPSVKSELSPVARQTSQIGGSSKAPSRSGSRDSTPSRPAQQPLSRPIQSPGRNSISPGRNGISPPNKLSQLPRTSSPSTASTKSSGSGKMSYTSPGRQMSQQNLTKQTGLSKNASSIPRSESASKGLNQMNNGNGANKKVELSRMSSTKSSGSESDRSERPVLVRQSTFIKEAPSPTLRRKLEESASFESLSPSSRPASPTRSQAQTPVLSPSLPDMSLSTHSSVQAGGWRKLPPNLSPTIEYNDGRPAKRHDIARSHSESPSRLPINRSGTWKREHSKHSSSLPRVSTWRRTGSSSSILSASSESSEKAKSEDEKHVNSISGTKQSKENQVSAKGTWRKIKENEFSPTNSTSQTVSSGATNGAESKTLIYQMAPAVSKTEDVWVRIEDCPINNPRSGRSPTGNTPPVIDSVSEKANPNIKDSKDNQAKQNVGNGSVPMRTVGLENRLNSFIQVDAPDQKGTEIKPGQNNPVPVSETNESSIVERTPFSSSSSSKHSSPSGTVAARVTPFNYNPSPRKSSADSTSARPSQIPTPVNNNTKKRDSKTDSTESSGTQSPKRHSGSYLVTSV

SEQ ID NO: 4782 - protein, 2843 aa, Homo sapiens; identical to SEQ ID NO: 4781

SEQ ID NO: 4783 - protein, 2843 aa, Homo sapiens; identical to SEQ ID NO: 4781

SEQ ID NO: 4784 - protein, 287 aa, Homo sapiens
MAAASYDQLLKQVEALKMENSNLRQELEDNSNHLTKLETEASNMKEVLKQLQGSIEDEAMASSGQIDLLERLKELNLDSSNFPGVKLRSKMSLRSYGSREGSVSSRSGECSPVPMGSFPRRGFVNGSRESTGYLEELEKERSLLLADLDKEEKEKDWYYAQLQNLTKRIDSLPLTENFSLQTDMTRRQLEYEARQIRVAMEEQLGTCQDMEKRAQRRIARIQQIEKDILRIRQLLQSQATEAERSSQNKHETGSHDAERQNEGQGVGEINMATSGNGQIEKMRMFEC

SEQ ID NO: 4785 - protein, 118 aa, Homo sapiens
MAAASYDQLLKQVEALKMENSNLRQELEDNSNHLTKLETEASNMKEVLKQLQGSIEDEAMASSGQIDLLERLKELNLDSSNFPGVKLRSKMSLRSYGSREGSVSSRSGECSPVPMGSF

SEQ ID NO: 4786 - protein, 1305 aa, Homo sapiens
MAAASYDQLLKQVEALKMENSNLRQELEDNSNHLTKLETEASNMKEVLKQLQGSIEDEAMASSGQIDLLERLKELNLDSSNFPGVKLRSKMSLRSYGSREGSVSSRSGECSPVPMGSFPRRGFVNGSRESTGYLEELEKERSLLLADLDKEEKEKDWYYAQLQNLTKRIDSLPLTENFSLQTDMTRRQLEYEARQIRVAMEEQLGTCQDMEKRAQRRIARIQQIEKDILRIRQLLQSQATEAERSSQNKHETGSHDAERQNEGQGVGEINMATSGNGQGSTTRMDHETASVLSSSSTHSAPRRLTSHLGTKVEMVYSLLSMLGTHDKDDMSRTLLAMSSSQDSCISMRQSGCLPLLIQLLHGNDKDSVLLGNSRGSKEARARASAALHNIIHSQPDDKRGRREIRVLHLLEQIRAYCETCWEWQEAHEPGMDQDKNPMPAPVEHQICPAVCVLMKLSFDEEHRHAMNELGGLQAIAELLQVDCEMYGLTNDHYSITLRRYAGMALTNLTFGDVANKATLCSMKGCMRALVAQLKSESEDLQQVIASVLRNLSWRADVNSKKTLREVGSVKALMECALEVKKESTLKSVLSALWNLSAHCTENKADICAVDGALAFLVGTLTYRSQTNTLAIIESGGGILRNVSSLIATNEDHRQILRENNCLQTLLQHLKSHSLTIVSNACGTLWNLSARNPKDQEALWDMGAVSMLKNLIHSKHKMIAMGSAAALRNLMANRPAKYKDANIMSPGSSLPSLHVRKQKALEAELDAQHLSETFDNIDNLSPKASHRSKQRHKQSLYGDYVFDTNRHDDNRSDNFNTGNMTVLSPYLNTTVLPSSSSSRGSLDSSRSEKDRSLERERGIGLGNYHPATENPGTSSKRGLQISTTAAQIAKVMEEVSAIHTSQEDRSSGSTTELHCVTDERNALRRSSAAHTHSNTYNFTKSENSNRTCSMPYAKLEYKRSSNDSLNSVSSSDGYGKRGQMKPSIESYSEDDESKFCSYGQYPADLAHKIHSANHMDDNDGELDTPINYSLKYSDEQLNSGRQSPSQNERWARPKHIIEDEIKQSEQRQSRNQSTTYPVYTESTDDKHLKFQPHFGQQECVSPYRSRGANGSETNRVGSNHGINQNVSQSLCQEDDYEDDKPTNYSERYSEEEQHEEEERPTNYSIKYNEEKRHVDQPIDYSLKYATDIPSSQKQSFSFSKSSSGQSSKTEHMSSSSENTSTPSSNAKRQNQLHPSSAQSRSGQPQKAATCKVSSINQETIQTYCVEDTPICFSRCSSLSSLSSAEDEIGCNQTTQEADSANTLQIA

SEQ ID NO: 4787 - protein, 931 aa, Homo sapiens
MAEIKEKICDYLFNVSDSSALNLAKNIGLTKARDINAVLIDMERQGDVYRQGTTPPIWHLTDKKRERMQIKRNTNSVPETAPAAIPETKRNAEFLTCNIPTSNASNNMVTTEKVENGQEPVIKLENRQEARPEPARLKPPVHYNGPSKAGYVDFENGQWATDDIPDDLNSIRAAPGEFRAIMEMPSFYSHGLPRCSPYKKLTECQLKNPISGLLEYAQFASQTCEFNMIEQSGPPHEPRFKFQVVINGREFPPAEAGSKKVAKQDAAMKAMTILLEEAKAKDSGKSEESSHYSTEKESEKTAESQTPTPSATSFFSGKSPVTTLLECMHKLGNSCEFRLLSKEGPAHEPKFQYCVAVGAQTFPSVSAPSKKVAKQMAAEEAMKALHGEATNSMASDNQPEGMISESLDNLESMMPNKVRKIGELVRYLNTNPVGGLLEYARSHGFAAEFKLVDQSGPPHEPKFVYQAKVGGRWFPAVCAHSKKQGKQEAADAALRVLIGENEKAERMGFTEVTPVTGASLRRTMLLLSRSPEAQPKTLPLTGSTFHDQIAMLSHRCFNTLTNSFQPSLLGRKILAAIIMKKDSEDMGVVVSLGTGNRCVKGDSLSLKGETVNDCHAEIISRRGFIRFLYSELMKYNSQTAKDSIFEPAKGGEKLQIKKTVSFHLYISTAPCGDGALFDKSCSDRAMESTESRHYPVFENPKQGKLRTKVENGEGTIPVESSDIVPTWDGIRLGERLRTMSCSDKILRWNVLGLQGALLTHFLQPIYLKSVTLGYLFSQGHLTRAICCRVTRDGSAFEDGLRHPFIVNHPKVGRVSIYDSKRQSGKTKETSVNWCLADGYDLEILDGTRGTVDGPRNELSRVSKKNIFLLFKKLCSFRYRRDLLRLSYGEAKKAARDYETAKNYFKKGLKDMGYGNWISKPQEEKNFYLCPV

SEQ ID NO: 4788 - protein, 1226 aa, Homo sapiens
MNPRQGYSLSGYYTHPFQGYEHRQLRYQQPGPGSSPSSFLLKQIEFLKGQLPEAPVIGKQTPSLPPSLPGLRPRFPVLLASSTRGRQVDIRGVPRGVHLRSQGLQRGFQHPSPRGRSLPQRGVDCLSSHFQELSIYQDQEQRILKFLEELGEGKATTAHDLSGKLGTPKKEINRVLYSLAKKGKLQKEAGTPPLWKIAVSTQAWNQHSGVVRPDGHSQGAPNSDPSLEPEDRNSTSVSEDLLEPFIAVSAQAWNQHSGVVRPDSHSQGSPNSDPGLEPEDSNSTSALEDPLEFLDMAEIKEKICDYLFNVSDSSALNLAKNIGLTKARDINAVLIDMERQGDVYRQGTTPPIWHLTDKKRERMQIKRNTNSVPETAPAAIPETKRNAEFLTCNIPTSNASNNMVTTEKVENGQEPVIKLENRQEARPEPARLKPPVHYNGPSKAGYVDFENGQWATDDIPDDLNSIRAAPGEFRAIMEMPSFYSHGLPRCSPYKKLTECQLKNPISGLLEYAQFASQTCEFNMIEQSGPPHEPRFKFQVVINGREFPPAEAGSKKVAKQDAAMKAMTILLEEAKAKDSGKSEESSHYSTEKESEKTAESQTPTPSATSFFSGKSPVTTLLECMHKLGNSCEFRLLSKEGPAHEPKFQYCVAVGAQTFPSVSAPSKKVAKQMAAEEAMKALHGEATNSMASDNQPEGMISESLDNLESMMPNKVRKIGELVRYLNTNPVGGLLEYARSHGFAAEFKLVDQSGPPHEPKFVYQAKVGGRWFPAVCAHSKKQGKQEAADAALRVLIGENEKAERMGFTEVTPVTGASLRRTMLLLSRSPEAQPKTLPLTGSTFHDQIAMLSHRCFNTLTNSFQPSLLGRKILAAIIMKKDSEDMGVVVSLGTGNRCVKGDSLSLKGETVNDCHAEIISRRGFIRFLYSELMKYNSQTAKDSIFEPAKGGEKLQIKKTVSFHLYISTAPCGDGALFDKSCSDRAMESTESRHYPVFENPKQGKLRTKVENGEGTIPVESSDIVPTWDGIRLGERLRTMSCSDKILRWNVLGLQGALLTHFLQPIYLKSVTLGYLFSQGHLTRAICCRVTRDGSAFEDGLRHPFIVNHPKVGRVSIYDSKRQSGKTKETSVNWCLADGYDLEILDGTRGTVDGPRNELSRVSKKNIFLLFKKLCSFRYRRDLLRLSYGEAKKAARDYETAKNYFKKGLKDMGYGNWISKPQEEKNFYLCPV

SEQ ID NO: 4789 - protein, 1195 aa, Homo sapiens
GYSLSGYYTHPFQGYEHRQLRYQQPGPGSSPSSFLLKQIEFLKGQLPEAPVIGKQTPSLPPSLPGLRPRFPVLLASSTRGRQVDIRGVPRGVHLRSQGLQRGFQHPSPRGRSLPQRGVDCLSSHFQELSIYQDQEQRILKFLEELGEGKATTAHDLSGKLGTPKKEINRVLYSLAKKGKLQKEAGTPPLWKIAVSTQAWNQHSGVVRPDGHSQGAPNSDPSLEPEDRNSTSVSEDLLEPFIAVSAQAWNQHSGVVRPDSHSQGSPNSDPGLEPEDSNSTSALEDPLEFLDMAEIKEKICDYLFNVSDSSALNLAKNIGLTKARDINAVLIDMERQGDVYRQGTTPPIWHLTDKKRERMQIKRNTNSVPETAPAAIPETKRNAEFLTCNIPTSNASNNMVTTEKVENGQEPVIKLENRQEARPEPARLKPPVHYNGPSKAGYVDFENGQWATDDIPDDLNSIRAAPGEFRAIMEMPSFYSHGLPRCSPYKKLTECQLKNPISGLLEYAQFASQTCEFNMIEQSGPPHEPRFKFQVVINGREFPPAEAGSKKVAKQDAAMKAMTILLEEAKAKDSGKSEESSHYSTEKESEKTAESQTPTPSATSFFSGKSPVTTLLECMHKLGNSCEFRLLSKEGPAHEPKFQYCVAVGAQTFPSVSAPSKKVAKQMAAEEAMKALHGEATNSMASDNQPEGMISESLDNLESMMPNKVRKIGELVRYLNTNPVGGLLEYARSHGFAAEFKLVDQSGPPHEPKFVYQAKVGGRWFPAVCAHSKKQGKQEAADAALRVLIGENEKAERMGFTELPLTGSTFHDQIAMLSHRCFNTLTNSFQPSLLGRKILAAIIMKKDSEDMGVVVSLGTGNRCVKGDSLSLKGETVNDCHAEIISRRGFIRFLYSELMKYNSQTAKDSIFEPAKGGEKLQIKKTVSFHLYISTAPCGDGALFDKSCSDRAMESTESRHYPVFENPKQGKLRTKVENGEGTIPVESSDIVPTWDGIRLGERLRTMSCSDKILRWNVLGLQGALLTHFLQPIYLKSVTLGYLFSQGHLTRAICCRVTRDGSAFEDGLRHPFIVNHPKVGRVSIYDSKRQSGKTKETSVNWCLADGYDLEILDGTRGTVDGPRNELSRVSKKNIFLLFKKLCSFRYRRDLLRLSYGEAKKAARDYETAKNYFKKGLKDMGYGNWISKPQEEKNFYLCPV

SEQ ID NO: 4790 - protein, 175 aa, Homo sapiens
MGKVLSKIFGNKEMRILMLGLDAAGKTTILYKLKLGQSVTTIPTVGFNVETVTYKNVKFNVWDVGGQDKIRPLWRHYYTGTQGLIFVVDCADRDRIDEARQELHRIINDREMRDAIILIFANKQDLPDAMKPHEIQEKLGLTRIRDRNWYVQPSCATSGDGLYEGLTWLTSNYKS

SEQ ID NO: 4791 - protein, 465 aa, Homo sapiens
MFRQEQPLAEGSFAPMGSLQPDAGNASWNGTEAPGGGARATPYSLQVTLTLVCLAGLLMLLTVFGNVLVIIAVFTSRALKAPQNLFLVSLASADILVATLVIPFSLANEVMGYWYFGKAWCEIYLALDVLFCTSSIVHLCAISLDRYWSITQAIEYNLKRTPRRIKAIIITVWVISAVISFPPLISIEKKGGGGGPQPAEPRCEINDQKWYVISSCIGSFFAPCLIMILVYVRIYQIAKRRTRVPPSRRGPDAVAAPPGGTERRPNGLGPERSAGPGGAEAEPLPTQLNGAPGEPAPAGPRDTDALDLEESSSSDHAERPPGPRRPERGPRGKGKARASQVKPGDSLPRRGPGATGIGTPAAGPGEERVGAAKASRWRGRQNREKRFTFVLAVVIGVFVVCWFPFFFTYTLTAVGCSVPRTLFKFFFWFGYCNSSLNPVIYTIFNHDFRRAFKKILCRGDRKRIV

SEQ ID NO: 4792 - protein, 541 aa, Homo sapiens
MPGRCQSDAAMRVNGPASRAPAGWTSGSLHTGPRAGRPRAQARGVRGRGLLLRPRPAKELPLPRKGGAWAPAGNPGPLHPLGVAVGMAGSGRLVLRPWIRELILGSETPSSPRAGQLLEDAEAAVAGPSHAPDTSDVGATLLVSDGTHSVRCLVTREALDTSDWEEKEFGFRGTEGRLLLLQDCGVHVQVAEGGAPAEFYLQVDRFSLLPTEQPRLRVPGCNQDLDVQKKLYDCLEEHLSESTSSNAGLSLSQLLDEMREDQEHQGALVCLAESCLTLEGPCTAPPVTHWAASRCKATGEAVYTVPSSMLCISENDQLILSSLGPCQRTQGPELPPPDPALQDLSLTLIASPPSSPSSSGTPALPGHMSSEESGTSISLLPALSLAAPDPGQRSSSQPSPAICSAPATLTPRSPHASRTPSSPLQSCTPSLSPRSHVPSPHQALVTRPQKPSLEFKEFVGLPCKNRPPFPRTGATRGAQEPCSVWEPPKRHRDGSAFQYEYEPPCTSLCARVQAVRLPPQLMAWALHFLMDAQPGSEPTPM

SEQ ID NO: 4793 - protein, 544 aa, Homo sapiens
MPGRCQSDAAMRVNGPASRAPAGWTSGSLHTGPRAGRPRAQARGVRGRGLLLRPRPAKELPLPRKGGAWAPAGNPGPLHPLGVAVGMAGSGRLVLRPWIRELILGSETPSSPRAGQLLEVLQDAEAAVAGPSHAPDTSDVGATLLVSDGTHSVRCLVTREALDTSDWEEKEFGFRGTEGRLLLLQDCGVHVQVAEGGAPAEFYLQVDRFSLLPTEQPRLRVPGCNQDLDVQKKLYDCLEEHLSESTSSNAGLSLSQLLDEMREDQEHQGALVCLAESCLTLEGPCTAPPVTHWAASRCKATGEAVYTVPSSMLCISENDQLILSSLGPCQRTQGPELPPPDPALQDLSLTLIASPPSSPSSSGTPALPGHMSSEESGTSISLLPALSLAAPDPGQRSSSQPSPAICSAPATLTPRSPHASRTPSSPLQSCTPSLSPRSHVPSPHQALVTRPQKPSLEFKEFVGLPCKNRPPFPRTGATRGAQEPCSVWEPPKRHRDGSAFQYEYEPPCTSLCARVQAVRLPPQLMAWALHFLMDAQPGSEPTPM

SEQ ID NO: 4794 - protein, 185 aa, Homo sapiens
MKLVSVALMYLGSLAFLGADTARLDVASEFRKKWNKWALSRGKRELRMSSSYPTGLADVKAGPAQTLIRPQDMKGASRSPEDSSPDAARIRVKRYRQSMNNFQGLRSFGCRFGTCTVQKLAHQIYQFTDKDKDNVAPRSKISPQGYGRRRRRSLPEAGPGRTLVSSKPQAHGAPAPPSGSAPHFL

SEQ ID NO: 4795 - protein, 185 aa, Homo sapiens; identical to SEQ ID NO: 4794

SEQ ID NO: 4796 - protein, 185 aa, Homo sapiens; identical to SEQ ID NO: 4794

SEQ ID NO: 4797 - protein, 233 aa, Homo sapiens
MAAGTAVGAWVLVLSLWGAVVGAQNITARIGEPLVLKCKGAPKKPPQRLEWKLNTGRTEAWKVLSPQGGGPWDSVARVLPNSSLFLPAVGIQDEGIFRCQAMNRNGKETKSNYRVRVYQIPGKPEIVDSASELTAGVPNKVVEESRRSRKRPCEQEVGTCVSEGSYPAGTLSWHLDGKPLVPNEKGVSVKEQTRRHPETGLFTLQSELMVTPARGGDPRPTFSCSFSPGLPRH

SEQ ID NO: 4798 - protein, 342 aa, Homo sapiens
MAAGTAVGAWVLVLSLWGAVVGAQNITARIGEPLVLKCKGAPKKPPQRLEWKLGGGPWDSVARVLPNSSLFLPAVGIQDEGIFRCQAMNRNGKETKSNYRVRVYQIPGKPEIVDSASELTAGVPNKVGTCVSEGSYPAGTLSWHLDGKPLVPNEKGVSVKEQTRRHPETGLFTLQSELMVTPARGGDPRPTFSCSFSPGLPRHRALRTAPIQPRVWEPVPLEEVQLVVEPEGGAVAPGGTVTLTCEVPAQPSPQIHWMKDVSDLERGAGRTRRGGANCRLCGRIRAGNSSPGPGDPGRPGDSRPAHWGHLVAKAATPRRGEEGPRKPGGRGGACRTESVGGT

SEQ ID NO: 4799 - protein, 347 aa, Homo sapiens
MAAGTAVGAWVLVLSLWGAVVGAQNITARIGEPLVLKCKGAPKKPPQRLEWKLNTGRTEAWKVLSPQGGGPWDSVARVLPNSSLFLPAVGIQDEGIFRCQAMNRNGKETKSNYRVRVYQIPGKPEIVDSASELTAGVPNKVGTCVSEGSYPAGTLSWHLDGKPLVPNEKGVSVKEQTRRHPETGLFTLQSELMVTPARGGDPRPTFSCSFSPGLPRHRALRTAPIQPRVWEPVPLEEVQLVVEPEGGAVAPGGTVTLTCEVPAQPSPQIHWMKDGVPLPLPPSPVLILPEIGPQDQGTYSCVATHSSHGPQESRAVSISIIEPGEEGPTAGEGFDKVREAEDSPQHM

SEQ ID NO: 4800 - protein, 404 aa, Homo sapiens [sequence omitted]

SEQ ID NO: 4801 - protein, 234 aa, Homo sapiens
MAAGTAVGAWVLVLSLWGAVVGAQNITARIGEPLVLKCKGAPKKPPQRLEWKLNTGRTEAWKVLSPQGGGPWDSVARVLPNSSLFLPAVGIQDEGIFRCQAMNRNGKETKSNYRSLRTFTITASDWIFPPSEIPGKPEIVDSASELTAGVPNKVGTCVSEGSYPAGTLSWHLDGKPLVPNEKGVSVKEQTRRHPETGLFTLQSELMVTPARGGDPRPTFSCSFSPGLPRHRALR

SEQ ID NO: 4802 - protein, 133 aa, Homo sapiens
MKDGVPLPLPPSPVLILPEIGPQDQGTYSCVATHSSHGPQESRAVSISIIEPGEEGPTAGSVGGSGLGTLALALGILGGLGTAALLIGVILWQRRQRRGEERKAPENQEEEEERAELNQSEEPEAGESSTGGP

SEQ ID NO: 4803 - protein, 435 aa, Homo sapiens
MGAGERVQAPPRAEATAGRGADRARTLEGSRMAAGTAVGAWVLVLSLWGAVVGAQNITARIGEPLVLKCKGAPKKPPQRLEWKLNTGRTEAWKVLSPQGGGPWDSVARVLPNSSLFLPAVGIQDEGIFRCQAMNRNGKETKSNYRVRVYQIPGKPEIVDSASELTAGVPNKVGTCVSEGSYPAGTLSWHLDGKPLVPNEKGVSVKEQTRRHPETGLFTLQSELMVTPARGGDPRPTFSCSFSPGLPRHRALRTAPIQPRVWEPVPLEEVQLVVEPEGGAVAPGGTVTLTCEVPAQPSPQIHWMKDGVPLPLPPSPVLILPEIGPQDQGTYSCVATHSSHGPQESRAVSISIIEPGEEGPTAGSVGGSGLGTLALALGILGGLGTAALLIGVILWQRRQRRGEERKAPENQEEEEERAELNQSEEPEAGESSTGGP

SEQ ID NO: 4804 - protein, 128 aa, Homo sapiens
MAAGTAVGAWVLVLSLWGAVVGAQNITARIGEPLVLKCKGAPKKPPQRLEWKLNTGRTEAWKVLSPQGGGPWDSVARVLPNSSLFLPAVGIQDEGIFRCQAMNRNGKETKSNYRVRVYQFENLHNYSL

SEQ ID NO: 4805 - protein, 153 aa, Homo sapiens
MAAGTAVGAWVLVLSLWGAVVGAQNITARIGEPLVLKCKGAPKKPPQRLEWKLNTGRTEAWKVLSPQGGGPWDSVARVLPNSSLFLPAVGIQDEGILGGLGTAALLIGVILWQRRQRRGEERKAPENQEEEEERAELNQSEEPEAGESSTGGP

SEQ ID NO: 4806 - protein, 294 aa, Homo sapiens
MNRNGKETKSNYRVRVYQIPGKPEIVDSASELTAGVPNKVGTCVSEGSYPAGTLSWHLDGKPLVPNEKGVSVKEQTRRHPETGLFTLQSELMVTPARGGDPRPTFSCSFSPGLPRHRALRTAPIQPRVWEPVPLEEVQLVVEPEGGAVAPGGTVTLTCEVPAQPSPQIHWMKDGVPLPLPPSPVLILPEIGPQDQGTYSCVATHSSHGPQESRAVSISIIGSVGGSGLGTLALALGILGGLGTAALLIGVILWQRRQRRGEERKAPENQEEEEERAELNQSEEPEAGESSTGGP

SEQ ID NO: 4807 - protein, 121 aa, Homo sapiens
MAAGTAVGAWVLVLSLWGAVVGAQNITARIGEPLVLKCKGAPKKPPQRLEWKLNTGRTEAWKVLSPQGGGPWDSVARVLPNSSLFLPAVGIQDEGIFRCQAMNRNGKETKSNWWWSQKVEQ

SEQ ID NO: 4808 - protein, 363 aa, Homo sapiens
MAAGTAVGAWVLVLSLWGAVVGAQNITARIGEPLVLKCKGAPKKPPQRLEWKLNTGRTEAWKVLSPQGGGPWDSVARVLPNSSLFLPAVGIQDEGIFRCQAMNRNGKETKSNYRVRVYQIPGKPEIVDSASELTAGVPNKVVEESRRSRKRPCEQEVGTCVSEGSYPAGTLSWHLDGKPLVPNEKGVSVKEQTRRHPETGLFTLQSELMVTPARGGDPRPTFSCSFSPGLPRHRALRTAPIQPRVWEPVPLEEVQLVVEPEGGAVAPGGTVTLTCEVPAQPSPQIHWMKDGVPLPLPPSPVLILPEIGPQDQGTYSCVATHSSHGPQESRAVSISIIEPGEEGPTAGEGFDKVREAEDSPQHM

SEQ ID NO: 4809 - protein, 1210 aa, Homo sapiens
MAAQSSLYNDDRNLLRIREKERRNQEAHQEKEAFPEKIPLFGEPYKTAKGDELSSRIQNMLGNYEEVKEFLSTKSHTHRLDASENRLGKPKYPLIPDKGSSIPSSSFHTSVHHQSIHTPASGPLSVGNISHNPKMAQPRTEPMPSLHAKSCGPPDSQHLTQDRLGQEGFGSSHHKKGDRRADGDHCASVTDSAPERELSPLISLPSPVPPLSPIHSNQQTLPRTQGSSKVHGSSNNSKGYCPAKSPKDLAVKVHDKETPQDSLVAPAQPPSQTFPPPSLPSKSVAMQQKPTAYVRPMDGQDQAPSESPELKPLPEDYRQQTFEKTDLKVPAKAKLTKLKMPSQSVEQTYSNEVHCVEEILKEMTHSWPPPLTAIHTPSTAEPSKFPFPTKDSQHVSSVTQNQKQYDTSSKTHSNSQQGTSSMLEDDLQLSDSEDSDSEQTPEKPPSSSAPPSAPQSLPEPVASAHSSSAESESTSDSDSSSDSESESSSSDSEENEPLETPAPEPEPPTTNKWQLDNWLTKVSQPAAPPEGPRSTEPPRRHPESKGSSDSATSQEHSESKDPPPKSSSKAPRAPPEAPHPGKRSCQKSPAQQEPPQRQTVGTKQPKKPVKASARAGSRTSLQGEREPGLLPYGSRDQTSKDKPKVKTKGRPRAAASNEPKPAVPPSSEKKKHKSSLPAPSKALSGPEPAKDNVEDRTPEHFALVPLTESQGPPHSGSGSRTSGCRQAVVVQEDSRKDRLPLPLRDTKLLSPLRDTPPPQSLMVKITLDLLSRIPQPPGKGSRQRKAEDKQPPAGKKHSSEKRSSDSSSKLAKKRKGEAERDCDNKKIRLEKEIKSQSSSSSSSHKESSKTKPSRPSSQSSKKEMLPPPPVSSSSQKPAKPALKRSRREADTCGQDPPKSASSTKSNHKDSSIPKQRRVEGKGSRSSSEHKGSSGDTANPFPVPSLPNGNSKPGKPQVKFDKQQADLHMREAKKMKQKAELMTDRVGKAFKYLEAVLSFIECGIATESESQSSKSAYSVYSETVDLIKFIMSLKSFSDATAPTQEKIFAVLCMRCQSILNMAMFRCKKDIAIKYSRTLNKHFESSSKVAQAPSPCIASTGTPSPLSPMPSPASSVGSQSSAGSVGSSGVAATISTPVTIQNMTSSYVTITSHVLTAFDLWEQAEALTRKNKEFFARLSTNVCTLALNSSLVDLVHYTRQGFQQLQELTKTP

SEQ ID NO: 4810 - protein, 421 aa, Homo sapiens
MAFTERVNSSGNSLYNDDRNLLRIREKERRNQEAHQEKEAFPEKIPLFGEPYKTAKGDELSSRIQNMLGNYEEVKEFLSTKSHTHRLDASENRLGKPKYPLIPDKGSSIPSSSFHTSVHHQSIHTPASGPLSVGNISHNPKMAQPRTEPMPSLHAKSCGPPDSQHLTQDRLGQEGFGSSHHKKGDRRADGDHCASVTDSAPERELSPLISLPSPVPPLSPIHSNQQTLPRTQGSSKVHGSSNNSKGYCPAKSPKDLAVKVHDKETPQDSLVAPAQPPSQTFPPPSLPSKSVAMQQKPTAYVRPMDGQDQAPSESPELKPLPEDYRQQTFEKTDLKVPAKAKLTKLKMPSQSVEQTYSNEVHCVEEILKDSQHVSSVTQNQKQYDTSSKTHSNSQQGTSSMLEDDLQLSDSEDSDSEQTPAP

SEQ ID NO: 4811 - protein, 1218 aa, Homo sapiens
MAFTERVNSSGNSLYNDDRNLLRIREKERRNQEAHQEKEAFPEKIPLFGEPYKTAKGDELSSRIQNMLGNYEEVKEFLSTKSHTHRLDASENRLGKPKYPLIPDKGSSIPSSSFHTSVHHQSIHTPASGPLSVGNISHNPKMAQPRTEPMPSLHAKSCGPPDSQHLTQDRLGQEGFGSSHHKKGDRRADGDHCASVTDSAPERELSPLISLPSPVPPLSPIHSNQQTLPRTQGSSKVHGSSNNSKGYCPAKSPKDLAVKVHDKETPQDSLVAPAQPPSQTFPPPSLPSKSVAMQQKPTAYVRPMDGQDQAPSESPELKPLPEDYRQQTFEKTDLKVPAKAKLTKLKMPSQSVEQTYSNEVHCVEEILKEMTHSWPPPLTAIHTPSTAEPSKFPFPTKDSQHVSSVTQNQKQYDTSSKTHSNSQQGTSSMLEDDLQLSDSEDSDSEQTPEKPPSSSAPPSAPQSLPEPVASAHSSSAESESTSDSDSSSDSESESSSSDSEENEPLETPAPEPEPPTTNKWQLDNWLTKVSQPAAPPEGPRSTEPPRRHPESKGSSDSATSQEHSESKDPPPKSSSKAPRAPPEAPHPGKRSCQKSPAQQEPPQRQTVGTKQPKKPVKASARAGSRTSLQGEREPGLLPYGSRDQTSKDKPKVKTKGRPRAAASNEPKPAVPPSSEKKKHKSSLPAPSKALSGPEPAKDNVEDRTPEHFALVPLTESQGPPHSGSGSRTSGCRQAVVVQEDSRKDRLPLPLRDTKLLSPLRDTPPPQSLMVKITLDLLSRIPQPPGKGSRQRKAEDKQPPAGKKHSSEKRSSDSSSKLAKKRKGEAERDCDNKKIRLEKEIKSQSSSSSSSHKESSKTKPSRPSSQSSKKEMLPPPPVSSSSQKPAKPALKRSRREADTCGQDPPKSASSTKSNHKDSSIPKQRRVEGKGSRSSSEHKGSSGDTANPFPVPSLPNGNSKPGKPQVKFDKQQADLHMREAKKMKQKAELMTDRVGKAFKYLEAVLSFIECGIATESESQSSKSAYSVYSETVDLIKFIMSLKSFSDATAPTQEKIFAVLCMRCQSILNMAMFRCKKDIAIKYSRTLNKHFESSSKVAQAPSPCIARSTGTPSPLSPMPSPASSVGSQSSAGSVGSSGVAATISTPVTIQNMTSSYVTITSHVLTAFDLWEQAEALTRKNKEFFARLSTNVCTLALNSSLVDLVHYTRQGFQQLQELTKTP

SEQ ID NO: 4812 - protein, 406 aa, Homo sapiens
MAFTERVNSSGNSLYNDDRNLLRIREKERRNQEAHQEKEAFPEKIPLFGEPYKTAKGDELSSRIQNMLGNYEEVKEFLSTKSHTHRLDASENRLGKPKYPLIPDKGSSIPSSSFHTSVHHQSIHTPASGPLSVGNISHNPKMAQPRTEPMPSLHAKSCGPPDSQHLTQDRLGQEGFGSSHHKKGDRRADGDHCASVTDSAPERELSPLISLPSPVPPLSPIHSNQQTLPRTQGSSKVHGSSNNSKGYCPAKSPKDLAVKVHDKETPQDSLVAPAQPPSQTFPPPSLPSKSVAMQQKPTAYVRPMDGQDQAPSESPELKPLPEDYRQQTFEKTDLKVPAKAKLTKLKMPSQSVETYSNEVHCVEEILKEMTHSWPPPLTAIHTPSTAEPSKFPFPTKDSQHVSSVTQ

SEQ ID NO: 4813 - protein, 490 aa, Homo sapiens
MPSQSVEQTYSNEVHCVEEILKEMTHSWPPPLTAIHTPSTAEPSKFPFPTKDSQHVSSVTQNQKQYDTSSKTHSNSQQGTSSMLEDDLQLSDSEDSDSEQTPEKPPHLHLQVLHSPFQNQWHQHIPAVQSQKAPVTQTVPQTQRARAVQDSEENEPLETPAPEPEPPTTNKWQLDNWLTKVSQPAAPPEGPRSTEPPRRHPESKGSSDSATSQEHSESKDPPPKSSSKAPRAPPEAPHPGKRSCQKSPAQQEPPQRQTVGTKQPKKPVKASARAGSRTSLQGEREPGLLPYGSRDQTSKDKPKVKTKGRPRAAASNEPKPAVPPSSEKKKHKSSLPAPSKALSGPEPAKDNVEDRTPEHFALVPLTESQGPPHSGSGSRTSGCRQAVVVQEDSRKDRLPLPLRDTKLLSPLRDTPPPQSLMVKITLDLLSRIPQPPGKGSRQRKAEDKQPPAGKKHSSEKRSSDSSSKLAKKRKGEAERDCDNKKIRLEK

SEQ ID NO: 4814 - protein, 849 aa, Homo sapiens
MTHSWPPPLTAIHTPSTAEPSKFPFPTKDSQHVSSVTQNQKQYDTSSKTHSNSQQGTSSMLEDDLQLSDSEDSDSEQTPEKPPSSSAPPSAPQSLPEPVASAHSSSAESESTSDSDSSSDSESESSSSDSEENEPLETPAPEPEPPTTNKWQLDNWLTKVSQPAAPPEGPRSTEPPRRHPESKGSSDSATSQEHSESKDPPPKSSSKAPRAPPEAPHPGKRSCQKSPAQQEPPQRQTVGTKQPKKPVKASARAGSRTSLQGEREPGLLPYGSRDQTSKDKPKVKTKGRPRAAASNEPKPAVPPSSEKKKHKSSLPAPSKALSGPEPAKDNVEDRTPEHFALVPLTESQGPPHSGSGSRTSGCRQAVVVQEDSRKDRLPLPLRDTKLLSPLRDTPPPQSLMVKITLDLLSRIPQPPGKGSRQRKAEDKQPPAGKKHSSEKRSSDSSSKLAKKRKGEAERDCDNKKIRLEKEIKSQSSSSSSSHKESSKTKPSRPSSQSSKKEMLPPPPVSSSSQKPAKPALKRSRREADTCGQDPPKSASSTKSNHKDSSIPKQRRVEGKGSRSSSEHKGSSGDTANPFPVPSLPNGNSKPGKPQVKFDKQQADLHMREAKKMKQKAELMTDRVGKAFKYLEAVLSFIECGIATESESQSSKSAYSVYSETVDLIKFIMSLKSFSDATAPTQEKIFAVLCMRCQSILNMAMFRCKKDIAIKYSRTLNKHFESSSKVAQAPSPCIARSTGTPSPLSPMPSPASSVGSQSSAGSVGSSGVAATISTPVTIQNMTSSYVTITSHVLTAFDLWEQAEALTRKNKEFFARLSTNVCTLALNSSLVDLVHYTRQGFQQLQELTKTP

SEQ ID NO: 4815 - protein, 791 aa, Homo sapiens
MPDMHFKAPKISMPDVDLHLKGPKVKGDVDVSVPKLEGDLTGPSVGVEVPDVELECPDAKLKGPKFKMPEMHFKTPKISMPDVDLHLKGPKVKGDMDVSVPKVEGEMKVPDVDIKGPKMDIDAPDVDVHGPDWHLKMPKMKMPKFSMPGFKAEGPEVDVNLPKADVVVSGPKVDVEVPDVSLEGPEGKLKGPKLKMPEMHFKAPKISMPDVDLHLKGPKVKGDVDVSLPKLEGDLTGPSVDVEVPDVELECPDAKLKGPKFKMPEMHFKTPKISMPDVNLNLKGPKVKGDMDVSVPKVEGEMKVPDVDIRGPKVDIDAPDVDVHGPDWHLKMPKMKMPKFSMPGFKGEGPEVDVNLPKADVDVSGPKVDVEVPDVSLEGPEGKLKGPKFKMPEMHFKTPKISMPDVDFNLKGPKIKGDVDVSAPKLEGELKGPELDVKGPKLDADMPEVAVEGPNGKWKTPKFKMPDMHFKAPKISMPDLDLHLKSPKAKGEVDVDVPKLEGDLKGPHVDVSGPDIDIEGPEGKLKGPKFKMPDMHFKAPNISMPDVDLNLKGPKIKGDVDVSVPEVEGKLEVPDMNIRGPKVDVNAPDVQAPDWHLKMPKMKMPKFSMPGFKAEGPEVDVNLPKADVDISGPKVDIEGPDVNIEGPEGKLKGPKLKMPEMNIKAPKISMPDFDLHLKGPKVKGDVDVSLPKVEGDLKGPEVDIKGPKVDINAPDVGVQGPDWHLKMPKVKMPKFSMPGFKGEGPDGDVKLPKADIDVSGPKVDIEGPDVNIEGPEGKLKGPKFKMAQRWW

SEQ ID NO: 4816 - protein, 149 aa, Homo sapiens
MEKEETTRELLLPNWQGSGSHGLTIAQRDDGVFVQEVTQNSPAARTGVVKEGDQIVGATIYFDNLQSGEVTQLLNTMGHHTVGLKLHRKGDRSPEPGQTWTREVFSSCSSEVVLNTPQPSALECKDQNKQKEASSQAGAVSVSTPNAGL

SEQ ID NO: 4817 - protein, 5890 aa, Homo sapiens
MEKEETTRELLLPNWQGSGSHGLTIAQRDDGVFVQEVTQNSPAARTGVVKEGDQIVGATIYFDNLQSGEVTQLLNTMGHHTVGLKLHRKGDRSPEPGQTWTREVFSSCSSEVVLSGDDEEYQRIYTTKIKPRLKSEDGVEGDLGETQSRTITVTRRVTAYTVDVTGREGAKDIDISSPEFKIKIPRHELTEISNVDVETQSGKTVIRLPSGSGAASPTGSAVDIRAGAISASGPELQGAGHSKLQVTMPGIKVGGSGVNVNAKGLDLGGRGGVQVPAVDISSSLGGRAVEVQGPSLESGDHGKIKFPTMKVPKFGVSTGREGQTPKAGLRVSAPEVSVGHKGGKPGLTIQAPQLEVSVPSANIEGLEGKLKGPQITGPSLEGDLGLKGAKPQGHIGVDASAPQIGGSITGPSVEVQAPDIDVQGPGSKLNVPKMKVPKFSVSGAKGEETGIDVTLPTGEVTVPGVSGDVSLPEIATGGLEGKMKGTKVKTPEMIIQKPKISMQDVDLSLGSPKLKGDIKVSAPGVQGDVKGPQVALKGSRVDIETPNLEGTLTGPRLGSPSGKTGTCRISMSEVDLNVAAPKVKGGVDVTLPRVEGKVKVPEVDVRGPKVDVSAPDVEAHGPEWNLKMPKMKMPTFSTPGAKGEGPDVHMTLPKGDISISGPKVNVEAPDVNLEGLGGKLKGPDVKLPDMSVKTPKISMPDVDLHVKGTKVKGEYDVTVPKLEGELKGPKVDIDAPDVDVHGPDWHLKMPKMKMPKFSVPGFKAEGPEVDVNLPKADVDISGPKIDVTAPDVSIEEPEGKLKGPKFKMPEMNIKVPKISMPDVDLHLKGPNVKGEYDVTMPKVESEIKVPDVELKSAKMDIDVPDVEVQGPDWHLKMPKMKMPKFSMPGFKAEGPEVDVNLPKADVDISGPKVGVEVPDVNIEGPEGKLKGPKFKMPEMNIKAPKISMPDVDLHMKGPKVKGEYDMTVPKLEGDLKGPKVDVSAPDVEMQGPDWNLKMPKIKMPKFSMPSLKGEGPEFDVNLSKANVDISAPKVDTNAPDLSLEGPEGKLKGPKFKMPEMHFRAPKMSLPDVDLDLKGPKMKGNVDISAPKIEGEMQVPDVDIRGPKVDIKAPDVEGQGLDWSLKIPKMKMPKFSMPSLKGEGPEVDVNLPKADVVVSGPKVDIEAPDVSLEGPEGKLKGPKFKMPEMHFKTPKISMPDVDLHLKGPKVKGDVDVSVPKVEGEMKVPDVEIKGPKMDIDAPDVEVQGPDWHLKMPKMKMPKFSMPGFKGEGREVDVNLPKADIDVSGPKVDVEVPDVSLEGPEGKLKGPKFKMPEMHFKAPKISMPDVDLNLKGPKLKGDVDVSLPEVEGEMKVPDVDIKGPKVDISAPDVDVHGPDWHLKMPKVKMPKFSMPGFKGEGPEVDVKLPKADVDVSGPKMDAEVPDVNIEGPDAKLKGPKFKMPEMSIKPQKISIPDVGLHLKGPKMKGDYDVTVPKVEGEIKAPDVDIKGPKVDINAPDVEVHGPDWHLKMPKVKMPKFSMPGFKGEGPEVDMNLPKADLGVSGPKVDIDVPDVNLEAPEGKLKGPKFKMPSMNIQTHKISMPDVGLNLKAPKLKTDVDVSLPKVEGDLKGPEIDVKAPKMDVNVGDIDIEGPEGKLKGPKFKMPEMHFKAPKISMPDVDLHLKGPKVKGDMDVSVPKVEGEMKVPDVDIKGPKVDIDAPDVEVHDPDWHLKMPKMKMPKFSMPGFKAEGPEVDVNLPKADIDVSGPSVDTDAPDLDIEGPEGKLKGSKFKMPKLNIKAPKVSMPDVDLNLKGPKLKGEIDASVPELEGDLRGPQVDVKGPFVEAEVPDVDLECPDAKLKGPKFKMPEMHFKAPKISMPDVDLHLKGPKVKGDADVSVPKLEGDLTGPSVGVEVPDVELECPDAKLKGPKFKMPDMHFKAPKISMPDVDLHLKGPKVKGDVDVSVPKLEGDLTGPSVGVEVPDVELECPDAKLKGPKFKMPEMHFKTPKISMPDVDLHLKGPKVKGDMDVSVPKVEGEMKVPDVDIKGPKMDIDAPDVDVHGPDWHLKMPKMKMPKFSMPGFKAEGPEVDVNLPKADVVVSGPKVDVEVPDVSLEGPEGKLKGPKLKMPEMHFKAPKISMPDVDLHLKGPKVKGDVDVSLPKLEGDLTGPSVDVEVPDVELECPDAKLKGPKFKMPEMHFKTPKISMPDVNLNLKGPKVKGDMDVSVPKVEGEMKVPDVDIRGPKVDIDAPDVDVHGPDWHLKMPKMKMPKFSMPGFKGEGPEVDVNLPKADVDVSGPKVDVEVPDVSLEGPEGKLKGPKFKMPEMHFKTPKISMPDVDFNLKGPKIKGDVDVSAPKLEGELKGPELDVKGPKLDADMPEVAVEGPNGKWKTPKFKMPDMHFKAPKISMPDLDLHLKSPKAKGEVDVDVPKLEGDLKGPHVDVSGPDIDIEGPEGKLKGPKFKMPDMHFKAPNISMPDVDLNLKGPKIKGDVDVSVPEVEGKLEVPDMNIRGPKVDVNAPDVQAPDWHLKMPKMKMPKFSMPGFKAEGPEVDVNLPKADVDISGPKVDIEGPDVNIEGPEGKLKGPKLKMPEMNIKAPKISMPDFDLHLKGPKVKGDVDVSLPKVEGDLKGPEVDIKGPKVDINAPDVGVQGPDWHLKMPKVKMPKFSMPGFKGEGPDGDVKLPKADIDVSGPKVDIEGPDVNIEGPEGKLKGPKFKMPEMNIKAPKISMPDIDLNLKGPKVKGDVDVSLPKVEGDLKGPEVDIKGPKVDIDAPDVDVHGPDWHLKMPKIKMPKISMPGFKGEGPDVDVNLPKADIDVSGPKVDVECPDVNIEGPEGKWKSPKFKMPEMHFKTPKISMPDIDLNLTGPKIKGDVDVTGPKVEGDLKGPEVDLKGPKVDIDVPDVNVQGPDWHLKMPKMKMPKFSMPGFKAEGPEVDVNLPKADVDVSGPKVDVEGPDVNIEGPEGKLKGPKFKMPEMNIKAPKIPMPDFDLHLKGPKVKGDVDISLPKVEGDLKGPEVDIRGPQVDIDVPDVGVQGPDWHLKMPKVKMPKFSMPGFKGEGPDVDVNLPKADLDVSGPKVDIDVPDVNIEGPEGKLKGPKFKMPEMNIKAPKISMPDIDLNLKGPKVKGDMDVSLPKVEGDMKVPDVDIKGPKVDINAPDVDVQGPDWHLKMPKIKMPKISMPGFKGEGPEVDVNLPKADLDVSGPKVDVDVPDVNIEGPDAKLKGPKFKMPEMNIKAPKISMPDLDLNLKGPKMKGEVDVSLANVEGDLKGPALDIKGPKIDVDAPDIDIHGPDAKLKGPKLKMPDMHVNMPKISMPEIDLNLKGSKLKGDVDVSGPKLEGDIKAPSLDIKGPEVDVSGPKLNIEGKSKKSRFKLPKFNFSGSKVQTPEVDVKGKKPDIDITGPKVDINAPDVEVQGKVKGSKFKMPFLSISSPKVSMPDVELNLKSPKVKGDLDIAGPNLEGDFKGPKVDIKAPEVNLNAPDVDVHGPDWNLKMPKMKMPKFSVSGLKAEGPDVAVDLPKGDINIEGPSMNIEGPDLNVEGPEGGLKGPKFKMPDMNIKAPKISMPDIDLNLKGPKVKGDVDISLPKLEGDLKGPEVDIKGPKVDINAPDVDVHGPDWHLKMPKVKMPKFSMPGFKGEGPEVDVTLPKADIDISGPNVDVDVPDVNIEGPDAKLKGPKFKMPEMNIKAPKISMPDFDLNLKGPKMKGDVVVSLPKVEGDLKGPEVDIKGPKVDIDTPDINIEGSEGKFKGPKFKIPEMHLKAPKISMPDIDLNLKGPKVKGDVDVSLPKMEGDLKGPEVDIKGPKVDINAPDVDVQGPDWHLKMPKVKMPKFSMPGFKGEGPDVDVNLPKADLDVSGPKVDIDVPDVNIEGPEGKLKGPKFKMPEMNIKAPKISMPDIDLNLKGPKVKGDMDVSLPKVEGDMQVPDLDIKGPKVDINAPDVDVRGPDWHLKMPKIKMPKISMPGFKGEGPEVDVNLPKADLDVSGPKVDVDVPDVNIEGPDAKLKGPKFKMPEMNIKAPKISMPDFDLHLKGPKVKGDVDVSLPKMEGDLKAPEVDIKGPKVDIDAPDVDVHGPDWHLKMPKVKMPKFSMPGFKGEGPEVDVNLPKADIDVSGPKVDIDTPDIDIHGPEGKLKGPKFKMPDLHLKAPKISMPEVDLNLKGPKMKGDVDVSLPKVEGDLKGPEVDIKGPKVDIDVPDVDVQGPDWHLKMPKVKMPKFSMPGFKGEGPDVDVNLPKADLDVSGPKVDIDVPDVNIEGPDAKLKGPKFKMPEMNIKAPKISMPDFDLHLKGPKVKGDVDVSLPKVEGDLKGPEVDIKGPKVDIDAPDVDVHGPDWHLKMPKVKMPKFSMPGFKGEGPDVDVTLPKADIEISGPKVDIDAPDVSIEGPDAKLKGPKFKMPEMNIKAPKISMPDIDFNLKGPKVKGDVDVSLPKVEGDLKGPEIDIKGPSLDIDTPDVNIEGPEGKLKGPKFKMPEMNIKAPKISMPDFDLHLKGPKVKGDVDVSLPKVESDLKGPEVDIEGPEGKLKGPKFKMPDVHFKSPQISMSDIDLNLKGPKIKGDMDISVPKLEGDLKGPKVDVKGPKVGIDTPDIDIHGPEGKLKGPKFKMPDLHLKAPKISMPEVDLNLKGPKVKGDMDISLPKVEGDLKGPEVDIRDPKVDIDVPDVDVQGPDWHLKMPKVKMPKFSMPGFKGEGPDVDVNLPKADIDVSGPKVDVDVPDVNIEGPDAKLKGPKFKMPEMSIKAPKISMPDIDLNLKGPKVKGDVDVTLPKVEGDLKGPEADIKGPKVDINTPDVDVHGPDWHLKMPKVKMPKFSMPGFKGEGPDVDVSLPKADIDVSGPKVDVDIPDVNIEGPDAKLKGPKFKMPEINIKAPKISIPDVDLDLKGPKVKGDFDVSVPKVEGTLKGPEVDLKGPRLDFEGPDAKLSGPSLKMPSLEISAPKVTAPDVDLHLKAPKIGFSGPKLEGGEVDLKGPKVEAPSLDVHMDSPDINIEGPDVKIPKFKKPKFGFGAKSPKADIKSPSLDVTVPEAELNLETPEISVGGKGKKSKFKMPKIHMSGPKIKAKKQGFDLNVPGGEIDASLKAPDVDVNIAGPDAALKVDVKSPKTKKTMFGKMYFPDVEFDIKSPKFKAEAPLPSPKLEGELQAPDLELSLPAIHVEGLDIKAKAPKVKMPDVDISVPKIEGDLKGPKVQANLGAPDINIEGLDAKVKTPSFGISAPQVSIPDVNVNLKGPKIKGDVPSVGLEGPDVDLQGPEAKIKFPKFSMPKIGIPGVKMEGGGAEVHAQLPSLEGDLRGPDVKLEGPDVSLKGPGVDLPSVNLSMPKVSGPDLDLNLKGPSLKGDLDASVPSMKVHAPGLNLSGVGGKMQVGGDGVKVPGIDATTKLNVGAPDVTLRGPSLQGDLAVSGDIKCPKVSVGAPDLSLEASEGSIKLPKMKLPQFGISTPGSDLHVNAKGPQVSGELKGPGVDVNLKGPRISAPNVDFNLEGPKVKGSLGATGEIKGPTVGGGLPGIGVQGLEGNLQMPGIKSSGCDVNLPGVNVKLPTGQISGPEIKGGLKGSEVGFHGAAPDISVKGPAFNMASPESDFGINLKGPKIKGGADVSGGVSAPDISLGEGHLSVKGSGGEWKGPQVSSALNLDTSKFAGGLHFSGPKVEGGVKGGQIGLQAPGLSVSGPQGHLESGSGKVTFPKMKIPKFTFSGRELVGREMGVDVHFPKAEASIQAGAGDGEWEESEVKLKKSKIKMPKFNFSKPKGKGGVTGSPEASISGSKGDLKSSKASLGSLEGEAEAEASSPKGKFSLFKSKKPRHRSNSFSDEREFSGPSTPTGTLEFEGGEVSLEGGKVKGKHGKLKFGTFGGLGSKSKGHYEVTGSDDETGKLQGSGVSLASKKSRLSSSSSNDSGNKVGIQLPEVELSVSTKKE

SEQ ID NO: 4818 - protein, 123 aa, Homo sapiens
MEKEETTRELLLPNWQGSGSHGLTIAQRDDGVFVQEVTQNSPAARTGVVKEGDQIVGATIYFDNLQSGEVTQLLNTMGHHTVGLKLHRKGDRSPEPGQTWTREVFSSCSSEVVLSGDDEEYQR

SEQ ID NO: 4819 - protein, 144 aa, Homo sapiens
MEKEETTRELLLPNWQGSGSHGLTIAQRDDGVFVQEVTQNSPAARTGVVKEGDQIVGATIYFDNLQSGEVTQLLNTMGHHTVGLKLHRKGDRSPEPGQTWTREVFSSCSSEVVLSGDDEEYQRIYTTKIKPRLKSEDGVEGDLG

SEQ ID NO: 4820 - protein, 86 aa, Homo sapiens
MEKEETTRELLLPNWQGSGSHGLTIAQRDDGVFVQEVTQNSPAARTGVVKEGDQIVGATIYFDNLQSGEVTQLLNTMGHHTVGLKL

SEQ ID NO: 4821 - protein, 121 aa, Homo sapiens
MEKEETTRELLLPNWQGSGSHGLTIAQRDDGVFVQEVTQNSPAARTGVVKEGDQIVGATIYFDNLQSGEVTQLLNTMGHHTVGLKLHRKGDRSPEPGQTWTREVFSSCSSEVVLNTPQPSA

SEQ ID NO: 4822 - protein, 967 aa, Homo sapiens
MAKGFYISKSLGILGILLGVAAVCTIIALSVVYSQEKNKNANSSPVASTTPSASATTNPASATTLDQSKAWNRYRLPNTLKPDSYRVTLRPYLTPNDRGLYVFKGSSTVRFTCKEATDVIIIHSKKLNYTLSQGHRVVLRGVGGSQPPDIDKTELVEPTEYLVVHLKGSLVKDSQYEMDSEFEGELADDLAGFYRSEYMEGNVRKVVATTQMQAADARKSFPCFDEPAMKAEFNITLIHPKDLTALSNMLPKGPSTPLPEDPNWNVTEFHTTPKMSTYLLAFIVSEFDYVEKQASNGVLIRIWARPSAIAAGHGDYALNVTGPILNFFAGHYDTPYPLPKSDQIGLPDFNAGAMENWGLVTYRENSLLFDPLSSSSSNKERVVTVIAHELAHQWFGNLVTIEWWNDLWLNEGFASYVEYLGADYAEPTWNLKDLMVLNDVYRVMAVDALASSHPLSTPASEINTPAQISELFDAISYSKGASVLRMLSSFLSEDVFKQGLASYLHTFAYQNTIYLNLWDHLQEAVNNRSIQLPTTVRDIMNRWTLQMGFPVITVDTSTGTLSQEHFLLDPDSNVTRPSEFNYVWIVPITSIRDGRQQQDYWLIDVRAQNDLFSTSGNEWVLLNLNVTGYYRVNYDEENWRKIQTQLQRDHSAIPVINRAQIINDAFNLASAHKVPVTLALNNTLFLIEERQYMPWEAALSSLSYFKLMFDRSEVYGPMKNYLKKQVTPLFIHFRNNTNNWREIPENLMDQYSEVNAISTACSNGVPECEEMVSGLFKQWMENPNNNPIHPNLRSTVYCNAIAQGGEEEWDFAWEQFRNATLVNEADKLRAALACSKELWILNRYLSYTLNPDLIRKQDATSTIISITNNVIGQGLVWDFVQSNWKKLFNDYGGGSFSFSNLIQAVTRRFSTEYELQQLEQFKKDNEETGFGSGTRALEQALEKTKANIKWVKENKEVVLQWFTENSK

SEQ ID NO: 4823 - protein, 103 aa, Homo sapiens
MAKGFYISKSLGILGILLGVAAVCTIIALSVVYSQEKNKNANSSPVASTTPSASATTNPASATTLDQSKAWNRYRLPNTLKPDSYRVTLRPYLTPNDRGLYVF

SEQ ID NO: 4824 - protein, 61 aa, Homo sapiens
MAKGFYISKSLGILGILLGVAAVCTIIALSVVYSQEKNKNANSSPVASTTPSASATTNPAS

SEQ ID NO: 4825 - protein, 126 aa, Homo sapiens [sequence omitted]

SEQ ID NO: 4826 - protein, 2492 aa, Homo sapiens
MTAEPMSESKLNTLVQKLHDFLAHSSEESEETSSPPRLAMNQNTDKISGSGSNSDMMENSKEEGTSSSEKSKSSGSSRSKRKPSIVTKYVESDDEKPLDDETVNEDASNENSENDITMQSLPKGTVIVQPEPVLNEDKDDFKGPEFRSRSKMKTENLKKRGEDGLHGIVSCTACGQQVNHFQKDSIYRHPSLQVLICKNCFKYYMSDDISRDSDGMDEQCRWCAEGGNLICCDFCHNAFCKKCILRNLGRKELSTIMDENNQWYCYICHPEPLLDLVTACNSVFENLEQLLQQNKKKIKVDSEKSNKVYEHTSRFSPKKTSSNCNGEEKKLDDSCSGSVTYSYSALIVPKEMIKKAKKLIETTANMNSSYVKFLKQATDNSEISSATKLRQLKAFKSVLADIKKAHLALEEDLNSEFRAMDAVNKEKNTKEHKVIDAKFETKARKGEKPCALEKKDISKSEAKLSRKQVDSEHMHQNVPTEEQRTNKSTGGEHKKSDRKEEPQYEPANTSEDLDMDIVSVPSSVPEDIFENLETAMEVQSSVDHQGDGSSGTEQEVESSSVKLNISSKDNRGGIKSKTTAKVTKELYVKLTPVSLSNSPIKGADCQEVPQDKDGYKSCGLNPKLEKCGLGQENSDNEHLVENEVSLLLEESDLRRSPRVKTTPLRRPTETNPVTSNSDEECNETVKEKQKLSVPVRKKDKRNSSDSAIDNPKPNKLPKSKQSETVDQNSDSDEMLAILKEVSRMSHSSSSDTDINEIHTNHKTLYDLKTQAGKDDKGKRKRKSSTSGSDFDTKKGKSAKSSIISKKKRQTQSESSNYDSELEKEIKSMSKIGAARTTKKRIPNTKDFDSSEDEKHSKKGMDNQGHKNLKTSQEGSSDDAERKQERETFSSAEGTVDKDTTIMELRDRLPKKQQASASTDGVDKLSGKEQSFTSLEVRKVAETKEKSKHLKTKTCKKVQDGLSDIAEKFLKKDQSDETSEDDKKQSKKGTEEKKKPSDFKKKVIKMEQQYESSSDGTEKLPEREEICHFPKGIKQIKNGTTDGEKKSKKIRDKTSKKKDELSDYAEKSTGKGDSCDSSEDKKSKNGAYGREKKRCKLLGKSSRKRQDCSSSDTEKYSMKEDGCNSSDKRLKRIELRERRNLSSKRNTKEIQSGSSSSDAEESSEDNKKKKQRTSSKKKAVIVKEKKRNSLRTSTKRKQADITSSSSSDIEDDDQNSIGEGSSDEQKIKPVTENLVLSSHTGFCQSSGDEALSKSVPVTVDDDDDDNDPENRIAKKMLLEEIKANLSSDEDGSSDDEPEEGKKRTGKQNEENPGDEEAKNQVNSESDSDSEESKKPRYRHRLLRHKLTVSDGESGEEKKTKPKEHKEVKGRNRRKVSSEDSEDSDFQESGVSEEVSESEDEQRPRTRSAKKAELEENQRSYKQKKKRRRIKVQEDSSSENKSNSEEEEEEKEEEEEEEEEEEEEEEDENDDSKSPGKGRKKIRKILKDDKLRTETQNALKEEEERRKRIAEREREREKLREVIEIEDASPTKCPITTKLVLDEDEETKEPLVQVHRNMVIKLKPHQVDGVQFMWDCCCESVKKTKKSPGSGCILAHCMGLGKTLQVVSFLHTVLLCDKLDFSTALVVCPLNTALNWMNEFEKWQEGLKDDEKLEVSELATVKRPQERSYMLQRWQEDGGVMIIGYEMYRNLAQGRNVKSRKLKEIFNKALVDPGPDFVVCDEGHILKNEASAVSKAMNSIRSRRRIILTGTPLQNNLIEYHCMVNFIKENLLGSIKEFRNRFINPIQNGQCADSTMVDVRVMKKRAHILYEMLAGCVQRKDYTALTKFLPPKHEYVLAVRMTSIQCKLYQYYLDHLTGVGNNSEGGRGKAGAKLFQDFQMLSRIWTHPWCLQLDYISKENKGYFDEDSMDEFIASDSDETSMSLSSDDYTKKKKKGKKGKKDSSSSGSGSDNDVEVIKVWNSRSRGGGEGNVDETGNNPSVSLKLEESKATSSSNPSSPAPDWYKDFVTDADAEVLEHSGKMVLLFEILRMAEEIGDKVLVFSQSLISLDLIEDFLELASREKTEDKDKPLIYKGEGKWLRNIDYYRLDGSTTAQSRKKWAEEFNDETNVRGRLFIISTKAGSLGINLVAANRVIIFDASWNPSYDIQSIFRVYRFGQTKPVYVYRFLAQGTMEDKIYDRQVTKQSLSFRVVDQQQVERHFTMNELTELYTFEPDLLDDPNSEKKKKRDTPMLPKDTILAELLQIHKEHIVGYHEHDSLLDHKEEEELTEEERKAAWAEYEAEKKGLTMRFNIPTGTNLPPVSFNSQTPYIPFNLGALSAMSNQQLEDLINQGREKVVEATNSVTAVRIQPLEDIISAVWKENMNLSEAQVQALALSRQASQELDVKRREAIYNDVLTKQQMLISCVQRILMNRRLQQQYNQQQQQQMTYQQATLGHLMMPKPPNLIMNPSNYQQIDMRGMYQPVAGGMQPPPLQRAPPPMRSKNPGPSQGKSM

SEQ ID NO: 4827 - protein, 2454 aa, Homo sapiens
MTAEPMSESKLNTLVQKLHDFLAHSSEESEETSSPPRLAMNQNTDKISGSGSNSDMMENSKEEGTSSSEKSKSSGSSRSKRKPSIVTKYVESDDEKPLDDETVNEDASNENSENDITMQSLPKEDGLHGIVSCTACGQQVNHFQKDSIYRHPSLQVLICKNCFKYYMSDDISRDSDGMDEQCRWCAEGGNLICCDFCHNAFCKKCILRNLGRKELSTIMDENNQWYCYICHPEPLLDLVTACNSVFENLEQLLQQNKKKIKVDSEKSNKVYEHTSRFSPKKTSSNCNGEEKKLDDSCSGSVTYSYSALIVPKEMIKKAKKLIETTANMNSSYVKFLKQATDNSEISSATKLRQLKAFKSVLADIKKAHLALEEDLNSEFRAMDAVNKEKNTKEHKVIDAKFETKARKGEKPCALEKKDISKSEAKLSRKQVDSEHMHQNVPTEEQRTNKSTGGEHKKSDRKEEPQYEPANTSEDLDMDIVSVPSSVPEDIFENLETAMEVQSSVDHQGDGSSGTEQEVESSSVKLNISSKDNRGGIKSKTTAKVTKELYVKLTPVSLSNSPIKGADCQEVPQDKDGYKSCGLNPKLEKCGLGQENSDNEHLVENEVSLLLEESDLRRSPRVKTTPLRRPTETNPVTSNSDEECNETVKEKQKLSVPVRKKDKRNSSDSAIDNPKPNKLPKSKQSETVDQNSDSDEMLAILKEVSRMSHSSSSDTDINEIHTNHKTLYDLKTQAGKDDKGKRKRKSSTSGSDFDTKKGKSAKSSIISKKKRQTQSESSNYDSELEKEIKSMSKIGAARTTKKRIPNTKDFDSSEDEKHSKKGMDNQGHKNLKTSQEGSSDDAERKQERETFSSAEGTVDKDTTIMELRDRLPKKQQASASTDGVDKLSGKEQSFTSLEVRKVAETKEKSKHLKTKTCKKVQDGLSDIAEKFLKKDQSDETSEDDKKQSKKGTEEKKKPSDFKKKVIKMEQQYESSSDGTEKLPEREEICHFPKGIKQIKNGTTDGEKKSKKIRDKTSKKKDELSDYAEKSTGKGDSCDSSEDKKSKNGAYGREKKRCKLLGKSSRKRQDCSSSDTEKYSMKEDGCNSSDKRLKRIELRERRNLSSKRNTKEIQSGSSSSDAEESSEDNKKKKQRTSSKKKAVIVKEKKRNSLRTSTKRKQADITSSSSSDIEDDDQNSIGEGSSDEQKIKPVTENLVLSSHTGFCQSSGDEALSKSVPVTVDDDDDDNDPENRIAKKMLLEEIKANLSSDEDGSSDDEPEEGKKRTGKQNEENPGDEEAKNQVNSESDSDSEESKKPRYRHRLLRHKLTVSDGESGEEKKTKPKEHKEVKGRNRRKVSSEDSEDSDFQESGVSEEVSESEDEQRPRTRSAKKAELEENQRSYKQKKKRRRIKVQEDSSSENKSNSEEEEEEKEEEEEEEEEEEEEEEDENDDSKSPGKGRKKIRKILKDDKLRTETQNALKEEEERRKRIAEREREREKLREVIEIEDASPTKCPITTKLVLDEDEETKEPLVQVHRNMVIKLKPHQVDGVQFMWDCCCESVKKTKKSPGSGCILAHCMGLGKTLQVVSFLHTVLLCDKLDFSTALVVCPLNTALNWMNEFEKWQEGLKDDEKLEVSELATVKRPQERSYMLQRWQEDGGVMIIGYEMYRNLAQGRNVKSRKLKEIFNKALVDPGPDFVVCDEGHILKNEASAVSKAMNSIRSRRRIILTGTPLQNNLIEYHCMVNFIKENLLGSIKEFRNRFINPIQNGQCADSTMVDVRVMKKRAHILYEMLAGCVQRKDYTALTKFLPPKHEYVLAVRMTSIQCKLYQYYLDHLTGVGNNSEGGRGKAGAKLFQDFQMLSRIWTHPWCLQLDYISKENKGYFDEDSMDEFIASDSDETSMSLSSDDYTKKKKKGKKGKKDSSSSGSGSDNDVEVIKVWNSRSRGGGEGNVDETGNNPSVSLKLEESKATSSSNPSSPAPDWYKDFVTDADAEVLEHSGKMVLLFEILRMAEEIGDKVLVFSQSLISLDLIEDFLELASREKTEDKDKPLIYKGEGKWLRNIDYYRLDGSTTAQSRKKWAEEFNDETNVRGRLFIISTKAGSLGINLVAANRVIIFDASWNPSYDIQSIFRVYRFGQTKPVYVYRFLAQGTMEDKIYDRQVTKQSLSFRVVDQQQVERHFTMNELTELYTFEPDLLDDPNSEKKKKRDTPMLPKDTILAELLQIHKEHIVGYHEHDSLLDHKEEEELTEEERKAAWAEYEAEKKGLTMRFNIPTGTNLPPVSFNSQTPYIPFNLGALSAMSNQQLEDLINQGREKVVEATNSVTAVRIQPLEDIISAVWKENMNLSEAQVQALALSRQASQELDVKRREAIYNDVLTKQQMLISCVQRILMNRRLQQQYNQQQQQQMTYQQATLGHLMMPKPPNLIMNPSNYQQIDMRGMYQPVAGGMQPPPLQRAPPPMRSKNPGPSQGKSM

SEQ ID NO: 4828 - protein, 122 aa, Homo sapiens
INYNRDKISGSGSNSDMMENSKEEGTSSSEKSKSSGSSRSKRKPSIVTKYVESDDEKPLDDETVNEDASNENSENDITMQSLPKGTVIVQPEPVLNEDKDDFKGPEFRSRSKMKTENLKKRG

SEQ ID NO: 4829 - protein, 1345 aa, Homo sapiens
MSESKLNTLVQKLHDFLAHSSEESEETSSPPRLAMNQNTDKISGSGSNSDMMENSKEEGTSSSEKSKSSGSSRSKRKPSIVTKYVESDDEKPLDDETVNEDASNENSENDITMQSLPKDGLHGIVSCTACGQQVNHFQKDSIYRHPSLQVLICKNCFKYYMSDDISRDSDGMDEQCRWCAEGGNLICCDFCHNAFCKKCILRNLGRKELSTIMDENNQWYCYICHPEPLLDLVTACNSVFENLEQLLQQNKKKIKVDSEKSNKVYEHTSRFSPKKTSSNCNGEEKKLDDSCSGSVTYSYSALIVPKEMIKKAKKLIETTANMNSSYVKFLKQATDNSEISSATKLRQLKAFKSVLADIKKAHLALEEDLNSEFRAMDAVNKEKNTKEHKVIDAKFETKARKGEKPCALEKKDISKSEAKLSRKQVDSEHMHQNVPTEEQRTNKSTGGEHKKSDRKEEPQYEPANTSEDLDMDIVSVPSSVPEDIFENLETAMEVQSSVDHQGDGSSGTEQEVESSSVKLNISSKDNRGGADCQEVPQDKDGYKSCGLNPKLEKCGLGQENSDNEHLVENEVSLLLEESDLRRSPRVKTTPLRRPTETNPVTSNSDEECNETVKEKQKLSVPVRKKDKRNSSDSAIDNPKPNKLPKSKQSETVDQNSDSDEMLAILKEVSRMSHSSSSDTDINEIHTNHKTLYDLKTQAGKDDKGKRKRKSSTSGSDFDTKKGKSAKSSIISKKKRQTQSESSNYDSELEKEIKSMSKIGAARTTKKRIPNTKDFDSSEDEKHSKKGMDNQGHKNLKTSQEGSSDDAERKQERETFSSAEGTVDKDTTIMELRDRLPKKQQASASTDGVDKLSGKEQSFTSLEVRKVAETKEKSKHLKTKTCKKVQDGLSDIAEKFLKKDQSDETSEDDKKQSKKGTEEKKKPSDFKKKVIKMEQQYESSSDGTEKLPEREEICHFPKGIKQIKNGTTDGEKKSKKIRDKTSKKKDELSDYAEKSTGKGDSCDSSEDKKSKNGAYGREKKRCKLLGKSSRKRQDCSSSDTEKYSMKEDGCNSSDKRLKRIELRERRNLSSKRNTKEIQSGSSSSDAEESSEDNKKKKQRTSSKKKAVIVKEKKRNSLRTSTKRKQADITSSSSSDIEDDDQNSIGEGSSDEQKIKPVTENLVLSSHTGFCQSSGDEALSKSVPVTVDDDDDDNDPENRIAKKMLLEEIKANLSSDEDGSSDDEPEEGKKRTGKQNEENPGDEEAKNQVNSESDSDSEESKKPRYRHRLLRHKLTVSDGESGEEKKTKPKEHKEVKGRNRRKVSSEDSEDSDFQESGVSEEVSESEDEQRPRTRSAKKAELEENQRS

SEQ ID NO: 4830 - protein, 160 aa, Homo sapiens
  VARIANT 1: note = MOD_RES - Any amino acid
XPDFVVCDEGHILKNEASAVSKAMNSIRSRRRIILTGTPLQNNLIEYHCMVNFIKENLLGSIKEFRNRFINPIQNGQCADSTMVDVRVMKKRAHILYEMLAGCVQRKDYTALTKFLPPKHEYVLAVRMTSIQCKLYQYYLDHLTVLHLNKMGMLKSIKYF

SEQ ID NO: 4831 - protein, 837 aa, Homo sapiens
MNHLEGSAEVEVTDEAAGGEVNESVEADLEHPEVEEEQQQPPQQQHYVGRHQRGRALEDLRAQLGQEEEERGECLARSASTESGFHNHTDTAEGDVIAAARDGYDAERAQDPEDESAYAVQYRPEAEEYTEQAEAEHAEATHRRALPNHLHFHSLEHEEAMNAAYSGYVYTHRLFHRGEDEPYSEPYADYGGLQEHVYEEIGDAPELDARDGLRLYEQERDEAAAYRQEALGARLHHYDERSDGESDSPEKEAEFAPYPRMDSYEQEEDIDQIVAEVKQSMSSQSLDKAAEDMPEAEQDLERPPTPAGGRPDSPGLQAPAGQQRAVGPAGGGEAGQRYSKEKRDAISLAIKDIKEAIEEVKTRTIRSPYTPDEPKEPIWVMRQDISPTRDCDDQRPMDGDSPSPGSSSPLGAESSSTSLHPSDPVEASTNKESRKSLASFPTYVEVPGPCDPEDLIDGIIFAANYLGSTQLLSDKTPSKNVRMMQAQEAVSRIKMAQKLAKSRKKAPEGESQPMTEVDLFISTQRIKVLNADTQETMMDHPLRTISYIADIGNIVVLMARRRMPRSNSQENVEASHPSQDGKRQYKMICHVFESEDAQLIAQSIGQAFSVAYQEFLRANGINPEDLSQKEYSDLLNTQDMYNDDLIHFSKSENCKDVFIEKQKGEILGVVIVESGWGSILPTVIIANMMHGGPAEKSGKLNIGDQIMSINGTSLVGLPLSTCQSIIKGLKNQSRVKLNIVRCPPVTTVLIRRPDLRYQLGFSVQNGIICSLMRGGIAERGGVRVGHRIIEINGQSVVATPHEKIVHILSNAVGEIHMKTMPAAMYRLLTAQEQPVYI

SEQ ID NO: 4832 - protein, 822 aa, Homo sapiens
MAAAVVVAEGDSDSRPGQELLVAWNTVSTGLVPPAALGLVSSRTSGAVPPKEEELRAAVEVLRGHGLHSVLEEWFVEVLQNDLQANISPEFWNAISQCENSADEPQCLLLLLDAFGLLESRLDPYLRSLELLEKWTRLGLLMGTGAQGLREEVHTMLRGVLFFSTPRTFQEMIQRLYGCFLRVYMQSKRKGEGGTDPELEGELDSRYARRRYYRLLQSPLCAGCSSDKQQCWCRQALEQFHQLSQVLHRLSLLERVSAEAVTTTLHQVTRERMEDRCRGEYERSFLREFHKWIERVVGWLGKVFLQDGPARPASPEAGNTLRRWRCHVQRFFYRIYASLRIEELFSIVRDFPDSRPAIEDLKYCLERTDQRQQLLVSLKAALETRLLHPGVNTCDIITLYISAIKALRVLDPSMVILEVACEPIRRYLRTREDTVRQIVAGLTGDSDGTGDLAVELSKTDPASLETGQDSEDDSGEPEDWVPDPVDADPGKSSSKRRSSDIISLLVSIYGSKDLFINEYRSLLADRLLHQFSFSPEREIRNVELLKLRFGEAPMHFCEVMLKDMADSRRINANIREEDEKRPAEEQPPFGVYAVILSSEFWPPFKDEKLEVPEDIRAALEAYCKKYEQLKAMRTLSWKHTLGLVTMDVELADRTLSVAVTPVQAVILLYFQDQASWTLEELSKAVKMPVALLRRRMSVWLQQGVLREEPPGTFSVIEEERPQDRDNMVLIDSDDESDSGMASQADQKEEELLLFWTYIQAMLTNLESLSLDRIYNMLRMFVVTGPALAEIDLQELQGYLQKKVRDQQLVYSAGVYRLPKNCS

SEQ ID NO: 4833 - protein, 1620 aa, Homo sapiens
MGAIGLLWLLPLLLSTAAVGSGMGTGQRAGSPAAGPPLQPREPLSYSRLQRKSLAVDFVVPSLFRVYARDLLLPPSSSELKAGRPEARGSLALDCAPLLRLLGPAPGVSWTAGSPAPAEARTLSRVLKGGSVRKLRRAKQLVLELGEEAILEGCVGPPGEAAVGLLQFNLSELFSWWIRQGEGRLRIRLMPEKKASEVGREGRLSAAIRASQPRLLFQIFGTGHSSLESPTNMPSPSPDYFTWNLTWIMKDSFPFLSHRSRYGLECSFDFPCELEYSPPLHDLRNQSWSWRRIPSEEASQMDLLDGPGAERSKEMPRGSFLLLNTSADSKHTILSPWMRSSSEHCTLAVSVHRHLQPSGRYIAQLLPHNEAAREILLMPTPGKHGWTVLQGRIGRPDNPFRVALEYISSGNRSLSAVDFFALKNCSEGTSPGSKMALQSSFTCWNGTVLQLGQACDFHQDCAQGEDESQMCRKLPVGFYCNFEDGFCGWTQGTLSPHTPQWQVRTLKDARFQDHQDHALLLSTTDVPASESATVTSATFPAPIKSSPCELRMSWLIRGVLRGNVSLVLVENKTGKEQGRMVWHVAAYEGLSLWQWMVLPLLDVSDRFWLQMVAWWGQGSRAIVAFDNISISLDCYLTISGEDKILQNTAPKSRNLFERNPNKELKPGENSPRQTPIFDPTVHWLFTTCGASGPHGPTQAQCNNAYQNSNLSVEVGSEGPLKGIQIWKVPATDTYSISGYGAAGGKGGKNTMMRSHGVSVLGIFNLEKDDMLYILVGQQGEDACPSTNQLIQKVCIGENNVIEEEIRVNRSVHEWAGGGGGGGGATYVFKMKDGVPVPLIIAAGGGGRAYGAKTDTFHPERLENNSSVLGLNGNSGAAGGGGGWNDNTSLLWAGKSLQEGATGGHSCPQAMKKWGWETRGGFGGGGGGCSSGGGGGGYIGGNAASNNDPEMDGEDGVSFISPLGILYTPALKVMEGHGEVNIKHYLNCSHCEVDECHMDPESHKVICFCDHGTVLAEDGVSCIVSPTPEPHLPLSLILSVVTSALVAALVLAFSGIMIVYRRKHQELQAMQMELQSPEYKLSKLRTSTIMTDYNPNYCFAGKTSSISDLKEVPRKNITLIRGLGHGAFGEVYEGQVSGMPNDPSPLQVAVKTLPEVCSEQDELDFLMEALIISKFNHQNIVRCIGVSLQSLPRFILLELMAGGDLKSFLRETRPRPSQPSSLAMLDLLHVARDIACGCQYLEENHFIHRDIAARNCLLTCPGPGRVAKIGDFGMARDIYRASYYRKGGCAMLPVKWMPPEAFMEGIFTSKTDTWSFGVLLWEIFSLGYMPYPSKSNQEVLEFVTSGGRMDPPKNCPGPVYRIMTQCWQHQPEDRPNFAIILERIEYCTQDPDVINTALPIEYGPLVEEEEKVPVRPKDPEGVPPLLVSQQAKREEERSPAAPPPLPTTSSGKAAKKPTAAEISVRVPRGPAVEGGHVNMAFSQSNPPSELHKVHGSRNKPTSLWNPTYGSWFTEKPTKKNNPIAKKEPHDRGNLGLEGSCTVPPNVATGRLPGASLLLEPSSLTANMKEVPLFRLRHFPCGNVNYGYQQQGLPLEAATAPGAGHYEDTILKSKNSMNQPGP

SEQ ID NO: 4834 - protein, 450 aa, Homo sapiens
MGAIGLLWLLPLLLSTAAVGSGMGTGQRAGSPAAGPPLQPREPLSYSRLQRKSLAVDFVVPSLFRVYARDLLLPPSSSELKAGRPEARGSLALDCAPLLRLLGPAPGVSWTAGSPAPAEARTLSRVLKGGSVRKLRRAKQLVLELGEEAILEGCVGPPGEAAVGLLQFNLSELFSWWIRQGEGRLRIRLMPEKKASEVGREGRLSAAIRASQPRLLFQIFGTGHSSLESPTNMPSPSPDYFTWNLTWIMKDSFPFLSHRSRYGKERSPAAPPPLPTTSSGKAAKKPTAAEISVRVPRGPAVEGGHVNMAFSQSNPPSELHKVHGSRNKPTSLWNPTYGSWFTEKPTKKNNPIAKKEPHDRGNLGLEGSCTVPPNVATGRLPGASLLLEPSSLTANMKEVPLFRLRHFPCGNVNYGYQQQGLPLEAATAPGAGHYEDTILKSKNSMNQPGP

SEQ ID NO: 4835 - protein, 644 aa, Homo sapiens
MEVQLGLGRVYPRPPSKTYRGAFQNLFQSVREVIQNPGPRHPEAASAAPPGASLLLLQQQQQQQQQQQQQQQQQQQQQQQETSPRQQQQQQGEDGSPQAHRRGPTGYLVLDEEQQPSQPQSALECHPERGCVPEPGAAVAASKGLPQQLPAPPDEDDSAAPSTLSLLGPTFPGLSSCSADLKDILSEASTMQLLQQQQQEAVSEGSSSGRAREASGAPTSSKDNYLGGTSTISDNAKELCKAVSVSMGLGVEALEHLSPGEQLRGDCMYAPLLGVPPAVRPTPCAPLAECKGSLLDDSAGKSTEDTAEYSPFKGGYTKGLEGESLGCSGSAAAGSSGTLELPSTLSLYKSGALDEAAAYQSRDYYNFPLALAGPPPPPPPPHPHARIKLENPLDYGSAWAAAAAQCRYGDLASLHGAGAAGPGSGSPSAAASSSWHTLFTAEEGQLYGPCGGGGGGGGGGGGGGGGGGGGGGGEAGAVAPYGYTRPPQGLAGQESDFTAPDVWYPGGMVSRVPYPSPTCVKSEMGPWMDSYSGPYGDMRLETARDHVLPIDYYFPPQKTCLICGDEASGCHYGALTCGSCKVFFKRAAEGKQKYLCASRNDCTIDKFRRKNCPSCRLRKCYEAGMTLGEKFRVGNCKHLKMTRP

SEQ ID NO: 4836 - protein, 600 aa, Homo sapiens
MEVQLGLGRVYPRPPSKTYRGAFQNLFQSVREVIQNPGPRHPEAASAAPPGASLLLLQQQQQQQQQQQQQQQQQQQQQQQETSPRQQQQQQGEDGSPQAHRRGPTGYLVLDEEQQPSQPQSALECHPERGCVPEPGAAVAASKGLPQQLPAPPDEDDSAAPSTLSLLGPTFPGLSSCSADLKDILSEASTMQLLQQQQQEAVSEGSSSGRAREASGAPTSSKDNYLGGTSTISDNAKELCKAVSVSMGLGVEALEHLSPGEQLRGDCMYAPLLGVPPAVRPTPCAPLAECKGSLLDDSAGKSTEDTAEYSPFKGGYTKGLEGESLGCSGSAAAGSSGTLELPSTLSLYKSGALDEAAAYQSRDYYNFPLALAGPPPPPPPPHPHARIKLENPLDYGSAWAAAAAQCRYGDLASLHGAGAAGPGSGSPSAAASSSWHTLFTAEEGQLYGPCGGGGGGGGGGGGGGGGGGGGGGGEAGAVAPYGYTRPPQGLAGQESDFTAPDVWYPGGMVSRVPYPSPTCVKSEMGPWMDSYSGPYGDMRLETARDHVLPIDYYFPPQKTCLICGDEASGCHYGALTCGSCKVFFKRAAEGFFRMNKLKES

SEQ ID NO: 4837 - protein, 147 aa, Homo sapiens
MVMGLGVLLLVFVLGLGLTPPTLAQDNSRYTHFLTQHYDAKPQGRDDRYCESIMRRRGLTSPCKDINTFIHGNKRSIKAICENKNGNPHRENLRISKSSFQVTTCKLHGGSPWPPCQYRATAGFRNVVVACENGLPVHLDQSIFRRP

SEQ ID NO: 4838 - protein, 147 aa, Homo sapiens; identical to SEQ ID NO: 4837

SEQ ID NO: 4839 - protein, 497 aa, Homo sapiens
MTVFLSFAFLAAILTHIGCSNQRRSPENSGRRYNRIQHGQCAYTFILPEHDGNCRESTTDQYNTNALQRDAPHVEPDFSSQKLQHLEHVMENYTQWLQKLENYIVENMKSEMAQIQQNAVQNHTATMLEIGTSLLSQTAEQTRKLTDVETQVLNQTSRLEIQLLENSLSTYKLEKQLLQQTNEILKIHEKNSLLEHKILEMEGKHKEELDTLKEEKENLQGLVTRQTYIIQELEKQLNRATTNNSVLQKQQLELMDTVHNLVNLCTKEVLLKGGKREEEKPFRDCADVYQAGFNKSGIYTIYINNMPEPKKVFCNMDVNGGGWTVIQHREDGSLDFQRGWKEYKMGFGNPSGEYWLGNEFIFAITSQRQYMLRIELMDWEGNRAYSQYDRFHIGNEKQNYRLYLKGHTGTAGKQSSLILHGADFSTKDADNDNCMCKCALMLTGGWWFDACGPSNLNGMFYTAGQNHGKLNGIKWHYFKGPSYSLRSTTMMIRPLDF

SEQ ID NO: 4840 - protein, 152 aa, Homo sapiens
TVSNLLEHKILEMEGKHKEELDTLKEEKENLQGLVTRQTYIIQELEKQLNRATTNNSVLQKQQLELMDTVHNLVNLCTKEGVLLKGGKREEEKPFRDCADVYQAGFNKSGIYTIYINNMPEPKKVFCNMDVNGGGWTVIQHREDGSLDFQRG

SEQ ID NO: 4841 - protein, 498 aa, Homo sapiens
MTVFLSFAFLAAILTHIGCSNQRRSPENSGRRYNRIQHGQCAYTFILPEHDGNCRESTTDQYNTNALQRDAPHVEPDFSSQKLQHLEHVMENYTQWLQKLENYIVENMKSEMAQIQQNAVQNHTATMLEIGTSLLSQTAEQTRKLTDVETQVLNQTSRLEIQLLENSLSTYKLEKQLLQQTNEILKIHEKNSLLEHKILEMEGKHKEELDTLKEEKENLQGLVTRQTYIIQELEKQLNRATTNNSVLQKQQLELMDTVHNLVNLCTKEGVLLKGGKREEEKPFRDCADVYQAGFNKSGIYTIYINNMPEPKKVFCNMDVNGGGWTVIQHREDGSLDFQRGWKEYKMGFGNPSGEYWLGNEFIFAITSQRQYMLRIELMDWEGNRAYSQYDRFHIGNEKQNYRLYLKGHTGTAGKQSSLILHGADFSTKDADNDNCMCKCALMLTGGWWFDACGPSNLNGMFYTAGQNHGKLNGIKWHYFKGPSYSLRSTTMMIRPLDF

SEQ ID NO: 4842 - protein, 297 aa, Homo sapiens
MEGKHKEELDTLKEEKENLQGLVTRQTYIIQELEKQLNRATTNNSVLQKQQLELMDTVHNLVNLCTKEVLLKGGKREEEKPFRDCADVYQAGFNKSGIYTIYINNMPEPKKVFCNMDVNGGGWTVIQHREDGSLDFQRGWKEYKMGFGNPSGEYWLGNEFIFAITSQRQYMLRIELMDWEGNRAYSQYDRFHIGNEKQNYRLYLKGHTGTAGKQSSLILHGADFSTKDADNDNCMCKCALMLTGGWWFDACGPSNLNGMFYTAGQNHGKLNGIKWHYFKGPSYSLRSTTMMIRPLDF

SEQ ID NO: 4843 - protein, 298 aa, Homo sapiens
MEGKHKEELDTLKEEKENLQGLVTRQTYIIQELEKQLNRATTNNSVLQKQQLELMDTVHNLVNLCTKEGVLLKGGKREEEKPFRDCADVYQAGFNKSGIYTIYINNMPEPKKVFCNMDVNGGGWTVIQHREDGSLDFQRGWKEYKMGFGNPSGEYWLGNEFIFAITSQRQYMLRIELMDWEGNRAYSQYDRFHIGNEKQNYRLYLKGHTGTAGKQSSLILHGADFSTKDADNDNCMCKCALMLTGGWWFDACGPSNLNGMFYTAGQNHGKLNGIKWHYFKGPSYSLRSTTMMIRPLDF

SEQ ID NO: 4844 - protein, 496 aa, Homo sapiens
MWQIVFFTLSCDLVLAAAYNNFRKSMDSIGKKQYQVQHGSCSYTFLLPEMDNCRSSSSPYVSNAVQRDAPLEYDDSVQRLQVLENIMENNTQWLMKLENYIQDNMKKEMVEIQQNAVQNQTAVMIEIGTNLLNQTAEQTRKLTDVEAQVLNQTTRLELQLLEHSLSTNKLEKQILDQTSEINKLQDKNSFLEKKVLAMEDKHIIQLQSIKEEKDQLQVLVSKQNSIIEELEKKIVTATVNNSVLQKQQHDLMETVNNLLTMMSTSNSAKDPTVAKEEQISFRDCAEVFKSGHTTNGIYTLTFPNSTEEIKAYCDMEAGGGGWTIIQRREDGSVDFQRTWKEYKVGFGNPSGEYWLGNEFVSQLTNQQRYVLKIHLKDWEGNEAYSLYEHFYLSSEELNYRIHLKGLTGTAGKISSISQPGNDFSTKDGDNDKCICKCSQMLTGGWWFDACGPSNLNGMYYPQRQNTNKFNGIKWYYWKGSGYSLKATTMMIRPADF

SEQ ID NO: 4845 - protein, 495 aa, Homo sapiens
MWQIVFFTLSCDLVLAAAYNNFRKSMDSIGKKQYQVQHGSCSYTFLLPEMDNCRSSSSPYVSNAVQRDAPLEYDDSVQRLQVLENIMENNTQWLMKLENYIQDNMKKEMVEIQQNAVQNQTAVMIEIGTNLLNQTAEQTRKLTDVEAQVLNQTTRLELQLLEHSLSTNKLEKQILDQTSEINKLQDKNSFLEKKVLAMEDKHIIQLQSIKEEKDQLQVLVSKQNSIIEELEKKIVTATVNNSVLQKQQHDLMETVNNLLTMMSTSNSKDPTVAKEEQISFRDCAEVFKSGHTTNGIYTLTFPNSTEEIKAYCDMEAGGGGWTIIQRREDGSVDFQRTWKEYKVGFGNPSGEYWLGNEFVSQLTNQQRYVLKIHLKDWEGNEAYSLYEHFYLSSEELNYRIHLKGLTGTAGKISSISQPGNDFSTKDGDNDKCICKCSQMLTGGWWFDACGPSNLNGMYYPQRQNTNKFNGIKWYYWKGSGYSLKATTMMIRPADF

SEQ ID NO: 4846 - protein, 444 aa, Homo sapiens
MWQIVFFTLSCDLVLAAAYNNFRKSMDSIGKKQYQVQHGSCSYTFLLPEMDNCRSSSSPYVSNAVQRDAPLEYDDSVQRLQVLENIMENNTQWLMKVLNQTTRLELQLLEHSLSTNKLEKQILDQTSEINKLQDKNSFLEKKVLAMEDKHIIQLQSIKEEKDQLQVLVSKQNSIIEELEKKIVTATVNNSVLQKQQHDLMETVNNLLTMMSTSNSAKDPTVAKEEQISFRDCAEVFKSGHTTNGIYTLTFPNSTEEIKAYCDMEAGGGGWTIIQRREDGSVDFQRTWKEYKVGFGNPSGEYWLGNEFVSQLTNQQRYVLKIHLKDWEGNEAYSLYEHFYLSSEELNYRIHLKGLTGTAGKISSISQPGNDFSTKDGDNDKCICKCSQMLTGGWWFDACGPSNLNGMYYPQRQNTNKFNGIKWYYWKGSGYSLKATTMMIRPADF

SEQ ID NO: 4847 - protein, 406 aa, Homo sapiens
MSGAPTAGAALMLCAATAVLLSAQGGPVQSKSPRFASWDEMNVLAHGLLQLGQGLREHAERTRSQLSALERRLSACGSACQGTEGSTDLPLAPESRVDPEVLHSLQTQLKAQNSRIQQLFHKVAQQQRHLEKQHLRIQHLQSQFGLLDHKHLDHEVAKPARRKRLPEMAQPVDPAHNVSRLHRLPRDCQELFQVGERQSGLFEIQPQGSPPFLVNCKMTSDGGWTVIQRRHDGSVDFNRPWEAYKAGFGDPHGEFWLGLEKVHSITGDRNSRLAVQLRDWDGNAELLQFSVHLGGEDTAYSLQLTAPVAGQLGATTVPPSGLSVPFSTWDQDHDLRRDKNCAKSLSGGWWFGTCSHSNLNGQYFRSIPQQRQKLKKGIFWKTWRGRYYPLQATTMLIQPMAAEAAS

SEQ ID NO: 4848 - protein, 368 aa, Homo sapiens
MSGAPTAGAALMLCAATAVLLSAQGGPVQSKSPRFASWDEMNVLAHGLLQLGQGLREHAERTRSQLSALERRLSACGSACQGTEGSTDLPLAPESRVDPEVLHSLQTQLKAQNSRIQQLFHKVAQQQRHLEKQHLRIQHLQSQFGLLDHKHLDHEVAKPARRKRLPEMAQPVDPAHNVSRLHHGGWTVIQRRHDGSVDFNRPWEAYKAGFGDPHGEFWLGLEKVHSITGDRNSRLAVQLRDWDGNAELLQFSVHLGGEDTAYSLQLTAPVAGQLGATTVPPSGLSVPFSTWDQDHDLRRDKNCAKSLSGGWWFGTCSHSNLNGQYFRSIPQQRQKLKKGIFWKTWRGRYYPLQATTMLIQPMAAEAAS

SEQ ID NO: 4849 - protein, 239 aa, Homo sapiens
MAQPVDPAHNVSRLHRLPRDCQELFQVGERQSGLFEIQPQGSPPFLVNCKMTSDGGWTVIQRRHDGSVDFNRPWEAYKAGFGDPHGEFWLGLEKVHSITGDRNSRLAVQLRDWDGNAELLQFSVHLGGEDTAYSLQLTAPVAGQLGATTVPPSGLSVPFSTWDQDHDLRRDKNCAKSLSGGWWFGTCSHSNLNGQYFRSIPQQRQKLKKGIFWKTWRGRYYPLQATTMLIQPMAAEAAS

SEQ ID NO: 4850 - protein, 278 aa, Homo sapiens
MEPRAADGCFLGDVGFWVERTPVHEAAQRGESLQLQQLIESGACVNQVTVDSITPLHAASLQGQARCVQLLLAAGAQVDARNIDGSTPLCDACASGSIECVKLLLSYGAKVNPPLYTASPLHEACMSGSSECVRLLIDVGANLEAHDCHFGTPLHVACAREHLDCVKVLLNAGANVNAAKLHETALHHAAKVKNVDLIEMLIEFGGNIYARDNRGKKPSDYTWSSSAPAKCFEYYEKTPLTLSQLCRVNLRKATGVRGLEKIAKLNIPPRLIDYLSYN

SEQ ID NO: 4851 - protein, 131 aa, Homo sapiens
MEKIPVSAFLLLVALSYTLARDTTVKPGAKKDTKDSRPKLPQTLSRGWGDQLIWTQTYEEALYKSKTSNKPLMIIHHLDECPHSQALKKVFAENKEIQKLAEQFVLLNLVYETTDKHLSPDGQYVPRIMFV

SEQ ID NO: 4852 - protein, 175 aa, Homo sapiens
MEKIPVSAFLLLVALSYTLARDTTVKPGAKKDTKDSRPKLPQTLSRGWGDQLIWTQTYEEALYKSKTSNKPLMIIHHLDECPHSQALKKVFAENKEIQKLAEQFVLLNLVYETTDKHLSPDGQYVPRIMFVDPSLTVRADITGRYSNRLYAYEPADTALLLDNMKKALKLLKTEL

SEQ ID NO: 4853 - protein, 195 aa, Homo sapiens
MSNYTDAESSFSKQEIIRVAMEKIPVSAFLLLVALSYTLARDTTVKPGAKKDTKDSRPKLPQTLSRGWGDQLIWTQTYEEALYKSKTSNKPLMIIHHLDECPHSQALKKVFAENKEIQKLAEQFVLLNLVYETTDKHLSPDGQYVPRIMFVDPSLTVRADITGRYSNRLYAYEPADTALLLDNMKKALKLLKTEL

SEQ ID NO: 4854 - protein, 416 aa, Homo sapiens
MWPTRRLVTIKRSGVDGPHFPLSLSTCLFGRYENESLQNGRKSTEFPRKIREQEPARRVSRSSFSSDPDESEGIPLKRRRVSFGGHLRPELFDENLPPNTPLKRGEAPTKRKSLVMHTPPVLKKIIKEQPQPSGKQESGSEIHVEVKAQSLVISPPAPSPRKTPVASDQRRRSCKTAPASSSKSQTEVPKRGGRKSGNLPSKRVSISRSQHDILQMICSKRRSGASEANLIVAKSWADVVKLGAKQTQTKVIKHGPQRSMNKRQRRPATPKKPVGEVHSQFSTGHANSPCTIIIGKAHTEKVHVPARPYRVLNNFISNQKMDFKEDLSGIAEMFKTPVKEQPQLTSTCHIAISNSENLLGKQFQGTDSGEEPLLPTSESFGGNVFFSAQNAAKQPSDKCSASPPLRRQCIRENGNV

SEQ ID NO: 4855 - protein, 2896 aa, Homo sapiens
MWPTRRLVTIKRSGVDGPHFPLSLSTCLFGRGIECDIRIQLPVVSKQHCKIEIHEQEAILHNFSSTNPTQVNGSVIDEPVRLKHGDVITIIDRSFRYENESLQNGRKSTEFPRKIREQEPARRVSRSSFSSDPDESEGIPLKRRRVSFGGHLRPELFDENLPPNTPLKRGEAPTKRKSLVMHTPPVLKKIIKEQPQPSGKQESGSEIHVEVKAQSLVISPPAPSPRKTPVASDQRRRSCKTAPASSSKSQTEVPKRGGRKSGNLPSKRVSISRSQHDILQMICSKRRSGASEANLIVAKSWADVVKLGAKQTQTKVIKHGPQRSMNKRQRRPATPKKPVGEVHSQFSTGHANSPCTIIIGKAHTEKVHVPARPYRVLNNFISNQKMDFKEDLSGIAEMFKTPVKEQPQLTSTCHIAISNSENLLGKQFQGTDSGEEPLLPTSESFGGNVFFSAQNAAKQPSDKCSASPPLRRQCIRENGNVAKTPRNTYKMTSLETKTSDTETEPSKTVSTANRSGRSTEFRNIQKLPVESKSEETNTEIVECILKRGQKATLLQQRREGEMKEIERPFETYKENIELKENDEKMKAMKRSRTWGQKCAPMSDLTDLKSLPDTELMKDTARGQNLLQTQDHAKAPKSEKGKITKMPCQSLQPEPINTPTHTKQQLKASLGKVGVKEELLAVGKFTRTSGETTHTHREPAGDGKSIRTFKESPKQILDPAARVTGMKKWPRTPKEEAQSLEDLAGFKELFQTPGPSEESMTDEKTTKIACKSPPPESVDTPTSTKQWPKRSLRKADVEEEFLALRKLTPSAGKAMLTPKPAGGDEKDIKAFMGTPVQKLDLAGTLPGSKRQLQTPKEKAQALEDLAGFKELFQTPGHTEELVAAGKTTKIPCDSPQSDPVDTPTSTKQRPKRSIRKADVEGELLACRNLMPSAGKAMHTPKPSVGEEKDIIIFVGTPVQKLDLTENLTGSKRRPQTPKEEAQALEDLTGFKELFQTPGHTEEAVAAGKTTKMPCESSPPESADTPTSTRRQPKTPLEKRDVQKELSALKKLTQTSGETTHTDKVPGGEDKSINAFRETAKQKLDPAASVTGSKRHPKTKEKAQPLEDLAGLKELFQTPVCTDKPTTHEKTTKIACRSQPDPVDTPTSSKPQSKRSLRKVDVEEEFFALRKRTPSAGKAMHTPKPAVSGEKNIYAFMGTPVQKLDLTENLTGSKRRLQTPKEKAQALEDLAGFKELFQTRGHTEESMTNDKTAKVACKSSQPDPDKNPASSKRRLKTSLGKVGVKEELLAVGKLTQTSGETTHTHTEPTGDGKSMKAFMESPKQILDSAASLTGSKRQLRTPKGKSEVPEDLAGFIELFQTPSHTKESMTNEKTTKVSYRASQPDLVDTPTSSKPQPKRSLRKADTEEEFLAFRKQTPSAGKAMHTPKPAVGEEKDINTFLGTPVQKLDQPGNLPGSNRRLQTRKEKAQALEELTGFRELFQTPCTDNPTTDEKTTKKILCKSPQSDPADTPTNTKQRPKRSLKKADVEEEFLAFRKLTPSAGKAMHTPKAAVGEEKDINTFVGTPVEKLDLLGNLPGSKRRPQTPKEKAKALEDLAGFKELFQTPGHTEESMTDDKITEVSCKSPQPDPVKTPTSSKQRLKISLGKVGVKEEVLPVGKLTQTSGKTTQTHRETAGDGKSIKAFKESAKQMLDPANYGTGMERWPRTPKEEAQSLEDLAGFKELFQTPDHTEESTTDDKTTKIACKSPPPESMDTPTSTRRRPKTPLGKRDIVEELSALKQLTQTTHTDKVPGDEDKGINVFRETAKQKLDPAASVTGSKRQPRTPKGKAQPLEDLAGLKELFQTPICTDKPTTHEKTTKIACRSPQPDPVGTPTIFKPQSKRSLRKADVEEESLALRKRTPSVGKAMDTPKPAGGDEKDMKAFMGTPVQKLDLPGNLPGSKRWPQTPKEKAQALEDLAGFKELFQTPGTDKPTTDEKTTKIACKSPQPDPVDTPASTKQRPKRNLRKADVEEEFLALRKRTPSAGKAMDTPKPAVSDEKNINTFVETPVQKLDLLGNLPGSKRQPQTPKEKAEALEDLVGFKELFQTPGHTEESMTDDKITEVSCKSPQPESFKTSRSSKQRLKIPLVKVDMKEEPLAVSKLTRTSGETTQTHTEPTGDSKSIKAFKESPKQILDPAASVTGSRRQLRTRKEKARALEDLVDFKELFSAPGHTEESMTIDKNTKIPCKSPPPELTDTATSTKRCPKTRPRKEVKEELSAVERLTQTSGQSTHTHKEPASGDEGIKVLKQRAKKKPNPVEEEPSRRRPRAPKEKAQPLEDLAGFTELSETSGHTQESLTAGKATKIPCESPPLEVVDTTASTKRHLRTRVQKVQVKEEPSAVKFTQTSGETTDADKEPAGEDKGIKALKESAKQTPAPAASVTGSRRRPRAPRESAQAIEDLAGFKDPAAGHTEESMTDDKTTKIPCKSSPELEDTATSSKRRPRTRAQKVEVKEELLAVGKLTQTSGETTHTDKEPVGEGKGTKAFKQPAKRKLDAEDVIGSRRQPRAPKEKAQPLEDLASFQELSQTPGHTEELANGAADSFTSAPKQTPDSGKPLKISRRVLRAPKVEPVGDVVSTRDPVKSQSKSNTSLPPLPFKRGGGKDGSVTGTKRLRCMPAPEEIVEELPASKKQRVAPRARGKSSEPVVIMKRSLRTSAKRIEPAEELNSNDMKTNKEEHKLQDSVPENKGISLRSRRQNKTEAEQQITEVFVLAERIEINRNEKKPMKTSPEMDIQNPDDGARKPIPRDKVTENKRCLRSARQNESSQPKVAEESGGQKSAKVLMQNQKGKGEAGNSDSMCLRSRKTKSQPAASTLESKSVQRVTRSVKRCAENPKKAEDNVCVKKIRTRSHRDSEDI

SEQ ID NO: 4856 - protein, 3256 aa, Homo sapiens
MWPTRRLVTIKRSGVDGPHFPLSLSTCLFGRGIECDIRIQLPVVSKQHCKIEIHEQEAILHNFSSTNPTQVNGSVIDEPVRLKHGDVITIIDRSFRYENESLQNGRKSTEFPRKIREQEPARRVSRSSFSSDPDEKAQDSKAYSKITEGKVSGNPQVHIKNVKEDSTADDSKDSVAQGTTNVHSSEHAGRNGRNAADPISGDFKEISSVKLVSRYGELKSVPTTQCLDNSKKNESPFWKLYESVKKELDVKSQKENVLQYCRKSGLQTDYATEKESADGLQGETQLLVSRKSRPKSGGSGHAVAEPASPEQELDQNKGKGRDVESVQTPSKAVGASFPLYEPAKMKTPVQYSQQQNSPQKHKNKDLYTTGRRESVNLGKSEGFKAGDKTLTPRKLSTRNRTPAKVEDAADSATKPENLSSKTRGSIPTDVEVLPTETEIHNEPFLTLWLTQVERKIQKDSLSKPEKLGTTAGQMCSGLPGLSSVDINNFGDSINESEGIPLKRRRVSFGGHLRPELFDENLPPNTPLKRGEAPTKRKSLVMHTPPVLKKIIKEQPQPSGKQESGSEIHVEVKAQSLVISPPAPSPRKTPVASDQRRRSCKTAPASSSKSQTEVPKRGGRKSGNLPSKRVSISRSQHDILQMICSKRRSGASEANLIVAKSWADVVKLGAKQTQTKVIKHGPQRSMNKRQRRPATPKKPVGEVHSQFSTGHANSPCTIIIGKAHTEKVHVPARPYRVLNNFISNQKMDFKEDLSGIAEMFKTPVKEQPQLTSTCHIAISNSENLLGKQFQGTDSGEEPLLPTSESFGGNVFFSAQNAAKQPSDKCSASPPLRRQCIRENGNVAKTPRNTYKMTSLETKTSDTETEPSKTVSTANRSGRSTEFRNIQKLPVESKSEETNTEIVECILKRGQKATLLQQRREGEMKEIERPFETYKENIELKENDEKMKAMKRSRTWGQKCAPMSDLTDLKSLPDTELMKDTARGQNLLQTQDHAKAPKSEKGKITKMPCQSLQPEPINTPTHTKQQLKASLGKVGVKEELLAVGKFTRTSGETTHTHREPAGDGKSIRTFKESPKQILDPAARVTGMKKWPRTPKEEAQSLEDLAGFKELFQTPGPSEESMTDEKTTKIACKSPPPESVDTPTSTKQWPKRSLRKADVEEEFLALRKLTPSAGKAMLTPKPAGGDEKDIKAFMGTPVQKLDLAGTLPGSKRQLQTPKEKAQALEDLAGFKELFQTPGHTEELVAAGKTTKIPCDSPQSDPVDTPTSTKQRPKRSIRKADVEGELLACRNLMPSAGKAMHTPKPSVGEEKDIIIFVGTPVQKLDLTENLTGSKRRPQTPKEEAQALEDLTGFKELFQTPGHTEEAVAAGKTTKMPCESSPPESADTPTSTRRQPKTPLEKRDVQKELSALKKLTQTSGETTHTDKVPGGEDKSINAFRETAKQKLDPAASVTGSKRHPKTKEKAQPLEDLAGLKELFQTPVCTDKPTTHEKTTKIACRSQPDPVDTPTSSKPQSKRSLRKVDVEEEFFALRKRTPSAGKAMHTPKPAVSGEKNIYAFMGTPVQKLDLTENLTGSKRRLQTPKEKAQALEDLAGFKELFQTRGHTEESMTNDKTAKVACKSSQPDPDKNPASSKRRLKTSLGKVGVKEELLAVGKLTQTSGETTHTHTEPTGDGKSMKAFMESPKQILDSAASLTGSKRQLRTPKGKSEVPEDLAGFIELFQTPSHTKESMTNEKTTKVSYRASQPDLVDTPTSSKPQPKRSLRKADTEEEFLAFRKQTPSAGKAMHTPKPAVGEEKDINTFLGTPVQKLDQPGNLPGSNRRLQTRKEKAQALEELTGFRELFQTPCTDNPTTDEKTTKKILCKSPQSDPADTPTNTKQRPKRSLKKADVEEEFLAFRKLTPSAGKAMHTPKAAVGEEKDINTFVGTPVEKLDLLGNLPGSKRRPQTPKEKAKALEDLAGFKELFQTPGHTEESMTDDKITEVSCKSPQPDPVKTPTSSKQRLKISLGKVGVKEEVLPVGKLTQTSGKTTQTHRETAGDGKSIKAFKESAKQMLDPANYGTGMERWPRTPKEEAQSLEDLAGFKELFQTPDHTEESTTDDKTTKIACKSPPPESMDTPTSTRRRPKTPLGKRDIVEELSALKQLTQTTHTDKVPGDEDKGINVFRETAKQKLDPAASVTGSKRQPRTPKGKAQPLEDLAGLKELFQTPICTDKPTTHEKTTKIACRSPQPDPVGTPTIFKPQSKRSLRKADVEEESLALRKRTPSVGKAMDTPKPAGGDEKDMKAFMGTPVQKLDLPGNLPGSKRWPQTPKEKAQALEDLAGFKELFQTPGTDKPTTDEKTTKIACKSPQPDPVDTPASTKQRPKRNLRKADVEEEFLALRKRTPSAGKAMDTPKPAVSDEKNINTFVETPVQKLDLLGNLPGSKRQPQTPKEKAEALEDLVGFKELFQTPGHTEESMTDDKITEVSCKSPQPESFKTSRSSKQRLKIPLVKVDMKEEPLAVSKLTRTSGETTQTHTEPTGDSKSIKAFKESPKQILDPAASVTGSRRQLRTRKEKARALEDLVDFKELFSAPGHTEESMTIDKNTKIPCKSPPPELTDTATSTKRCPKTRPRKEVKEELSAVERLTQTSGQSTHTHKEPASGDEGIKVLKQRAKKKPNPVEEEPSRRRPRAPKEKAQPLEDLAGFTELSETSGHTQESLTAGKATKIPCESPPLEVVDTTASTKRHLRTRVQKVQVKEEPSAVKFTQTSGETTDADKEPAGEDKGIKALKESAKQTPAPAASVTGSRRRPRAPRESAQAIEDLAGFKDPAAGHTEESMTDDKTTKIPCKSSPELEDTATSSKRRPRTRAQKVEVKEELLAVGKLTQTSGETTHTDKEPVGEGKGTKAFKQPAKRKLDAEDVIGSRRQPRAPKEKAQPLEDLASFQELSQTPGHTEELANGAADSFTSAPKQTPDSGKPLKISRRVLRAPKVEPVGDVVSTRDPVKSQSKSNTSLPPLPFKRGGGKDGSVTGTKRLRCMPAPEEIVEELPASKKQRVAPRARGKSSEPVVIMKRSLRTSAKRIEPAEELNSNDMKTNKEEHKLQDSVPENKGISLRSRRQNKTEAEQQITEVFVLAERIEINRNEKKPMKTSPEMDIQNPDDGARKPIPRDKVTENKRCLRSARQNESSQPKVAEESGGQKSAKVLMQNQKGKGEAGNSDSMCLRSRKTKSQPAASTLESKSVQRVTRSVKRCAENPKKAEDNVCVKKIRTRSHRDSEDI

SEQ ID NO: 4857 - protein, 3255 aa, Homo sapiens
MWPTRRLVTIKRSGVDGPHFPLSLSTCLFGRGIECDIRIQLPVVSKQHCKIEIHEQEAILHNFSSTNPTQVNGSVIDEPVRLKHGDVITIIDRSFRYENESLQNGRKSTEFPRKIREQEPARRVSRSSFSSDPDEKAQDSKAYSKITEGKVSGNPQVHIKNVKEDSTADDSKDSVAQGTTNVHSSEHAGRNGRNAADPISGDFKEISSVKLVSRYGELKSVPTTQCLDNSKKNESPFWKLYESVKKELDVKSQKENVLQYCRKSGLQTDYATEKESADGLQGETQLLVSRKSRPKSGGSGHAVAEPASPEQELDQNKGKGRDVESVQTPSKAVGASFPLYEPAKMKTPVQYSQQQNSPQKHKNKDLYTTGRRESVNLGKSEGFKAGDKTLTPRKLSTRNRTPAKVEDAADSATKPENLSSKTRGSIPTDVEVLPTETEIHNEPFLTLWLTQVERKIQKDSLSKPEKLGTTAGQMCSGLPGLSSVDINNFGDSINESEGIPLKRRRVSFGGHLRPELFDENLPPNTPLKRGEAPTKRKSLVMHTPPVLKKIIKEQPQPSGKQESGSEIHVEVKAQSLVISPPAPSPRKTPVASDQRRRSCKTAPASSSKSQTEVPKRGGERVATCLQRVSISRSQHDILQMICSKRRSGASEANLIVAKSWADVVKLGAKQTQTKVIKHGPQRSMNKRQRRPATPKKPVGEVHSQFSTGHANSPCTIIIGKAHTEKVHVPARPYRVLNNFISNQKMDFKEDLSGIAEMFKTPVKEQPQLTSTCHIAISNSENLLGKQFQGTDSGEEPLLPTSESFGGNVFFSAQNAAKQPSDKCSASPPLRRQCIRENGNVAKTPRNTYKMTSLETKTSDTETEPSKTVSTANRSGRSTEFRNIQKLPVESKSEETNTEIVECILKRGQKATLLQQRREGEMKEIERPFETYKENIELKENDEKMKAMKRSRTWGQKCAPMSDLTDLKSLPDTELMKDTARGQNLLQTQDHAKAPKSEKGKITKMPCQSLQPEPINTPTHTKQQLKASLGKVGVKEELLAVGKFTRTSGETTHTHREPAGDGKSIRTFKESPKQILDPAARVTGMKKWPRTPKEEAQSLEDLAGFKELFQTPGPSEESMTDEKTTKIACKSPPPESVDTPTSTKQWPKRSLRKADVEEEFLALRKLTPSAGKAMLTPKPAGGDEKDIKAFMGTPVQKLDLAGTLPGSKRQLQTPKEKAQALEDLAGFKELFQTPGHTEELVAAGKTTKIPCDSPQSDPVDTPTSTKQRPKRSIRKADVEGELLACRNLMPSAGKAMHTPKPSVGEEKDIIIFVGTPVQKLDLTENLTGSKRRPQTPKEEAQALEDLTGFKELFQTPGHTEEAVAAGKTTKMPCESSPPESADTPTSTRRQPKTPLEKRDVQKELSALKKLTQTSGETTHTDKVPGGEDKSINAFRETAKQKLDPAASVTGSKRHPKTKEKAQPLEDLAGLKELFQTPVCTDKPTTHEKTTKIACRSQPDPVDTPTSSKPQSKRSLRKVDVEEEFFALRKRTPSAGKAMHTPKPAVSGEKNIYAFMGTPVQKLDLTENLTGSKRRLQTPKEKAQALEDLAGFKELFQTRGHTEESMTNDKTAKVACKSSQPDPDKNPASSKRRLKTSLGKVGVKEELLAVGKLTQTSGETTHTHTEPTGDGKSMKAFMESPKQILDSAASLTGSKRQLRTPKGKSEVPEDLAGFIELFQTPSHTKESMTNEKTTKVSYRASQPDLVDTPTSSKPQPKRSLRKADTEEEFLAFRKQTPSAGKAMHTPKPAVGEEKDINTFLGTPVQKLDQPGNLPGSNRRLQTRKEKAQALEELTGFRELFQTPCTDNPTTDEKTTKKILCKSPQSDPADTPTNTKQRPKRSLKKADVEEEFLAFRKLTPSAGKAMHTPKAAVGEEKDINTFVGTPVEKLDLLGNLPGSKRRPQTPKEKAKALEDLAGFKELFQTPGHTEESMTDDKITEVSCKSPQPDPVKTPTSSKQRLKISLGKVGVKEEVLPVGKLTQTSGKTTQTHRETAGDGKSIKAFKESAKQMLDPANYGTGMERWPRTPKEEAQSLEDLAGFKELFQTPDHTEESTTDDKTTKIACKSPPPESMDTPTSTRRRPKTPLGKRDIVEELSALKQLTQTTHTDKVPGDEDKGINVFRETAKQKLDPAASVTGSKRQPRTPKGKAQPLEDLAGLKELFQTPICTDKPTTHEKTTKIACRSPQPDPVGTPTIFKPQSKRSLRKADVEEESLALRKRTPSVGKAMDTPKPAGGDEKDMKAFMGTPVQKLDLPGNLPGSKRWPQTPKEKAQALEDLAGFKELFQTPGTDKPTTDEKTTKIACKSPQPDPVDTPASTKQRPKRNLRKADVEEEFLALRKRTPSAGKAMDTPKPAVSDEKNINTFVETPVQKLDLLGNLPGSKRQPQTPKEKAEALEDLVGFKELFQTPGHTEESMTDDKITEVSCKSPQPESFKTSRSSKQRLKIPLVKVDMKEEPLAVSKLTRTSGETTQTHTEPTGDSKSIKAFKESPKQILDPAASVTGSRRQLRTRKEKARALEDLVDFKELFSAPGHTEESMTIDKNTKIPCKSPPPELTDTATSTKRCPKTRPRKEVKEELSAVERLTQTSGQSTHTHKEPASGDEGIKVLKQRAKKKPNPVEEEPSRRRPRAPKEKAQPLEDLAGFTELSETSGHTQESLTAGKATKIPCESPPLEVVDTTASTKRHLRTRVQKVQVKEEPSAVKFTQTSGETTDADKEPAGEDKGIKALKESAKQTPAPAASVTGSRRRPRAPRESAQAIEDLAGFKDPAAGHTEESMTDDKTTKIPCKSSPELEDTATSSKRRPRTRAQKVEVKEELLAVGKLTQTSGETTHTDKEPVGEGKGTKAFKQPAKRKLDAEDVIGSRRQPRAPKEKAQPLEDLASFQELSQTPGHTEELANGAADSFTSAPKQTPDSGKPLKISRRVLRAPKVEPVGDVVSTRDPVKSQSKSNTSLPPLPFKRGGGKDGSVTGTKRLRCMPAPEEIVEELPASKKQRVAPRARGKSSEPVVIMKRSLRTSAKRIEPAEELNSNDMKTNKEEHKLQDSVPENKGISLRSRRQNKTEAEQQITEVFVLAERIEINRNEKKPMKTSPEMDIQNPDDGARKPIPRDKVTENKRCLRSARQNESSQPKVAEESGGQKSAKVLMQNQKGKGEAGNSDSMCLRSRKTKSQPAASTLESKSVQRVTRSVKRCAENPKKAEDNVCVKKIRTRSHRDSEDI

SEQ ID NO: 4858 - protein, 46 aa, Homo sapiens
MWPTRRLVTIKRSGVDGPHFPLSLSTCLFGRRKCVLQCTECSKTAI

SEQ ID NO: 4859 - protein, 518 aa, Homo sapiens
MLRVVSWNINGIRRPLQGVANQEPSNCAAVAVGRILDELDADIVCLQETKVTRDALTEPLAIVEGYNSYFSFSRNRSGYSGVATFCKDNATPVAAEEGLSGLFATQNGDVGCYGNMDEFTQEELRALDSEGRALLTQHKIRTWEGKEKTLTLINVYCPHADPGRPERLVFKMRFYRLLQIRAEALLAAGSHVIILGDLNTAHRPIDHWDAVNLECFEEDPGRKWMDSLLSNLGCQSASHVGPFIDSYRCFQPKQEGAFTCWSAVTGARHLNYGSRLDYVLGDRTLVIDTFQASFLLPEVMGSDHCPVGAVLSVSSVPAKQCPPLCTRFLPEFAGTQLKILRFLVPLEQSPVLEQSTLQHNNQTRVQTCQNKAQVRSTRPQPSQVGSSRGQKNLKSYFQPSPSCPQASPDIELPSLPLMSALMTPKTPEEKAVAKVVKGQAKTSEAKDEKELRTSFWKSVLAGPLRTPLCGGHREPCVMRTVKKPGPNLGRRFYMCARPRGPPTDPSSRCNFFLWSRPS

SEQ ID NO: 4860 - protein, 318 aa, Homo sapiens
MPKRGKKGAVAEDGDELRTEPEAKKSKTAAKKNDKEAAGEGPALYEDPPDQKTSPSGKPATLKICSWNVDGLRAWIKKKGLDWVKEEAPDILCLQETKCSENKLPAELQELPGLSHQYWSAPSDKEGYSGVGLLSRQCPLKVSYGIGDEEHDQEGRVIVAEFDSFVLVTAYVPNAGRGLVRLEYRQRWDEAFRKFLKGLASRKPLVLCGDLNVAHEEIDLRNPKGNKKNAGFTPQERQGFGELLQAVPLADSFRHLYPNTPYAYTFWTYMMNARSKNVGWRLDYFLLSHSLLPALCDSKIRSKALGSDHCPITLYLAL

SEQ ID NO: 4861 - protein, 318 aa, Homo sapiens; identical to SEQ ID NO: 4860

SEQ ID NO: 4862 - protein, 263 aa, Homo sapiens
MPKRGKKGAVAEDGDELRTEPEAKKSKTAAKKNDKEAAGEGPALYEDPPDQKTSPSGKPATLKICSWNVDGLRAWIKKKGLDWVKEEAPDILCLQETKCSENKLPAELQELPGLSHQYWSAPSDKEGYSGVGLLSRQCPLKVSYGIGDEEHDQEGRVIVAEFDSFVLVTAYVPNAGRGLVRLEYRQRWDEAFRKFLKGLASRKPLVLCGDLNVAHEEIDLRNPKGNKKNAGFTPQERQGFGELLQAVPLADSFRHLYPNTPYA

SEQ ID NO: 4863 - protein, 318 aa, Homo sapiens; identical to SEQ ID NO: 4860

SEQ ID NO: 4864 - protein, 174 aa, Homo sapiens
MPKRGKKGAVAEDGDELRTEPEAKKSKTAAKKNDKEAAGEGPALYEDPPDQKTSPSGKPATLKICSWNVDGLRAWIKKKGLDWVKEEAPDILCLQETKCSENKLPAELQELPGLSHQYWSAPSDKEGYSGVGLLSRQCPLKVSYGIGDEEHDQEGRVIVAEFDSFVLVTAYVPN

SEQ ID NO: 4865 - protein, 108 aa, Homo sapiens
MPKRGKKGAVAEDGDELRTEPEAKKSKTAAKKNDKEAAGEGPALYEDPPDQKTSPSGKPATLKICSWNVDGLRAWIKKKGLDWVKEEAPDILCLQETKCSENKLPAEL

SEQ ID NO: 4866 - protein, 146 aa, Homo sapiens
MPKRGKKGAVAEDGDELRTEPEAKKSKTAAKKNDKEAAGEGPALYEDPPDQKTSPSGKPATLKICSWNVDGLRAWIKKKGLDWVKEEAPDILCLQETKCSENKLPAELQELPGLSHQYWSAPSDKEGYSGVGLLSRQCPLKVSYGI

SEQ ID NO: 4867 - protein, 324 aa, Homo sapiens
MFRCGGLAAGALKQKLVPLVRTVCVRSPRQRNRLPGNLFQRWHVPLELQMTRQMASSGASGGKIDNSVLVLIVGLSTVGAGAYAYKTMKEDEKRYNERISGLGLTPEQKQKKAALSASEGEEVPQDKAPSHVPFLLIGGGTAAFAAARSIRARDPGARVLIVSEDPELPYMRPPLSKELWFSDDPNVTKTLRFKQWNGKERSIYFQPPSFYVSAQDLPHIENGGVAVLTGKKVVQLDVRDNMVKLNDGSQITYEKCLIATGGTPRSLSAIDRAGAEVKSRTTLFRKIGDFRSLEKISREVKSITIIGGGFLGSELACALGRKDI

SEQ ID NO: 4868 - protein, 613 aa, Homo sapiens
MFRCGGLAAGALKQKLVPLVRTVCVRSPRQRNRLPGNLFQRWHVPLELQMTRQMASSGASGGKIDNSVLVLIVGLSTVGAGAYAYKTMKEDEKRYNERISGLGLTPEQKQKKAALSASEGEEVPQDKAPSHVPFLLIGGGTAAFAAARSIRARDPGARVLIVSEDPELPYMRPPLSKELWFSDDPNVTKTLRFKQWNGKERSIYFQPPSFYVSAQDLPHIENGGVAVLTGKKVVQLDVRDNMVKLNDGSQITYEKCLIATGGTPRSLSAIDRAGAEVKSRTTLFRKIGDFRSLEKISREVKSITIIGGGFLGSELACALGRKARALGTEVIQLFPEKGNMGKILPEYLSNWTMEKVRREGVKVMPNAIVQSVGVSSGKLLIKLKDGRKVETDHIVAAVGLEPNVELAKTGGLEIDSDFGGFRVNAELQARSNIWVAGDAACFYDIKLGRRRVEHHDHAVVSGRLAGENMTGAAKPYWHQSMFWSDLGPDVGYEAIGLVDSSLPTVGVFAKATAQDNPKSATEQSGTGIRSESETESEASEITIPPSTPAVPQAPVQGEDYGKGVIFYLRDKVVVGIVLWNIFNRMPIARKIIKDGEQHEDLNEVAKLFNIHED

SEQ ID NO: 4869 - protein, 609 aa, Homo sapiens
MFRCGGLAAGALKQKLVPLVRTVCVRSPRQRNRLPVVQSHHLGSPSRSLASTGASGKDGSNLVYFLIVGATVTGAGVYYAYKTMKEDEKRYNERISGLGLTPEQKQKKAALSASEGEEVPQDKAPSHVPFLLIGGGTAAFAAARSIRARDPGARVLIVSEDPELPYMRPPLSKELWFSDDPNVTKTLRFKQWNGKERSIYFQPPSFYVSAQDLPHIENGGVAVLTGKKVVQLDVRDNMVKLNDGSQITYEKCLIATGGTPRSLSAIDRAGAEVKSRTTLFRKIGDFRSLEKISREVKSITIIGGGFLGSELACALGRKARALGTEVIQLFPEKGNMGKILPEYLSNWTMEKVRREGVKVMPNAIVQSVGVSSGKLLIKLKDGRKVETDHIVAAVGLEPNVELAKTGGLEIDSDFGGFRVNAELQARSNIWVAGDAACFYDIKLGRRRVEHHDHAVVSGRLAGENMTGAAKPYWHQSMFWSDLGPDVGYEAIGLVDSSLPTVGVFAKATAQDNPKSATEQSGTGIRSESETESEASEITIPPSTPAVPQAPVQGEDYGKGVIFYLRDKVVVGIVLWNIFNRMPIARKIIKDGEQHEDLNEVAKLFNIHED

SEQ ID NO: 4870 - protein, 326 aa, Homo sapiens
MFRCGGLAAGALKQKLVPLVRTVCVRSPRQRNRLPARALGTEVIQLFPEKGNMGKILPEYLSNWTMEKVRREGVKVMPNAIVQSVGVSSGKLLIKLKDGRKVETDHIVAAVGLEPNVELAKTGGLEIDSDFGGFRVNAELQARSNIWVAGDAACFYDIKLGRRRVEHHDHAVVSGRLAGENMTGAAKPYWHQSMFWSDLGPDVGYEAIGLVDSSLPTVGVFAKATAQDNPKSATEQSGTGIRSESETESEASEITIPPSTPAVPQAPVQGEDYGKGVIFYLRDKVVVGIVLWNIFNRMPIARKIIKDGEQHEDLNEVAKLFNIHED

SEQ ID NO: 4871 - protein, 261 aa, Homo sapiens
MEKVRREGVKVMPNAIVQSVGVSSGKLLIKLKDGRKVETDHIVAAVGLEPNVELAKTGGLEIDSDFGGFRVNAELQARSNIWVAGDAACFYDIKLGRRRVEHHDHAVVSGRLAGENMTGAAKPYWHQSMFWSDLGPDVGYEAIGLVDSSLPTVGVFAKATAQDNPKSATEQSGTGIRSESETESEASEITIPPSTPAVPQAPVQGEDYGKGVIFYLRDKVVVGIVLWNIFNRMPIARKIIKDGEQHEDLNEVAKLFNIHED

SEQ ID NO: 4872 - protein, 274 aa, Homo sapiens
MGKILPEYLSNWTMEKVRREGVKVMPNAIVQSVGVSSGKLLIKLKDGRKVETDHIVAAVGLEPNVELAKTGGLEIDSDFGGFRVNAELQARSNIWVAGDAACFYDIKLGRRRVEHHDHAVVSGRLAGENMTGAAKPYWHQSMFWSDLGPDVGYEAIGLVDSSLPTVGVFAKATAQDNPKSATEQSGTGIRSESETESEASEITIPPSTPAVPQAPVQGEDYGKGVIFYLRDKVVVGIVLWNIFNRMPIARKIIKDGEQHEDLNEVAKLFNIHED

SEQ ID NO: 4873 - protein, 237 aa, Homo sapiens
MKEDEKRYNERISGLGLTPEQKQKKAALSASEGEEVPQDKAPSHVPFLLIGGGTAAFAAARSIRARDPGARVLIVSEDPELPYMRPPLSKELWFSDDPNVTKTLRFKQWNGKERSIYFQPPSFYVSAQDLPHIENGGVAVLTGKKVVQLDVRDNMVKLNDGSQITYEKCLIATGGTPRSLSAIDRAGAEVKSRTTLFRKIGDFRSLEKISREVKSITIIGGGFLGSELACALGRKDI

SEQ ID NO: 4874 - protein, 338 aa, Homo sapiens
MDAKARNCLLQHREALEKDIKTSYIMDHMISDGFLTISEEEKVRNEPTQQQRAAMLIKMILKKDNDSYVSFYNALLHEGYKDLAALLHDGIPVVSSSSGKDSVSGITSYVRTVLCEGGVPQRPVVFVTRKKLVNAIQQKLSKLKGEPGWVTIHGMAGCGKSVLAAEAVRDHSLLEGCFPGGVHWVSVGKQDKSGLLMKLQNLCTRLDQDESFSQRLPLNIEEAKDRLRILMLRKHPRSLLILDDVWDSWVLKAFDSQCQILLTTRDKSVTDSVMGPKYVVPVESSLGKEKGLEILSLFVNMKKADLPEQAHSIIKECKVVERCHWGILTDLLHKWNQS

SEQ ID NO: 4875 - protein, 1163 aa, Homo sapiens
MDAKARNCLLQHREALEKDIKTSYIMDHMISDGFLTISEEEKVRNEPTQQQRAAMLIKMILKKDNDSYVSFYNALLHEGYKDLAALLHDGIPVVSSSSGKDSVSGITSYVRTVLCEGGVPQRPVVFVTRKKLVNAIQQKLSKLKGEPGWVTIHGMAGCGKSVLAAEAVRDHSLLEGCFPGGVHWVSVGKQDKSGLLMKLQNLCTRLDQDESFSQRLPLNIEEAKDRLRILMLRKHPRSLLILDDVWDSWVLKAFDSQCQILLTTRDKSVTDSVMGPKYVVPVESSLGKEKGLEILSLFVNMKKADLPEQAHSIIKECKGSPLVVSLIGALLRDFPNRWEYYLKQLQNKQFKRIRKSSSYDYEALDEAMSISVEMLREDIKDYYTDLSILQKDVKVPTKVLCILWDMETEEVEDILQEFVNKSLLFCDRNGKSFRYYLHDLQVDFLTEKNCSQLQDLHKKIITQFQRYHQPHTLSPDQEDCMYWYNFLAYHMASAKMHKELCALMFSLDWIKAKTELVGPAHLIHEFVEYRHILDEKDCAVSENFQEFLSLNGHLLGRQPFPNIVQLGLCEPETSEVYQQAKLQAKQEVDNGMLYLEWINKKNITNLSRLVVRPHTDAVYHACFSEDGQRIASCGADKTLQVFKAETGEKLLEIKAHEDEVLCCAFSTDDRFIATCSVDKKVKIWNSMTGELVHTYDEHSEQVNCCHFTNSSHHLLLATGSSDCFLKLWDLNQKECRNTMFGHTNSVNHCRFSPDDKLLASCSADGTLKLWDATSANERKSINVKQFFLNLEDPQEDMEVIVKCCSWSADGARIMVAAKNKIFLWNTDSRSKVADCRGHLSWVHGVMFSPDGSSFLTSSDDQTIRLWETKKVCKNSAVMLKQEVDVVFQENEVMVLAVDHIRRLQLINGRTGQIDYLTEAQVSCCCLSPHLQYIAFGDENGAIEILELVNNRIFQSRFQHKKTVWHIQFTADEKTLISSSDDAEIQVWNWQLDKCIFLRGHQETVKDFRLLKNSRLLSWSFDGTVKVWNIITGNKEKDFVCHQGTVLSCDISHDATKFSSTSADKTAKIWNVSNGELLHLCAPLSEEGAATHGGWVTDLCFSPDGKMLISAGGYIKWWNVVTGESSQTFYTNGTNLKKIHVSPDFKTYVTVDNLGILYILQTLE

SEQ ID NO: 4876 - protein, 1205 aa, Homo sapiens
MDAKARNCLLQHREALEKDIKTSYIMDHMISDGFLTISEEEKVRNEPTQQQRAAMLIKMILKKDNDSYVSFYNALLHEGYKDLAALLHDGIPVVSSSSGKDSVSGITSYVRTVLCEGGVPQRPVVFVTRKKLVNAIQQKLSKLKGEPGWVTIHGMAGCGKSVLAAEAVRDHSLLEGCFPGGVHWVSVGKQDKSGLLMKLQNLCTRLDQDESFSQRLPLNIEEAKDRLRILMLRKHPRSLLILDDVWDSWVLKAFDSQCQILLTTRDKSVTDSVMGPKYVVPVESSLGKEKGLEILSLFVNMKKADLPEQAHSIIKECKGSPLVVSLIGALLRDFPNRWEYYLKQLQNKQFKRIRKSSSYDYEALDEAMSISVEMLREDIKDYYTDLSILQKDVKVPTKVLCILWDMETEEVEDILQEFVNKSLLFCDRNGKSFRYYLHDLQVDFLTEKNCSQLQDLHKKIITQFQRYHQPHTLSPDQEDCMYWYNFLAYHMASAKMHKELCALMFSLDWIKAKTELVGPAHLIHEFVEYRHILDEKDCAVSENFQEFLSLNGHLLGRQPFPNIVQLGLCEPETSEVYQQAKLQAKQEVDNGMLYLEWINKKNITNLSRLVVRPHTDAVYHACFSEDGQRIASCGADKTLQVFKAETGEKLLEIKAHEDEVLCCAFSTDDRFIATCSVDKKVKIWNSMTGELVHTYDEHSEQVNCCHFTNSSHHLLLATGSSDCFLKLWDLNQKECRNTMFGHTNSVNHCRFSPDDKLLASCSADGTLKLWDATSANERKSINVKQFFLNLEDPQEDMEVIVKCCSWSADGARIMVAAKNKIFLWNTDSRSKVADCRGHLSWVHGVMFSPDGSSFLTSSDDQTIRLWETKKVCKNSAVMLKQEVDVVFQENEVMVLAVDHIRRLQLINGRTGQIDYLTEAQVSCCCLSPHLQYIAFGDENGAIEILELVNNRIFQSRFQHKKTVWHIQFTADEKTLISSSDDAEIQVWNWQLDKCIFLRGHQETVKDFRLLKNSRLLSWSFDGTVKVWNIITGNKEKDFVCHQGTVLSCDISHDATKFSSTSADKTAKIWSFDLLLPLHELRGHNGCVRCSAFSVDSTLLATGDDNGEIRIWNVSNGELLHLCAPLSEEGAATHGGWVTDLCFSPDGKMLISAGGYIKWWNVVTGESSQTFYTNGTNLKKIHVSPDFKTYVTVDNLGILYILQTLE

SEQ ID NO: 4877 - protein, 1194 aa, Homo sapiens
MDAKARNCLLQHREALEKDIKTSYIMDHMISDGFLTISEEEKVRNEPTQQQRAAMLIKMILKKDNDSYVSFYNALLHEGYKDLAALLHDGIPVVSSSSVRTVLCEGGVPQRPVVFVTRKKLVNAIQQKLSKLKGEPGWVTIHGMAGCGKSVLAAEAVRDHSLLEGCFPGGVHWVSVGKQDKSGLLMKLQNLCTRLDQDESFSQRLPLNIEEAKDRLRILMLRKHPRSLLILDDVWDSWVLKAFDSQCQILLTTRDKSVTDSVMGPKYVVPVESSLGKEKGLEILSLFVNMKKADLPEQAHSIIKECKGSPLVVSLIGALLRDFPNRWEYYLKQLQNKQFKRIRKSSSYDYEALDEAMSISVEMLREDIKDYYTDLSILQKDVKVPTKVLCILWDMETEEVEDILQEFVNKSLLFCDRNGKSFRYYLHDLQVDFLTEKNCSQLQDLHKKIITQFQRYHQPHTLSPDQEDCMYWYNFLAYHMASAKMHKELCALMFSLDWIKAKTELVGPAHLIHEFVEYRHILDEKDCAVSENFQEFLSLNGHLLGRQPFPNIVQLGLCEPETSEVYQQAKLQAKQEVDNGMLYLEWINKKNITNLSRLVVRPHTDAVYHACFSEDGQRIASCGADKTLQVFKAETGEKLLEIKAHEDEVLCCAFSTDDRFIATCSVDKKVKIWNSMTGELVHTYDEHSEQVNCCHFTNSSHHLLLATGSSDCFLKLWDLNQKECRNTMFGHTNSVNHCRFSPDDKLLASCSADGTLKLWDATSANERKSINVKQFFLNLEDPQEDMEVIVKCCSWSADGARIMVAAKNKIFLWNTDSRSKVADCRGHLSWVHGVMFSPDGSSFLTSSDDQTIRLWETKKVCKNSAVMLKQEVDVVFQENEVMVLAVDHIRRLQLINGRTGQIDYLTEAQVSCCCLSPHLQYIAFGDENGAIEILELVNNRIFQSRFQHKKTVWHIQFTADEKTLISSSDDAEIQVWNWQLDKCIFLRGHQETVKDFRLLKNSRLLSWSFDGTVKVWNIITGNKEKDFVCHQGTVLSCDISHDATKFSSTSADKTAKIWSFDLLLPLHELRGHNGCVRCSAFSVDSTLLATGDDNGEIRIWNVSNGELLHLCAPLSEEGAATHGGWVTDLCFSPDGKMLISAGGYIKWWNVVTGESSQTFYTNGTNLKKIHVSPDFKTYVTVDNLGILYILQTLE

SEQ ID NO: 4878 - protein, 1205 aa, Homo sapiens; identical to SEQ ID NO: 4876

SEQ ID NO: 4879 - protein, 1163 aa, Homo sapiens; identical to SEQ ID NO: 4875

SEQ ID NO: 4880 - protein, 1237 aa, Homo sapiens
MDAKARNCLLQHREALEKDIKTSYIMDHMISDGFLTISEEEKVRNEPTQQQRAAMLIKMILKKDNDSYVSFYNALLHEGYKDLAALLHDGIPVVSSSSVRTVLCEGGVPQRPVVFVTRKKLVNAIQQKLSKLKGEPGWVTIHGMAGCGKSVLAAEAVRDHSLLEGCFPGGVHWVSVGKQDKSGLLMKLQNLCTRLDQDESFSQRLPLNIEEAKDRLRILMLRKHPRSLLILDDVWDSWVLKAFDSQCQILLTTRDKSVTDSVMGPKYVVPVESSLGKEKGLEILSLFVNMKKADLPEQAHSIIKECKGSPLVVSLIGALLRDFPNRWEYYLKQLQNKQFKRIRKSSSYDYEALDEAMSISVEMLREDIKDYYTDLSILQKDVKVPTKVLCILWDMETEEVEDILQEFVNKSLLFCDRNGKSFRYYLHDLQVDFLTEKNCSQLQDLHKKIITQFQRYHQPHTLSPDQEDCMYWYNFLAYHMASAKMHKELCALMFSLDWIKAKTELVGPAHLIHEFVEYRHILDEKDCAVSENFQEFLSLNGHLLGRQPFPNIVQLGLCEPETSEVYQQAKLQAKQEVDNGMLYLEWINKKNITNLSRLVVRPHTDAVYHACFSEDGQRIASCGADKTLQVFKAETGEKLLEIKAHEDEVLCCAFSTDDRFIATCSVDKKVKIWNSMTGELVHTYDEHSEQVNCCHFTNSSHHLLLATGSSDCFLKLWDLNQKECRNTMFGHTNSVNHCRFSPDDKLLASCSADGTLKLWDATSANERKSINVKQFFLNLEDPQEDMEVIVKCCSWSADGARIMVAAKNKIFLFDIHTSGLLGEIHTGHHSTIQYCDFSPQNHLAVVALSQYCVELWNTDSRSKVADCRGHLSWVHGVMFSPDGSSFLTSSDDQTIRLWETKKVCKNSAVMLKQEVDVVFQENEVMVLAVDHIRRLQLINGRTGQIDYLTEAQVSCCCLSPHLQYIAFGDENGAIEILELVNNRIFQSRFQHKKTVWHIQFTADEKTLISSSDDAEIQVWNWQLDKCIFLRGHQETVKDFRLLKNSRLLSWSFDGTVKVWNIITGNKEKDFVCHQGTVLSCDISHDATKFSSTSADKTAKIWSFDLLLPLHELRGHNGCVRCSAFSVDSTLLATGDDNGEIRIWNVSNGELLHLCAPLSEEGAATHGGWVTDLCFSPDGKMLISAGGYIKWWNVVTGESSQTFYTNGTNLKKIHVSPDFKTYVTVDNLGILYILQTLE

SEQ ID NO: 4881 - protein, 1248 aa, Homo sapiens
MDAKARNCLLQHREALEKDIKTSYIMDHMISDGFLTISEEEKVRNEPTQQQRAAMLIKMILKKDNDSYVSFYNALLHEGYKDLAALLHDGIPVVSSSSGKDSVSGITSYVRTVLCEGGVPQRPVVFVTRKKLVNAIQQKLSKLKGEPGWVTIHGMAGCGKSVLAAEAVRDHSLLEGCFPGGVHWVSVGKQDKSGLLMKLQNLCTRLDQDESFSQRLPLNIEEAKDRLRILMLRKHPRSLLILDDVWDSWVLKAFDSQCQILLTTRDKSVTDSVMGPKYVVPVESSLGKEKGLEILSLFVNMKKADLPEQAHSIIKECKGSPLVVSLIGALLRDFPNRWEYYLKQLQNKQFKRIRKSSSYDYEALDEAMSISVEMLREDIKDYYTDLSILQKDVKVPTKVLCILWDMETEEVEDILQEFVNKSLLFCDRNGKSFRYYLHDLQVDFLTEKNCSQLQDLHKKIITQFQRYHQPHTLSPDQEDCMYWYNFLAYHMASAKMHKELCALMFSLDWIKAKTELVGPAHLIHEFVEYRHILDEKDCAVSENFQEFLSLNGHLLGRQPFPNIVQLGLCEPETSEVYQQAKLQAKQEVDNGMLYLEWINKKNITNLSRLVVRPHTDAVYHACFSEDGQRIASCGADKTLQVFKAETGEKLLEIKAHEDEVLCCAFSTDDRFIATCSVDKKVKIWNSMTGELVHTYDEHSEQVNCCHFTNSSHHLLLATGSSDCFLKLWDLNQKECRNTMFGHTNSVNHCRFSPDDKLLASCSADGTLKLWDATSANERKSINVKQFFLNLEDPQEDMEVIVKCCSWSADGARIMVAAKNKIFLFDIHTSGLLGEIHTGHHSTIQYCDFSPQNHLAVVALSQYCVELWNTDSRSKVADCRGHLSWVHGVMFSPDGSSFLTSSDDQTIRLWETKKVCKNSAVMLKQEVDVVFQENEVMVLAVDHIRRLQLINGRTGQIDYLTEAQVSCCCLSPHLQYIAFGDENGAIEILELVNNRIFQSRFQHKKTVWHIQFTADEKTLISSSDDAEIQVWNWQLDKCIFLRGHQETVKDFRLLKNSRLLSWSFDGTVKVWNIITGNKEKDFVCHQGTVLSCDISHDATKFSSTSADKTAKIWSFDLLLPLHELRGHNGCVRCSAFSVDSTLLATGDDNGEIRIWNVSNGELLHLCAPLSEEGAATHGGWVTDLCFSPDGKMLISAGGYIKWWNVVTGESSQTFYTNGTNLKKIHVSPDFKTYVTVDNLGILYILQTLE

SEQ ID NO: 4882 - protein, 338 aa, Homo sapiens; identical to SEQ ID NO: 4874

SEQ ID NO: 4883 - protein, 674 aa, Homo sapiens
MPSYTVTVATGSQWFAGTDDYIYLSLVGSAGCSEKHLLDKPFYNDFERGAVDSYDVTVDEELGEIQLVRIEKRKYWLNDDWYLKYITLKTPHGDYIEFPCYRWITGDVEVVLRDGRAKLARDDQIHILKQHRRKELETRQKQYRWMEWNPGFPLSIDAKCHKDLPRDIQFDSEKGVDFVLNYSKAMENLFINRFMHMFQSSWNDFADFEKIFVKISNTISERVMNHWQEDLMFGYQFLNGCNPVLIRRCTELPEKLPVTTEMVECSLERQLSLEQEVQQGNIFIVDFELLDGIDANKTDPCTLQFLAAPICLLYKNLANKIVPIAIQLNQIPGDENPIFLPSDAKYDWLLAKIWVRSSDFHVHQTITHLLRTHLVSEVFGIAMYRQLPAVHPIFKLLVAHVRFTIAINTKAREQLICECGLFDKANATGGGGHVQMVQRAMKDLTYASLCFPEAIKARGMESKEDIPYYFYRDDGLLVWEAIRTFTAEVVDIYYEGDQVVEEDPELQDFVNDVYVYGMRGRKSSGFPKSVKSREQLSEYLTVVIFTASAQHAAVNFGQYDWCSWIPNAPPTMRAPPPTAKGVVTIEQIVDTLPDRGRSCWHLGAVWALSQFQENELFLGMYPEEHFIEKPVKEAMARFRKNLEAIVSVIAERNKKKQLPYYYLSPDRIPNSVAI

SEQ ID NO: 4884 - protein, 617 aa, Homo sapiens
MPSYTVTVATGSQWFAGTDDYIYLSLVGSAGCSEKHLLDKPFYNDFERGAVDSYDVTVDEELGEIQLVRIEKRKYWLNDDWYLKYITLKTPHGDYIEFPCYRWITGDVEVVLRDGRAKLARDDQIHILKQHRRKELETRQKQYRWMEWNPGFPLSIDAKCHKDLPRDIQFDSEKGVDFVLNYSKAMENLFINRFMHMFQSSWNDFADFEKIFVKISNTISERVMNHWQEDLMFGYQFLNGCNPVLIRRCTELPEKLPVTTEMVECSLERQLSLEQEVQQGNIFIVDFELLDGIDANKTDPCTLQFLAAPICLLYKNLANKIVPIAIQLNQIPGDENPIFLPSDAKYDWLLAKIWVRSSDFHVHQTITHLLRTHLVSEVFGIAMYRQLPAVHPIFKLLVAHVRFTIAINTKAREQLICECGLFDKANATGGGGHVQMVQRAMKDLTYASLCFPEAIKARGMESKEDIPYYFYRDDGLLVWEAIRTFTAEVVDIYYEGDQVVEEDPELQDFVNDVYVYGMRGRKSSGFPKSVKSREQLSEYLTVVIFTASAQHAAVNFGQLFLGMYPEEHFIEKPVKEAMARFRKNLEAIVSVIAERNKKKQLPYYYLSPDRIPNSVAI

SEQ ID NO: 4885 - protein, 836 aa, Homo sapiens
MHAQRQFVVAAVRAEVRRHEVAKQALNRLRKLAERVDDPELQDSIQASLDSIREAVINSQEWTLSRSIPELRLGVLGDARSGKSSLIHRFLTGSYQVLEKTESEQYKKEMLVDGQTHLVLIREEAGAPDAKFSGWADAVIFVFSLEDENSFQAVSRLHGQLSSLRGEGRGGLALALVGTQDRISASSPRVVGDARARALCADMKRCSYYETCATYGLNVDRVFQEVAQKVVTLRKQQQLLAACKSLPSSPSHSAASTPVAGQASNGGHTSDYSSSLPSSPNVGHRELRAEAAAVAGLSTPGSLHRAAKRRTSLFANRRGSDSEKRSLDSRGETTGSGRAIPIKQSFLLKRSGNSLNKEWKKKYVTLSSNGFLLYHPSINDYIHSTHGKEMDLLRTTVKVPGKRPPRAISAFGPSASINGLVKDMSTVQMGEGLEATTPMPSPSPSPSSLQPPPDQTSKHLLKPDRNLARALSTDCTPSGDLSPLSREPPPSPMVKKQRRKKLTTPSKTEGSAGQAEEENFEFLIVSSTGQTWHFEAASFEERDAWVQAIESQILASLQCCESSKVKLRTDSQSEAVAIQAIRNAKGNSICVDCGAPNPTWASLNLGALICIECSGIHRNLGTHLSRVRSLDLDDWPRELTLVLTAIGNDTANRVWESDTRGRAKPSRDSSREERESWIRAKYEQLLFLAPLSTSEEPLGRQLWAAVQAQDVATVLLLLAHARHGPLDTSVEDPQLRSPLHLAAELAHVVITQLLLWYGADVAARDAQGRTALFYARQAGSQLCADILLQHGCPGEGGSAATTPSAATTPSITATPSPRRRSSAASVGRADAPVALV

SEQ ID NO: 4886 - protein, 1192 aa, Homo sapiens
MSRGAGALQRRTTTYLISLTLVKLESVPPPPPSPSAAAAGAAGARGSETGDPGSPRGAEEPGKKRHERLFHRQDALWISTSSAGTGGAEPPALSPAPASPARPVSPAPGRRLSLWAVPPGPPLSGGLSPDPKPGGAPTSSRRPLLSSPSWGGPEPEGRAGGGIPGSSSPHPGTGSRRLKVAPPPPAPKPCKTVTTSGAKAGGGKGAGSRLSWPESEGKPRVKGSKSSAGTGASVSAAATAAAAGGGGSTASTSGGVGAGAGARGKLSPRKGKSKTLDNSDLHPGPPAGSPPPLTLPPTPSPATAVTAASAQPPGPAPPITLEPPAPGLKRGREGGRASTRDRKMLKFISGIFTKSTGGPPGSGPLPGPPSLSSGSGSRELLGAELRASPKAVINSQEWTLSRSIPELRLGVLGDARSGKSSLIHRFLTGSYQVLEKTESEQYKKEMLVDGQTHLVLIREEAGAPDAKFSGWADAVIFVFSLEDENSFQAVSRLHGQLSSLRGEGRGGLALALVGTQDRISASSPRVVGDARARALCADMKRCSYYETCATYGLNVDRVFQEVAQKVVTLRKQQQLLAACKSLPSSPSHSAASTPVAGQASNGGHTSDYSSSLPSSPNVGHRELRAEAAAVAGLSTPGSLHRAAKRRTSLFANRRGSDSEKRSLDSRGETTGSGRAIPIKQSFLLKRSGNSLNKEWKKKYVTLSSNGFLLYHPSINDYIHSTHGKEMDLLRTTVKVPGKRPPRAISAFGPSASINGLVKDMSTVQMGEGLEATTPMPSPSPSPSSLQPPPDQTSKHLLKPDRNLARALSTDCTPSGDLSPLSREPPPSPMVKKQRRKKLTTPSKTEGSAGQAEAKRKMWKLKSFGSLRNIYKAEENFEFLIVSSTGQTWHFEAASFEERDAWVQAIESQILASLQCCESSKVKLRTDSQSEAVAIQAIRNAKGNSICVDCGAPNPTWASLNLGALICIECSGIHRNLGTHLSRVRSLDLDDWPRELTLVLTAIGNDTANRVWESDTRGRAKPSRDSSREERESWIRAKYEQLLFLAPLSTSEEPLGRQLWAAVQAQDVATVLLLLAHARHGPLDTSVEDPQLRSPLHLAAELAHVVITQLLLWYGADVAARDAQGRTALFYARQAGSQLCADILLQHGCPGEGGSAATTPSAATTPSITATPSPRRRSSAASVGRADAPVALV

SEQ ID NO: 4887 - protein, 394 aa, Homo sapiens
MDSQGRKVVVCDNGTGFVKCGYAGSNFPEHIFPALVGRPIIRSTTKVGNIEIKDLMVGDEASELRSMLEVNYPMENGIVRNWDDMKHLWDYTFGPEKLNIDTRNCKILLTEPPMNPTKNREKIVEVMFETYQFSGVYVAIQAVLTLYAQGLLTGVVVDSGDGVTHICPVYEGFSLPHLTRRLDIAGRDITRYLIKLLLLRGYAFNHSADFETVRMIKEKLCYVGYNIEQEQKLALETTVLVESYTLPDGRIIKVGGERFEAPEALFQPHLINVEGVGVAELLFNTIQAADIDTRSEFYKHIVLSGGSTMYPGLPSRLERELKQLYLERVLKGDVEKLSKFKIRIEDPPRRKHMVFLGGAVLADIMKDKDNFWMTRQEYQEKGVRVLEKLGVTVR

SEQ ID NO: 4888 - protein, 399 aa, Homo sapiens
MDSQGRKVVVCDNGTGFVKCGYAGSNFPEHIFPALVGRPIIRSTTKVGNIEIKNNKKMDLMVGDEASELRSMLEVNYPMENGIVRNWDDMKHLWDYTFGPEKLNIDTRNCKILLTEPPMNPTKNREKIVEVMFETYQFSGVYVAIQAVLTLYAQGLLTGVVVDSGDGVTHICPVYEGFSLPHLTRRLDIAGRDITRYLIKLLLLRGYAFNHSADFETVRMIKEKLCYVGYNIEQEQKLALETTVLVESYTLPDGRIIKVGGERFEAPEALFQPHLINVEGVGVAELLFNTIQAADIDTRSEFYKHIVLSGGSTMYPGLPSRLERELKQLYLERVLKGDVEKLSKFKIRIEDPPRRKHMVFLGGAVLADIMKDKDNFWMTRQEYQEKGVRVLEKLGVTVR

SEQ ID NO: 4889 - protein, 339 aa, Homo sapiens
MVGDEASELRSMLEVNYPMENGIVRNWDDMKHLWDYTFGPEKLNIDTRNCKILLTEPPMNPTKNREKIVEVMFETYQFSGVYVAIQAVLTLYAQGLLTGVVVDSGDGVTHICPVYEGFSLPHLTRRLDIAGRDITRYLIKLLLLRGYAFNHSADFETVRMIKEKLCYVGYNIEQEQKLALETTVLVESYTLPDGRIIKVGGERFEAPEALFQPHLINVEGVGVAELLFNTIQAADIDTRSEFYKHIVLSGGSTMYPGLPSRLERELKQLYLERVLKGDVEKLSKFKIRIEDPPRRKHMVFLGGAVLADIMKDKDNFWMTRQEYQEKGVRVLEKLGVTVR

SEQ ID NO: 4890 - protein, 305 aa, Homo sapiens
MVGDEASELRSMLEVNYPMENGIVRNWDDMKHLWDYTFGPEKLNIDTRNCKILLTEPPMNPTKNREKIVEVMFETYQFSGVYVAIQAVLTLYAQGLLTGVVVDSGDGVTHICPVYEGFSLPHLTRRLDIAGRDITRYLIKLLLLRGYAFNHSADFETVRMIKEKLCYVGYNIEQEQKLALETTVLVESYTLPDGRIIKVGGERFEAPEALFQPHLINVEGVGVAELLFNTIQAADIDTRSEFYKHIVLSGGSTMYPGLPSRLERELKQLYLERVLKGDVEKLSVSISKSTITNILLKGYTVVCES

SEQ ID NO: 4891 - protein, 418 aa, Homo sapiens
MAGRLPACVVDCGTGYTKLGYAGNTEPQFIIPSCIAIKESAKVGDQAQRRVMKGVDDLDFFIGDEAIEKPTYATKWPIRHGIVEDWDLMERFMEQVIFKYLRAEPEDHYFLLTEPPLNTPENREYTAEIMFESFNVPGLYIAVQAVLALAASWTSRQVGERTLTGTVIDSGDGVTHVIPVAEGYVIGSCIKHIPIAGRDITYFIQQLLRDREVGIPPEQSLETAKAVKERYSYVCPDLVKEFNKYDTDGSKWIKQYTGINAISKKEFSIDVGYERFLGPEIFFHPEFANPDFTQPISEVVDEVIQNCPIDVRRPLYKNIVLSGGSTMFRDFGRRLQRDLKRTVDARLKLSEELSGGRLKPKPIDVQVITHHMQRYAVWFGGSMLASTPEFYQVCHTKKDYEEIGPSICRHNPVFGVMS

SEQ ID NO: 4892 - protein, 367 aa, Homo sapiens
MKGVDDLDFFIGDEAIEKPTYATKWPIRHGIVEDWDLMERFMEQVIFKYLRAEPEDHYFLLTEPPLNTPENREYTAEIMFESFNVPGLYIAVQAVLALAASWTSRQVGERTLTGTVIDSGDGVTHVIPVAEGYVIGSCIKHIPIAGRDITYFIQQLLRDREVGIPPEQSLETAKAVKERYSYVCPDLVKEFNKYDTDGSKWIKQYTGINAISKKEFSIDVGYERFLGPEIFFHPEFANPDFTQPISEVVDEVIQNCPIDVRRPLYKNIVLSGGSTMFRDFGRRLQRDLKRTVDARLKLSEELSGGRLKPKPIDVQVITHHMQRYAVWFGGSMLASTPEFYQVCHTKKDYEEIGPSICRHNPVFGVMS

SEQ ID NO: 4893 - protein, 356 aa, Homo sapiens
MLEIQNHSLSSLPWPIRHGIVEDWDLMERFMEQVIFKYLRAEPEDHYFLLTEPPLNTPENREYTAEIMFESFNVPGLYIAVQAVLALAASWTSRQVGERTLTGTVIDSGDGVTHVIPVAEGYVIGSCIKHIPIAGRDITYFIQQLLRDREVGIPPEQSLETAKAVKERYSYVCPDLVKEFNKYDTDGSKWIKQYTGINAISKKEFSIDVGYERFLGPEIFFHPEFANPDFTQPISEVVDEVIQNCPIDVRRPLYKNIVLSGGSTMFRDFGRRLQRDLKRTVDARLKLSEELSGGRLKPKPIDVQVITHHMQRYAVWFGGSMLASTPEFYQVCHTKKDYEEIGPSICRHNPVFGVMS

SEQ ID NO: 4894 - protein, 289 aa, Homo sapiens
MFESFNVPGLYIAVQAVLALAASWTSRQVGERTLTGTVIDSGDGVTHVIPVAEGYVIGSCIKHIPIAGRDITYFIQQLLRDREVGIPPEQSLETAKAVKERYSYVCPDLVKEFNKYDTDGSKWIKQYTGINAISKKEFSIDVGYERFLGPEIFFHPEFANPDFTQPISEVVDEVIQNCPIDVRRPLYKNIVLSGGSTMFRDFGRRLQRDLKRTVDARLKLSEELSGGRLKPKPIDVQVITHHMQRYAVWFGGSMLASTPEFYQVCHTKKDYEEIGPSICRHNPVFGVMS

SEQ ID NO: 4895 - protein, 582 aa, Homo sapiens
IDIESMDTDKDDPHGRLEYTEHQGRIKNAREAHSQIEKRRRDKMNSFIDELASLVPTCNAMSRKLDKLTVLRMAVQHMKTLRGATNPYTEANYKPTFLSDDELKHLILRAADGFLFVVGCDRGKILFVSESVFKILNYSQNDLIGQSLFDYLHPKDIAKVKEQLSSSDTAPRERLIDAKTGLPVKTDITPGPSRLCSGARRSFFCRMKCNRPSVKVEDKDFPSTCSKKKADRKSFCTIHSTGYLKSWPPTKMGLDEDNEPDNEGCNLSCLVAIGRLHSHVVPQPVNGEIRVKSMEYVSRHAIDGKFVFVDQRATAILAYLPQELLGTSCYEYFHQDDIGHLAECHRQVLQTREKITTNCYKFKIKDGSFITLRSRWFSFMNPWTKEVEYIVSTNTVVLANVLEGGDPTFPQLTASPHSMDSMLPSGEGGPKRTHPTVPGIPGGTRAGAGKIGRMIAEEIMEIHRIRGSSPSSCGSSPLNITSTPPPDASSPGGKKILNGGTPDIPSSGLLSGQAQENPGYPYSDSSSILGENPHIGIDMIDNDQGSSSPSNDEAAMAVIMSLLEADAGLGGPVDFSDLPWPL

SEQ ID NO: 4896 - protein, 508 aa, Homo sapiens
MADQRMDISSTISDFMSPGPTDLLSSSLGTSGVDCNRKRKGSSTDYQESMDTDKDDPHGRLEYTEHQGRIKNAREAHSQIEKRRRDKMNSFIDELASLVPTCNAMSRKLDKLTVLRMAVQHMKTLRGATNPYTEANYKPTFLSDDELKHLILRAADGFLFVVGCDRGKILFVSESVFKILNYSQNDLIGQSLFDYLHPKDIAKVKEQLSSSDTAPRERLIDAKTGLPVKTDITPGPSRLCSGARRSFFCRMKCNRPSVKVEDKDFPSTCSKKKVLQTREKITTNCYKFKIKDGSFITLRSRWFSFMNPWTKEVEYIVSTNTVVLANVLEGGDPTFPQLTASPHSMDSMLPSGEGGPKRTHPTVPGIPGGTRAGAGKIGRMIAEEIMEIHRIRGSSPSSCGSSPLNITSTPPPDASSPGGKKILNGGTPDIPSSGLLSGQAQENPGYPYSDSSSILGENPHIGIDMIDNDQGSSSPSNDEAAMAVIMSLLEADAGLGGPVDFSDLPWPL

SEQ ID NO: 4897 - protein, 625 aa, Homo sapiens
MADQRMDISSTISDFMSPGPTDLLSSSLGTSGVDCNRKRKGSSTDYQESMDTDKDDPHGRLEYTEHQGRIKNAREAHSQIEKRRRDKMNSFIDELASLVPTCNAMSRKLDKLTVLRMAVQHMKTLRGATNPYTEANYKPTFLSDDELKHLILRAADGFLFVVGCDRGKILFVSESVFKILNYSQNDLIGQSLFDYLHPKDIAKVKEQLSSSDTAPRERLIDAKTGLPVKTDITPGPSRLCSGARRSFFCRMKCNRPSVKVEDKDFPSTCSKKKDRKSFCTIHSTGYLKSWPPTKMGLDEDNEPDNEGCNLSCLVAIGRLHSHVVPQPVNGEIRVKSMEYVSRHAIDGKFVFVDQRATAILAYLPQELLGTSCYEYFHQDDIGHLAECHRQVLQTREKITTNCYKFKIKDGSFITLRSRWFSFMNPWTKEVEYIVSTNTVVLANVLEGGDPTFPQLTASPHSMDSMLPSGEGGPKRTHPTVPGIPGGTRAGAGKIGRMIAEEIMEIHRIRGSSPSSCGSSPLNITSTPPPDASSPGGKKILNGGTPDIPSSGLLSGQAQENPGYPYSDSSSILGENPHIGIDMIDNDQGSSSPSNDEAAMAVIMSLLEADAGLGGPVDFSDLPWPL

SEQ ID NO: 4898 - protein, 526 aa, Homo sapiens
MADQRMDISSTISDFMSPGPTDLLSSSLGTSGVDCNRKRKGSSTDYQESMDTDKDDPHGRLEYTEHQGRIKNAREAHSQIEKRRRDKMNSFIDELASLVPTCNAMSRKLDKLTVLRMAVQHMKTLRGATNPYTEANYKPTFLSDDELKHLILRAADGFLFVVGCDRGKILFVSESVFKILNYSQNDLIGQSLFDYLHPKDIAKVKEQLSSSDTAPRERLIDAKTGLPVKTDITPGPSRLCSGARRSFFCRMKCNRPSVKVEDKDFPSTCSKKKADRKSFCTIHSTGYLKSWPPTKMGLDEDNEPDNEGCNLSCLVAIGRLHSHVVPQPVNGEIRVKSMEYVSRHAIDGKFVFVDQRATAILAYLPQELLGTSCYEYFHQDDIGHLAECHRQVLQTREKITTNCYKFKIKDGSFITLRSRWFSFMNPWTKEVEYIVSTNTVVLSRVDTGHLGQVEWCTVLSRPDSRFLIAGMFTEPTSWKAGTQPSHSSQHPPTAWTACCPLEKVAQRGPTPLFQGFQGEPGLGQEK

SEQ ID NO: 4899 - protein, 625 aa, Homo sapiens; identical to SEQ ID NO: 4897

SEQ ID NO: 4900 - protein, 583 aa, Homo sapiens
MINIESMDTDKDDPHGRLEYTEHQGRIKNAREAHSQIEKRRRDKMNSFIDELASLVPTCNAMSRKLDKLTVLRMAVQHMKTLRGATNPYTEANYKPTFLSDDELKHLILRAADGFLFVVGCDRGKILFVSESVFKILNYSQNDLIGQSLFDYLHPKDIAKVKEQLSSSDTAPRERLIDAKTGLPVKTDITPGPSRLCSGARRSFFCRMKCNRPSVKVEDKDFPSTCSKKKADRKSFCTIHSTGYLKSWPPTKMGLDEDNEPDNEGCNLSCLVAIGRLHSHVVPQPVNGEIRVKSMEYVSRHAIDGKFVFVDQRATAILAYLPQELLGTSCYEYFHQDDIGHLAECHRQVLQTREKITTNCYKFKIKDGSFITLRSRWFSFMNPWTKEVEYIVSTNTVVLANVLEGGDPTFPQLTASPHSMDSMLPSGEGGPKRTHPTVPGIPGGTRAGAGKIGRMIAEEIMEIHRIRGSSPSSCGSSPLNITSTPPPDASSPGGKKILNGGTPDIPSSGLLSGQAQENPGYPYSDSSSILGENPHIGIDMIDNDQGSSSPSNDEAAMAVIMSLLEADAGLGGPVDFSDLPWPL

SEQ ID NO: 4901 - protein, 626 aa, Homo sapiens
MADQRMDISSTISDFMSPGPTDLLSSSLGTSGVDCNRKRKGSSTDYQESMDTDKDDPHGRLEYTEHQGRIKNAREAHSQIEKRRRDKMNSFIDELASLVPTCNAMSRKLDKLTVLRMAVQHMKTLRGATNPYTEANYKPTFLSDDELKHLILRAADGFLFVVGCDRGKILFVSESVFKILNYSQNDLIGQSLFDYLHPKDIAKVKEQLSSSDTAPRERLIDAKTGLPVKTDITPGPSRLCSGARRSFFCRMKCNRPSVKVEDKDFPSTCSKKKADRKSFCTIHSTGYLKSWPPTKMGLDEDNEPDNEGCNLSCLVAIGRLHSHVVPQPVNGEIRVKSMEYVSRHAIDGKFVFVDQRATAILAYLPQELLGTSCYEYFHQDDIGHLAECHRQVLQTREKITTNCYKFKIKDGSFITLRSRWFSFMNPWTKEVEYIVSTNTVVLANVLEGGDPTFPQLTASPHSMDSMLPSGEGGPKRTHPTVPGIPGGTRAGAGKIGRMIAEEIMEIHRIRGSSPSSCGSSPLNITSTPPPDASSPGGKKILNGGTPDIPSSGLLSGQAQENPGYPYSDSSSILGENPHIGIDMIDNDQGSSSPSNDEAAMAVIMSLLEADAGLGGPVDFSDLPWPL

SEQ ID NO: 4902 - protein, 582 aa, Homo sapiens
MINIESMDTDKDDPHGRLEYTEHQGRIKNAREAHSQIEKRRRDKMNSFIDELASLVPTCNAMSRKLDKLTVLRMAVQHMKTLRGATNPYTEANYKPTFLSDDELKHLILRAADGFLFVVGCDRGKILFVSESVFKILNYSQNDLIGQSLFDYLHPKDIAKVKEQLSSSDTAPRERLIDAKTGLPVKTDITPGPSRLCSGARRSFFCRMKCNRPSVKVEDKDFPSTCSKKKDRKSFCTIHSTGYLKSWPPTKMGLDEDNEPDNEGCNLSCLVAIGRLHSHVVPQPVNGEIRVKSMEYVSRHAIDGKFVFVDQRATAILAYLPQELLGTSCYEYFHQDDIGHLAECHRQVLQTREKITTNCYKFKIKDGSFITLRSRWFSFMNPWTKEVEYIVSTNTVVLANVLEGGDPTFPQLTASPHSMDSMLPSGEGGPKRTHPTVPGIPGGTRAGAGKIGRMIAEEIMEIHRIRGSSPSSCGSSPLNITSTPPPDASSPGGKKILNGGTPDIPSSGLLSGQAQENPGYPYSDSSSILGENPHIGIDMIDNDQGSSSPSNDEAAMAVIMSLLEADAGLGGPVDFSDLPWPL

SEQ ID NO: 4903 - protein, 72 aa, Homo sapiens
MINIESMDTDKDDPHGRLEYTEHQGRIKNAREAHSQIEKRRRDKMNSFIDELASLVPTCNAMSRKLDKLTVL

SEQ ID NO: 4904 - protein, 76 aa, Homo sapiens
MADQRMDISSTISDFMSPGPTDLLSSSLGTSGVDCNRKRKGSSTDYQESMDTDKDDPHGRLEYTEHQGRIKNAREA

SEQ ID NO: 4905 - protein, 23 aa, Homo sapiens
MADQRMDISSTISDFMSPGPTDL

SEQ ID NO: 4906 - protein, 135 aa, Homo sapiens
MADQRMDISSTISDFMSPGPTDLLSSSLGTSGVDCNRKRKGSSTDYQESMDTDKDDPHGRLEYTEHQGRIKNAREAHSQIEKRRRDKMNSFIDELASLVPTCNAMSRKLDKLTVLRMAVQHMKTLRGATNPYTEA

SEQ ID NO: 4907 - protein, 46 aa, Homo sapiens
MINIESMDTDKDDPHGRLEYTEHQGRIKNAREAHSQIEKRRRDKMN

SEQ ID NO: 4908 - protein, 141 aa, Homo sapiens
MINIESMDTDKDDPHGRLEYTEHQGRIKNAREAHSQIEKRRRDKMNSFIDELASLVPTCNAMSRKLDKLTVLRMAVQHMKTLRGATNPYTEANYKPTFLSDDELKHLILRAADGFLFVVGCDRGKILFVSESVFKILNYSQ

SEQ ID NO: 4909 - protein, 101 aa, Homo sapiens
MADQRMDISSTISDFMSPGPTDLLSSSLGTSGVDCNRKRKGSSTDYQESMDTDKDDPHGRLEYTEHQGRIKNAREAHSQIEKRRRDKMNSFIDELASLVPT

SEQ ID NO: 4910 - protein, 59 aa, Homo sapiens
MADQRMDISSTISDFMSPGPTDLLSSSLGTSGVDCNRKRKGSSTDYQESMDTDKDDPHG

SEQ ID NO: 4911 - protein, 560 aa, Homo sapiens
MEPLQQQQQQQQQQQKQPHLAPLQMDAREKQGQQMREAQFLYAQKLVTQPTLLSATAGRPSGSTPLGPLARVPPTAAVAQVFERGNMNSEPEEEDGGLEDEDGDDEVAEVAEKETQAASKYFHVQKVARQDPRVAPMSNLLPAPGLPPHGQQAKEDHTKDASKASPSVSTAGQPNWNLDEQLKQNGGLAWSDDADGGRGREISRDFAKLYELDGDPERKEFLDDLFVFMQKRGTPINRIPIMAKQILDLYMLYKLVTEKGGLVEIINKKIWREITKGLNLPTSITSAAFTLRTQYMKYLYAYECEKKALSSPAELQAAIDGNRREGRRPSYSSSLFGYSPAAATAAAAAGAPALLSPPKIRFPILGLGSSSGTNTSSPRISPATTLRKGDGAPVTTVPVPNRLAVPVTLASQQAGTRTAALEQLRERLESGEPAEKKASRLSEEEQRLVQQAFQRNFFSMARQLPMKIRINGREDRAEASAAALNLTTSSIGSINMSVDIDGTTYAGVLFAQKPVVHLITGSAPQSLGSSASSSSSSHCSPSPTSSRGTPSAEPSTSWSL

SEQ ID NO: 4912 - protein, 444 aa, Homo sapiens
MEPLQQQQQQQQQQQKQPHLAPLQMDAREKQGQQMREAQFLYAQKLVTQPTLLSATAGRPSGSTPLGPLARVPPTAAVAQVFERGNMNSEPEEEDGGLEDEDGDDEVAEVAEKETQAASKYFHVQKVARQDPRVAPMSNLLPAPGLPPHGQQAKEDHTKDASKASPSVSTAGQPNWNLDEQLKQNGGLAWSDDADGGRGREISRDFAKLYELDGDPERKEFLDDLFVFMQKRGTPINRIPIMAKQILDLYMLYKLVTEKGGLVEIINKKIWREITKGLNLPTSITSAAFTLRTQYMKYLYAYECEKKALSSPAELQAAIDGNRREGRRPSYSSSLFGYSPAAATAAAAAGAPALLSPPKIRFPILGLGSSSGTNTSSPRISPATTLRKGDGAPVTTVPVPNRLAVPVTLASQQAGTRTAALEQLRERLESGEPAEKKASGTWCQ

SEQ ID NO: 4913 - protein, 470 aa, Homo sapiens [sequence omitted]

SEQ ID NO: 4914 - protein, 2644 aa, Homo sapiens
MGEHGLELASMIPALRELGSATPEEYNTVVQKPRQILCQFIDRILTDVNVVAVELVKKTDSQPTSVMLLDFIQHIMKSSPLMFVNVSGSHEAKGSCIEFSNWIITRLLRIAATPSCHLLHKKICEVICSLLFLFKSKSPAIFGVLTKELLQLFEDLVYLHRRNVMGHAVEWPVVMSRFLSQLDEHMGYLQSAPLQLMSMQNLEFIEVTLLMVLTRIIAIVFFRRQELLLWQIGCVLLEYGSPKIKSLAISFLTELFQLGGLPAQPASTFFSSFLELLKHLVEMDTDQLKLYEEPLSKLIKTLFPFEAEAYRNIEPVYLNMLLEKLCVMFEDGVLMRLKSDLLKAALCHLLQYFLKFVPAGYESALQVRKVYVRNICKALLDVLGIEVDAEYLLGPLYAALKMESMEIIEEIQCQTQQENLSSNSDGISPKRRRLSSSLNPSKRAPKQTEEIKHVDMNQKSILWSALKQKAESLQISLEYSGLKNPVIEMLEGIAVVLQLTALCTVHCSHQNMNCRTFKDCQHKSKKKPSVVITWMSLDFYTKVLKSCRSLLESVQKLDLEATIDKVVKIYDALIYMQVNSSFEDHILEDLCGMLSLPWIYSHSDDGCLKLTTFAANLLTLSCRISDSYSPQAQSRCVFLLTLFPRRIFLEWRTAVYNWALQSSHEVIRASCVSGFFILLQQQNSCNRVPKILIDKVKDDSDIVKKEFASILGQLVCTLHGMFYLTSSLTEPFSEHGHVDLFCRNLKATSQHECSSSQLKASVCKPFLFLLKKKIPSPVKLAFIDNLHHLCKHLDFREDETDVKAVLGTLLNLMEDPDKDVRVAFSGNIKHILESLDSEDGFIKELFVLRMKEAYTHAQISRNNELKDTLILTTGDIGRAAKGDLVPFALLHLLHCLLSKSASVSGAAYTEIRALVAAKSVKLQSFFSQYKKPICQFLVESLHSSQMTALPNTPCQNADVRKQDVAHQREMALNTLSEIANVFDFPDLNRFLTRTLQVLLPDLAAKASPAASALIRTLGKQLNVNRREILINNFKYIFSHLVCSCSKDELERALHYLKNETEIELGSLLRQDFQGLHNELLLRIGEHYQQVFNGLSILASFASSDDPYQGPRDIISPELMADYLQPKLLGILAFFNMQLLSSSVGIEDKKMALNSLMSLMKLMGPKHVSSVRVKMMTTLRTGLRFKDDFPELCCRAWDCFVRCLDHACLGSLLSHVIVALLPLIHIQPKETAAIFHYLIIENRDAVQDFLHEIYFLPDHPELKKIKAVLQEYRKETSESTDLQTTLQLSMKAIQHENVDVRIHALTSLKETLYKNQEKLIKYATDSETVEPIISQLVTVLLKGCQDANSQARLLCGECLGELGAIDPGRLDFSTTETQGKDFTFVTGVEDSSFAYGLLMELTRAYLAYADNSRAQDSAAYAIQELLSIYDCREMETNGPGHQLWRRFPEHVREILEPHLNTRYKSSQKSTDWSGVKKPIYLSKLGSNFAEWSASWAGYLITKVRHDLASKIFTCCSIMMKHDFKVTIYLLPHILVYVLLGCNQEDQQEVYAEIMAVLKHDDQHTINTQDIASDLCQLSTQTVFSMLDHLTQWARHKFQALKAEKCPHSKSNRNKVDSMVSTVDYEDYQSVTRFLDLIPQDTLAVASFRSKAYTRAVMHFESFITEKKQNIQEHLGFLQKLYAAMHEPDGVAGVSAIRKAEPSLKEQILEHESLGLLRDATACYDRAIQLEPDQIIHYHGVVKSMLGLGQLSTVITQVNGVHANRSEWTDELNTYRVEAAWKLSQWDLVENYLAADGKSTTWSVRLGQLLLSAKKRDITAFYDSLKLVRAEQIVPLSAASFERGSYQRGYEYIVRLHMLCELEHSIKPLFQHSPGDSSQEDSLNWVARLEMTQNSYRAKEPILALRRALLSLNKRPDYNEMVGECWLQSARVARKAGHHQTAYNALLNAGESRLAELYVERAKWLWSKGDVHQALIVLQKGVELCFPENETPPEGKNMLIHGRAMLLVGRFMEETANFESNAIMKKYKDVTACLPEWEDGHFYLAKYYDKLMPMVTDNKMEKQGDLIRYIVLHFGRSLQYGNQFIYQSMPRMLTLWLDYGTKAYEWEKAGRSDRVQMRNDLGKINKVITEHTNYLAPYQFLTAFSQLISRICHSHDEVFVVLMEIIAKVFLAYPQQAMWMMTAVSKSSYPMRVNRCKEILNKAIHMKKSLEKFVGDATRLTDKLLELCNKPVDGSSSTLSMSTHFKMLKKLVEEATFSEILIPLQSVMIPTLPSILGTHANHASHEPFPGHWAYIAGFDDMVEILASLQKPKKISLKGSDGKFYIMMCKPKDDLRKDCRLMEFNSLINKCLRKDAESRRRELHIRTYAVIPLNDECGIIEWVNNTAGLRPILTKLYKEKGVYMTGKELRQCMLPKSAALSEKLKVFREFLLPRHPPIFHEWFLRTFPDPTSWYSSRSAYCRSTAVMSMVGYILGLGDRHGENILFDSLTGECVHVDFNCLFNKGETFEVPEIVPFRLTHNMVNGMGPMGTEGLFRRACEVTMRLMRDQREPLMSVLKTFLHDPLVEWSKPVKGHSKAPLNETGEVVNEKAKTHVLDIEQRLQGVIKTRNRVTGLPLSIEGHVHYLIQEATDENLLCQMYLGWTPYM

SEQ ID NO: 4915 - protein, 2580 aa, Homo sapiens
MGEHGLELASMIPALRELGSATPEEYNTVVQKPRQILCQFIDRILTDVNVVAVELVKKTDSQPTSVMLLDFIQHIMKSSPLMFVNVSGSHEAKGSCIEFSNWIITRLLRIAATPSCHLLHKKICEVICSLLFLFKSKSPAIFGVLTKELLQLFEDLVYLHRRNVMGHAVEWPVVMSRFLSQLDEHMGYLQSAPLQLMSMQNLEFIEVTLLMVLTRIIAIVFFRRQELLLWQIGCVLLEYGSPKIKSLAISFLTELFQLGGLPAQPASTFFSSFLELLKHLVEMDTDQLKLYEEPLSKLIKTLFPFEAEAYRNIEPVYLNMLLEKLCVMFEDGVLMRLKSDLLKAALCHLLQYFLKFVPAGYESALQVRKVYVRNICKALLDVLGIEVDAEYLLGPLYAALKMESMEIIEEIQCQTQQENLSSNSDGISPKRRRLSSSLNPSKRAPKQTEDRTFKDCQHKSKKKPSVVITWMSLDFYTKVLKSCRSLLESVQKLDLEATIDKVVKIYDALIYMQVNSSFEDHILEDLCGMLSLPWIYSHSDDGCLKLTTFAANLLTLSCRISDSYSPQAQSRCVFLLTLFPRRIFLEWRTAVYNWALQSSHEVIRASCVSGFFILLQQQNSCNRVPKILIDKVKDDSDIVKKEFASILGQLVCTLHGMFYLTSSLTEPFSEHGHVDLFCRNLKATSQHECSSSQLKASVCKPFLFLLKKKIPSPVKLAFIDNLHHLCKHLDFREDETDVKAVLGTLLNLMEDPDKDVRVAFSGNIKHILESLDSEDGFIKELFVLRMKEAYTHAQISRNNELKDTLILTTGDIGRAAKGDLVPFALLHLLHCLLSKSASVSGAAYTEIRALVAAKSVKLQSFFSQYKKPICQFLVESLHSSQMTALPNTPCQNADVRKQDVAHQREMALNTLSEIANVFDFPDLNRFLTRTLQVLLPDLAAKASPAASALIRTLGKQLNVNRREILINNFKYIFSHLVCSCSKDELERALHYLKNETEIELGSLLRQDFQGLHNELLLRIGEHYQQVFNGLSILASFASSDDPYQGPRDIISPELMADYLQPKLLGILAFFNMQLLSSSVGIEDKKMALNSLMSLMKLMGPKHVSSVRVKMMTTLRTGLRFKDDFPELCCRAWDCFVRCLDHACLGSLLSHVIVALLPLIHIQPKETAAIFHYLIIENRDAVQDFLHEIYFLPDHPELKKIKAVLQEYRKETSESTDLQTTLQLSMKAIQHENVDVRIHALTSLKETLYKNQEKLIKYATDSETVEPIISQLVTVLLKGCQDANSQARLLCGECLGELGAIDPGRLDFSTTETQGKDFTFVTGVEDSSFAYGLLMELTRAYLAYADNSRAQDSAAYAIQELLSIYDCREMETNGPGHQLWRRFPEHVREILEPHLNTRYKSSQKSTDWSGVKKPIYLSKLGSNFAEWSASWAGYLITKVRHDLASKIFTCCSIMMKHDFKVTIYLLPHILVYVLLGCNQEDQQEVYAEIMAVLKHDDQHTINTQDIASDLCQLSTQTVFSMLDHLTQWARHKFQALKAEKCPHSKSNRNKVDSMVSTVDYEDYQSVTRFLDLIPQDTLAVASFRSKAYTRAVMHFESFITEKKQNIQEHLGFLQKLYAAMHEPDGVAGVSAIRKAEPSLKEQILEHESLGLLRDATACYDRAIQLEPDQIIHYHGVVKSMLGLGQLSTVITQVNGVHANRSEWTDELNTYRVEAAWKLSQWDLVENYLAADGKSTTWSVRLGQLLLSAKKRDITAFYDSLKLVRAEQIVPLSAASFERGSYQRGYEYIVRLHMLCELEHSIKPLFQHSPGDSSQEDSLNWVARLEMTQNSYRAKEPILALRRALLSLNKRPDYNEMVGECWLQSARVARKAGHHQTAYNALLNAGESRLAELYVERAKWLWSKGDVHQALIVLQKGVELCFPENETPPEGKNMLIHGRAMLLVGRFMEETANFESNAIMKKYKDVTACLPEWEDGHFYLAKYYDKLMPMVTDNKMEKQGDLIRYIVLHFGRSLQYGNQFIYQSMPRMLTLWLDYGTKAYEWEKAGRSDRVQMRNDLGKINKVITEHTNYLAPYQFLTAFSQLISRICHSHDEVFVVLMEIIAKVFLAYPQQAMWMMTAVSKSSYPMRVNRCKEILNKAIHMKKSLEKFVGDATRLTDKLLELCNKPVDGSSSTLSMSTHFKMLKKLVEEATFSEILIPLQSVMIPTLPSILGTHANHASHEPFPGHWAYIAGFDDMVEILASLQKPKKISLKGSDGKFYIMMCKPKDDLRKDCRLMEFNSLINKCLRKDAESRRRELHIRTYAVIPLNDECGIIEWVNNTAGLRPILTKLYKEKGVYMTGKELRQCMLPKSAALSEKLKVFREFLLPRHPPIFHEWFLRTFPDPTSWYSSRSAYCRSTAVMSMVGYILGLGDRHGENILFDSLTGECVHVDFNCLFNKGETFEVPEIVPFRLTHNMVNGMGPMGTEGLFRRACEVTMRLMRDQREPLMSVLKTFLHDPLVEWSKPVKGHSKAPLNETGEVVNEKAKTHVLDIEQRLQGVIKTRNRVTGLPLSIEGHVHYLIQEATDENLLCQMYLGWTPYM

SEQ ID NO: 4916 - protein, 3056 aa, Homo sapiens
MSLVLNDLLICCRQLEHDRATERKKEVEKFKRLIRDPETIKHLDRHSDSKQGKYLNWDAVFRFLQKYIQKETECLRIAKPNVSASTQASRQKKMQEISSLVKYFIKCANRRAPRLKCQELLNYIMDTVKDSSNGAIYGADCSNILLKDILSVRKYWCEISQQQWLELFSVYFRLYLKPSQDVHRVLVARIIHAVTKGCCSQTDGLNSKFLDFFSKAIQCARQEKSSSGLNHILAALTIFLKTLAVNFRIRVCELGDEILPTLLYIWTQHRLNDSLKEVIIELFQLQIYIHHPKGAKTQEKGAYESTKWRSILYNLYDLLVNEISHIGSRGKYSSGFRNIAVKENLIELMADICHQVFNEDTRSLEISQSYTTTQRESSDYSVPCKRKKIELGWEVIKDHLQKSQNDFDLVPWLQIATQLISKYPASLPNCELSPLLMILSQLLPQQRHGERTPYVLRCLTEVALCQDKRSNLESSQKSDLLKLWNKIWCITFRGISSEQIQAENFGLLGAIIQGSLVEVDREFWKLFTGSACRPSCPAVCCLTLALTTSIVPGTVKMGIEQNMCEVNRSFSLKESIMKWLLFYQLEGDLENSTEVPPILHSNFPHLVLEKILVSLTMKNCKAAMNFFQSVPECEHHQKDKEELSFSEVEELFLQTTFDKMDFLTIVRECGIEKHQSSIGFSVHQNLKESLDRCLLGLSEQLLNNYSSEITNSETLVRCSRLLVGVLGCYCYMGVIAEEEAYKSELFQKAKSLMQCAGESITLFKNKTNEEFRIGSLRNMMQLCTRCLSNCTKKSPNKIASGFFLRLLTSKLMNDIADICKSLASFIKKPFDRGEVESMEDDTNGNLMEVEDQSSMNLFNDYPDSSVSDANEPGESQSTIGAINPLAEEYLSKQDLLFLDMLKFLCLCVTTAQTNTVSFRAADIRRKLLMLIDSSTLEPTKSLHLHMYLMLLKELPGEEYPLPMEDVLELLKPLSNVCSLYRRDQDVCKTILNHVLHVVKNLGQSNMDSENTRDAQGQFLTVIGAFWHLTKERKYIFSVRMALVNCLKTLLEADPYSKWAILNVMGKDFPVNEVFTQFLADNHHQVRMLAAESINRLFQDTKGDSSRLLKALPLKLQQTAFENAYLKAQEGMREMSHSAENPETLDEIYNRKSVLLTLIAVVLSCSPICEKQALFALCKSVKENGLEPHLVKKVLEKVSETFGYRRLEDFMASHLDYLVLEWLNLQDTEYNLSSFPFILLNYTNIEDFYRSCYKVLIPHLVIRSHFDEVKSIANQIQEDWKSLLTDCFPKILVNILPYFAYEGTRDSGMAQQRETATKVYDMLKSENLLGKQIDHLFISNLPEIVVELLMTLHEPANSSASQSTDLCDFSGDLDPAPNPPHFPSHVIKATFAYISNCHKTKLKSILEILSKSPDSYQKILLAICEQAAETNNVYKKHRILKIYHLFVSLLLKDIKSGLGGAWAFVLRDVIYTLIHYINQRPSCIMDVSLRSFSLCCDLLSQVCQTAVTYCKDALENHLHVIVGTLIPLVYEQVEVQKQVLDLLKYLVIDNKDNENLYITIKLLDPFPDHVVFKDLRITQQKIKYSRGPFSLLEEINHFLSVSVYDALPLTRLEGLKDLRRQLELHKDQMVDIMRASQDNPQDGIMVKLVVNLLQLSKMAINHTGEKEVLEAVGSCLGEVGPIDFSTIAIQHSKDASYTKALKLFEDKELQWTFIMLTYLNNTLVEDCVKVRSAAVTCLKNILATKTGHSFWEIYKMTTDPMLAYLQPFRTSRKKFLEVPRFDKENPFEGLDDINLWIPLSENHDIWIKTLTCAFLDSGGTKCEILQLLKPMCEVKTDFCQTVLPYLIHDILLQDTNESWRNLLSTHVQGFFTSCLRHFSQTSRSTTPANLDSESEHFFRCCLDKKSQRTMLAVVDYMRRQKRPSSGTIFNDAFWLDLNYLEVAKVAQSCAAHFTALLYAEIYADKKSMDDQEKRSLAFEEGSQNTTISSLSEKSKEETGISLQDLLLEIYRSIGEPDSLYGCGGGKMLQPITRLRTYEHEAMWGKALVTYDLETAIPSSTRQAGIIQALQNLGLCHILSVYLKGLDYENKDWCPELEELHYQAAWRNMQWDHCTSVSKEVEGTSYHESLYNALQSLRDREFSTFYESLKYARVKEVEEMCKRSLESVYSLYPTLSRLQAIGELESIGELFSRSVTHRQLSEVYIKWQKHSQLLKDSDFSFQEPIMALRTVILEILMEKEMDNSQRECIKDILTKHLVELSILARTFKNTQLPERAIFQIKQYNSVSCGVSEWQLEEAQVFWAKKEQSLALSILKQMIKKLDASCAANNPSLKLTYTECLRVCGNWLAETCLENPAVIMQTYLEKAVEVAGNYDGESSDELRNGKMKAFLSLARFSDTQYQRIENYMKSSEFENKQALLKRAKEEVGLLREHKIQTNRYTVKVQRELELDELALRALKEDRKRFLCKAVENYINCLLSGEEHDMWVFRLCSLWLENSGVSEVNGMMKRDGMKIPTYKFLPLMYQLAARMGTKMMGGLGFHEVLNNLISRISMDHPHHTLFIILALANANRDEFLTKPEVARRSRITKNVPKQSSQLDEDRTEAANRIICTIRSRRPQMVRSVEALCDAYIILANLDATQWKTQRKGINIPADQPITKLKNLEDVVVPTMEIKVDHTGEYGNLVTIQSFKAEFRLAGGVNLPKIIDCVGSDGKERRQLVKGRDDLRQDAVMQQVFQMCNTLLQRNTETRKRKLTICTYKVVPLSQRSGVLEWCTGTVPIGEFLVNNEDGAHKRYRPNDFSAFQCQKKMMEVQKKSFEEKYEVFMDVCQNFQPVFRYFCMEKFLDPAIWFEKRLAYTRSVATSSIVGYILGLGDRHVQNILINEQSAELVHIDLGVAFEQGKILPTPETVPFRLTRDIVDGMGITGVEGVFRRCCEKTMEVMRNSQETLLTIVEVLLYDPLFDWTMNPLKALYLQQRPEDETELHPTLNADDQECKRNLSDIDQSFNKVAERVLMRLQEKLKGVEEGTVLSVGGQVNLLIQQAIDPKNLSRLFPGWKAWV

SEQ ID NO: 4917 - protein, 138 aa, Homo sapiens
MTLHEPANSSASQSTDLCDFSGDLDPAPNPPHFPSHVIKATFAYISNCHKTKLKSILEILSKSPDSYQKILLAICEQAAETNNVYKKHRILKIYHLFVSLLLKDIKSGLGGAWAFVLRDVIYTLIHYINQRKLTIFSQ

SEQ ID NO: 4918 - protein, 3056 aa, Homo sapiens; identical to SEQ ID NO: 4916

SEQ ID NO: 4919 - protein, 1369 aa, Homo sapiens
MSLVLNDLLICCRQLEHDRATERKKEVEKFKRLIRDPETIKHLDRHSDSKQGKYLNWDAVFRFLQKYIQKETECLRIAKPNVSASTQASRQKKMQEISSLVKYFIKCANRRAPRLKCQELLNYIMDTVKDSSNGAIYGADCSNILLKDILSVRKYWCEISQQQWLELFSVYFRLYLKPSQDVHRVLVARIIHAVTKGCCSQTDGLNSKFLDFFSKAIQCARQEKSSSGLNHILAALTIFLKTLAVNFRIRVCELGDEILPTLLYIWTQHRLNDSLKEVIIELFQLQIYIHHPKGAKTQEKGAYESTKWRSILYNLYDLLVNEISHIGSRGKYSSGFRNIAVKENLIELMADICHQVFNEDTRSLEISQSYTTTQRESSDYSVPCKRKKIELGWEVIKDHLQKSQNDFDLVPWLQIATQLISKYPASLPNCELSPLLMILSQLLPQQRHGERTPYVLRCLTEVALCQDKRSNLESSQKSDLLKLWNKIWCITFRGISSEQIQAENFGLLGAIIQGSLVEVDREFWKLFTGSACRPSCPAVCCLTLALTTSIVPGTVKMGIEQNMCEVNRSFSLKESIMKWLLFYQLEGDLENSTEVPPILHSNFPHLVLEKILVSLTMKNCKAAMNFFQSVPECEHHQKDKEELSFSEVEELFLQTTFDKMDFLTIVRECGIEKHQSSIGFSVHQNLKESLDRCLLGLSEQLLNNYSSEITNSETLVRCSRLLVGVLGCYCYMGVIAEEEAYKSELFQKAKSLMQCAGESITLFKNKTNEEFRIGSLRNMMQLCTRCLSNCTKKSPNKIASGFFLRLLTSKLMNDIADICKSLASFIKKPFDRGEVESMEDDTNGNLMEVEDQSSMNLFNDYPDSSVSDANEPGESQSTIGAINPLAEEYLSKQDLLFLDMLKFLCLCVTTAQTNTVSFRAADIRRKLLMLIDSSTLEPTKSLHLHMYLMLLKELPGEEYPLPMEDVLELLKPLSNVCSLYRRDQDVCKTILNHVLHVVKNLGQSNMDSENTRDAQGQFLTVIGAFWHLTKERKYIFSVRMALVNCLKTLLEADPYSKWAILNVMGKDFPVNEVFTQFLADNHHQVRMLAAESINRLFQDTKGDSSRLLKALPLKLQQTAFENAYLKAQEGMREMSHSAENPETLDEIYNRKSVLLTLIAVVLSCSPICEKQALFALCKSVKENGLEPHLVKKVLEKVSETFGYRRLEDFMASHLDYLVLEWLNLQDTEYNLSSFPFILLNYTNIEDFYRSCYKVLIPHLVIRSHFDEVKSIANQIQEDWKSLLTDCFPKILVNILPYFAYEGTRDSGMAQQRETATKVYDMLKSENLLGKQIDHLFISNLPEIVVELLMTLHEPANSSASQSTDLCDFS

SEQ ID NO: 4920 - protein, 93 aa, Homo sapiens
MSLVLNDLLICCRQLEHDRATERKKEVEKFKRLIRDPETIKHLDRHSDSKQGKYLNWDAVFRFLQKYIQKETECLRIAKPNVSASTQASRQKK

SEQ ID NO: 4921 - protein, 306 aa, Homo sapiens
MESIFHEKQPSGNMDDSGFFSIQVISNALKVWGLELILFNSPEYQRLRIDPINERSFICNYKEHWFTVRKLGKQWFNLNSLLTGPELISDTYLALFLAQLQQEGYSIFVVKGDLPDCEADQLLQMIRVQQMHRPKLIGEELAQLKEQRVHKTDLERVLEANDGSGMLDEDEEDLQRALALSRQEIDMEDEEADLRRAIQLSMQGSSRNISQDMTQTSGTNLTSEELRKRREAYFEKQQQKQQQQQQQQQQGDLSGQSSHPCERPATSSGALGSDLGDAMSEEDMLQAAVTMSLETVRNDLKTEGKK

SEQ ID NO: 4922 - protein, 369 aa, Homo sapiens
MESIFHEKQEGSLCAQHCLNNLLQGEYFSPVELSSIAHQLDEEERMRMAEGGVTSEDYRTFLQQPSGNMDDSGFFSIQVISNALKVWGLELILFNSPEYQRLRIDPINERSFICNYKEHWFTVRKLGKQWFNLNSLLTGPELISDTYLALFLAQLQQEGYSIFVVKGDLPDCEADQLLQMIRVQQMHRPKLIGEELAQLKEQRVHKTDLERVLEANDGSGMLDEDEEDLQRALALSRQEIDMEDEEADLRRAIQLSMQGSSRNISQDMTQTSGTNLTSEELRKRREAYFEKDQHFHILKQQQKQQQQQQQQQQGDLSGQSSHPCERPATSSGALGSDLGDAMSEEDMLQAAVTMSLETVRNDLKTEGKK

SEQ ID NO: 4923 - protein, 361 aa, Homo sapiens
MESIFHEKQEGSLCAQHCLNNLLQGEYFSPVELSSIAHQLDEEERMRMAEGGVTSEDYRTFLQQPSGNMDDSGFFSIQVISNALKVWGLELILFNSPEYQRLRIDPINERSFICNYKEHWFTVRKLGKQWFNLNSLLTGPELISDTYLALFLAQLQQEGYSIFVVKGDLPDCEADQLLQMIRVQQMHRPKLIGEELAQLKEQRVHKTDLERVLEANDGSGMLDEDEEDLQRALALSRQEIDMEDEEADLRRAIQLSMQGSSRNISQDMTQTSGTNLTSEELRKRREAYFEKQQQKQQQQQQQQQQGDLSGQSSHPCERPATSSGALGSDLGDAMSEEDMLQAAVTMSLETVRNDLKTEGKK

SEQ ID NO: 4924 - protein, 366 aa, Homo sapiens
MESIFHEKQEGSLCAQHCLNNLLQGEYFSPVELSSIAHQLDEEERMRMAEGGVTSEDYRTFLQQPSGNMDDSGFFSIQVISNALKVWGLELILFNSPEYQRLRIDPINERSFICNYKEHWFTVRKLGKQWFNLNSLLTGPELISDTYLALFLAQLQQEGYSIFVVKGDLPDCEADQLLQMIRVQQMHRPKLIGEELAQLKEQRVHKTDLERVLEANDGSGMLDEDEEDLQRALALSRQEIDMEDEEADLRRAIQLSMQGSSRNISQDMTQTSGTNLTSEELRKRREAYFENDYFDSQQQKQQQQQQQQQQGDLSGQSSHPCERPATSSGALGSDLGDAMSEEDMLQAAVTMSLETVRNDLKTEGKK

SEQ ID NO: 4925 - protein, 354 aa, Homo sapiens
MESIFHEKQEGSLCAQHCLNNLLQGEYFSPVELSSIAHQLDEEERMRMAEGGVTSEDYRTFLQVISNALKVWGLELILFNSPEYQRLRIDPINERSFICNYKEHWFTVRKLGKQWFNLNSLLTGPELISDTYLALFLAQLQQEGYSIFVVKGDLPDCEADQLLQMIRVQQMHRPKLIGEELAQLKEQRVHKTDLERVLEANDGSGMLDEDEEDLQRALALSRQEIDMEDEEADLRRAIQLSMQGSSRNISQDMTQTSGTNLTSEELRKRREAYFEKDQHFHILKQQQKQQQQQQQQQQGDLSGQSSHPCERPATSSGALGSDLGDAMSEEDMLQAAVTMSLETVRNDLKTEGKK

SEQ ID NO: 4926 - protein, 370 aa, Homo sapiens
MESIFHEKQEGSLCAQHCLNNLLQGEYFSPVELSSIAHQLDEEERMRMAEGGVTSEDYRTFLQQPSGNMDDSGFFSIQVISNALKVWGLELILFNSPEYQRLRIDPINERSFICNYKEHWFTVRKLGKQWFNLNSLLTGPELISDTYLALFLAQLQQEGYSIFVVKGDLPDCEADQLLQMIRVQQMHRPKLIGEELAQLKEQRVHKTDLERVLEANDGSGMLDEDEEDLQRALALSRQEIDMEDEEADLRRAIQLSMQGSSRNISQDMTQTSGTNLTSEELRKRREAYFEKTESRSVAQAQQQKQQQQQQQQQQGDLSGQSSHPCERPATSSGALGSDLGDAMSEEDMLQAAVTMSLETVRNDLKTEGKK

SEQ ID NO: 4927 - protein, 346 aa, Homo sapiens
MESIFHEKQEGSLCAQHCLNNLLQGEYFSPVELSSIAHQLDEEERMRMAEGGVTSEDYRTFLQVISNALKVWGLELILFNSPEYQRLRIDPINERSFICNYKEHWFTVRKLGKQWFNLNSLLTGPELISDTYLALFLAQLQQEGYSIFVVKGDLPDCEADQLLQMIRVQQMHRPKLIGEELAQLKEQRVHKTDLERVLEANDGSGMLDEDEEDLQRALALSRQEIDMEDEEADLRRAIQLSMQGSSRNISQDMTQTSGTNLTSEELRKRREAYFEKQQQKQQQQQQQQQQGDLSGQSSHPCERPATSSGALGSDLGDAMSEEDMLQAAVTMSLETVRNDLKTEGKK

SEQ ID NO: 4928 - protein, 364 aa, Homo sapiens
MESIFHEKQEGSLCAQHCLNNLLQGEYFSPVELSSIAHQLDEEERMRMAEGGVTSEDYRTFLQQPSGNMDDSGFFSIQVISNALKVWGLELILFNSPEYQRLRIDPINERSFICNYKEHWFTVRKLGKQWFNLNSLLTGPELISDTYLALFLAQLQQEGYSIFVVKGDLPDCEADQLLQMIRVQQMHRPKLIGEELAQLKEQRVHKTDLERVLEANDGSGMLDEDEEDLQRALALSRQEIDMEDEEADLRRAIQLSMQGSSRNISQDMTQTSGTNLTSEELRKRREAYFEKQQQKQQQQQQQQQQGDLSGQSSHPCERPATSSGALGSDLGKACSPFIMFATFTLYLTYELHVIFALHYSSFPL

SEQ ID NO: 4929 - protein, 372 aa, Homo sapiens
MESIFHEKQEGSLCAQHCLNNLLQGEYFSPVELSSIAHQLDEEERMRMAEGGVTSEDYRTFLQQPSGNMDDSGFFSIQVISNALKVWGLELILFNSPEYQRLRIDPINERSFICNYKEHWFTVRKLGKQWFNLNSLLTGPELISDTYLALFLAQLQQEGYSIFVVKGDLPDCEADQLLQMIRVQQMHRPKLIGEELAQLKEQRVHKTDLERVLEANDGSGMLDEDEEDLQRALALSRQEIDMEDEEADLRRAIQLSMQGSSRNISQDMTQTSGTNLTSEELRKRREAYFEKFGRPRRADCLRQQQKQQQQQQQQQQGDLSGQSSHPCERPATSSGALGSDLGDAMSEEDMLQAAVTMSLETVRNDLKTEGKK

SEQ ID NO: 4930 - protein, 375 aa, Homo sapiens
DSVSKKKQEGSLCAQHCLNNLLQGEYFSPVELSSIAHQLDEEERMRMAEGGVTSEDYRTFLQQPSGNMDDSGFFSIQVISNALKVWGLELILFNSPEYQRLRIDPINERSFICNYKEHWFTVRKLGKQWFNLNSLLTGPELISDTYLALFLAQLQQEGYSIFVVKGDLPDCEADQLLQMIRVQQMHRPKLIGEELAQLKEQRVHKTDLERVLEANDGSGMLDEDEEDLQRALALSRQEIDMEDEEADLRRAIQLSMQGSSRNISQDMTQTSGTNLTSEELRKRREAYFEKKFTANRTDQHFHILKQQQKQQQQQQQQQQGDLSGQSSHPCERPATSSGALGSDLGDAMSEEDMLQAAVTMSLETVRNDLKTEGKK

SEQ ID NO: 4931 - protein, 374 aa, Homo sapiens
MESIFHEKQEGSLCAQHCLNNLLQGEYFSPVELSSIAHQLDEEERMRMAEGGVTSEDYRTFLQQPSGNMDDSGFFSIQVISNALKVWGLELILFNSPEYQRLRIDPINERSFICNYKEHWFTVRKLGKQWFNLNSLLTGPELISDTYLALFLAQLQQEGYSIFVVKGDLPDCEADQLLQMIRVQQMHRPKLIGEELAQLKEQRVHKTDLERVLEANDGSGMLDEDEEDLQRALALSRQEIDMEDEEADLRRAIQLSMQGSSRNISQDMTQTSGTNLTSEELRKRREAYFEKVFFKNLQQIGRARQQQKQQQQQQQQQQGDLSGQSSHPCERPATSSGALGSDLGDAMSEEDMLQAAVTMSLETVRNDLKTEGKK

SEQ ID NO: 4932 - protein, 370 aa, Homo sapiens
MESIFHEKQEGSLCAQHCLNNLLQGEYFSPVELSSIAHQLDEEERMRMAEGGVTSEDYRTFLQQPSGNMDDSGFFSIQVISNALKVWGLELILFNSPEYQRLRIDPINERSFICNYKEHWFTVRKLGKQWFNLNSLLTGPELISDTYLALFLAQLQQEGYSIFVVKGDLPDCEADQLLQMIRVQQMHRPKLIGEELAQLKEQRVHKTDLERVLEANDGSGMLDEDEEDLQRALALSRQEIDMEDEEADLRRAIQLSMQGSSRNISQDMTQTSGTNLTSEELRKRREAYFEKIYFTFECFRQQQKQQQQQQQQQQGDLSGQSSHPCERPATSSGALGSDLGDAMSEEDMLQAAVTMSLETVRNDLKTEGKK

SEQ ID NO: 4933 - protein, 377 aa, Homo sapiens
MESIFHEKQEGSLCAQHCLNNLLQGEYFSPVELSSIAHQLDEEERMRMAEGGVTSEDYRTFLQQPSGNMDDSGFFSIQVISNALKVWGLELILFNSPEYQRLRIDPINERSFICNYKEHWFTVRKLGKQWFNLNSLLTGPELISDTYLALFLAQLQQEGYSIFVVKGDLPDCEADQLLQMIRVQQMHRPKLIGEELAQLKEQRVHKTDLERVLEANDGSGMLDEDEEDLQRALALSRQEIDMEDEEADLRRAIQLSMQGSSRNISQDMTQTSGTNLTSEELRKRREAYFEKVFFKNLQQNQHFHILKQQQKQQQQQQQQQQGDLSGQSSHPCERPATSSGALGSDLGDAMSEEDMLQAAVTMSLETVRNDLKTEGKK

SEQ ID NO: 4934 - protein, 182 aa, Homo sapiens
MIRVQQMHRPKLIGEELAQLKEQRVHKTDLERVLEANDGSGMLDEDEEDLQRALALSRQEIDMEDEEADLRRAIQLSMQGSSRNISQDMTQTSGTNLTSEELRKRREAYFEKQQQKQQQQQQQQQQGDLSGQSSHPCERPATSSGALGSDLGDAMSEEDMLQAAVTMSLETVRNDLKTEGKK

SEQ ID NO: 4935 - protein, 1101 aa, Homo sapiens
MSAKAISEQTGKELLYKFICTTSAIQNRFKYARVTPDTDWARLLQDHPWLLSQNLVVKPDQLIKRRGKLGLVGVNLTLDGVKSWLKPRLGQEATVGKATGFLKNFLIEPFVPHSQAEEFYVCIYATREGDYVLFHHEGGVDVGDVDAKAQKLLVGVDEKLNPEDIKKHLLVHAPEDKKEILASFISGLFNFYEDLYFTYLEINPLVVTKDGVYVLDLAAKVDATADYICKVKWGDIEFPPPFGREAYPEEAYIADLDAKSGASLKLTLLNPKGRIWTMVAGGGASVVYSDTICDLGGVNELANYGEYSGAPSEQQTYDYAKTILSLMTREKHPDGKILIIGGSIANFTNVAATFKGIVRAIRDYQGPLKEHEVTIFVRRGGPNYQEGLRVMGEVGKTTGIPIHVFGTETHMTAIVGMALGHRPIPNQPPTAAHTANFLLNASGSTSTPAPSRTASFSESRADEVAPAKKAKPAMPQDSVPSPRSLQGKSTTLFSRHTKAIVWGMQTRAVQGMLDFDYVCSRDEPSVAAMVYPFTGDHKQKFYWGHKEILIPVFKNMADAMRKHPEVDVLINFASLRSAYDSTMETMNYAQIRTIAIIAEGIPEALTRKLIKKADQKGVTIIGPATVGGIKPGCFKIGNTGGMLDNILASKLYRPGSVAYVSRSGGMSNELNNIISRTTDGVYEGVAIGGDRYPGSTFMDHVLRYQDTPGVKMIVVLGEIGGTEEYKICRGIKEGRLTKPIVCWCIGTCATMFSSEVQFGHAGACANQASETAVAKNQALKEAGVFVPRSFDELGEIIQSVYEDLVANGVIVPAQEVPPPTVPMDYSWARELGLIRKPASFMTSICDERGQELIYAGMPITEVFKEEMGIGGVLGLLWFQKRLPKYSCQFIEMCLMVTADHGPAVSGAHNTIICARAGKDLVSSLTSGLLTIGDRFGGALDAAAKMFSKAFDSGIIPMEFVNKMKKEGKLIMGIGHRVKSINNPDMRVQILKDYVRQHFPATPLLDYALEVEKITTSKKPNLILNVDGLIGVAFVDMLRNCGSFTREEADEYIDIGALNGIFVLGRSMGFIGHYLDQKRLKQGLYRHPWDDISYVLPEHMSM

SEQ ID NO: 4936 - protein, 1091 aa, Homo sapiens
MSAKAISEQTGKELLYKFICTTSAIQNRFKYARVTPDTDWARLLQDHPWLLSQNLVVKPDQLIKRRGKLGLVGVNLTLDGVKSWLKPRLGQEATVGKATGFLKNFLIEPFVPHSQAEEFYVCIYATREGDYVLFHHEGGVDVGDVDAKAQKLLVGVDEKLNPEDIKKHLLVHAPEDKKEILASFISGLFNFYEDLYFTYLEINPLVVTKDGVYVLDLAAKVDATADYICKVKWGDIEFPPPFGREAYPEEAYIADLDAKSGASLKLTLLNPKGRIWTMVAGGGASVVYSDTICDLGGVNELANYGEYSGAPSEQQTYDYAKTILSLMTREKHPDGKILIIGGSIANFTNVAATFKGIVRAIRDYQGPLKEHEVTIFVRRGGPNYQEGLRVMGEVGKTTGIPIHVFGTETHMTAIVGMALGHRPIPNQPPTAAHTANFLLNASGSTSTPAPSRTASFSESRADEVAPAKKAKPAMPQGKSTTLFSRHTKAIVWGMQTRAVQGMLDFDYVCSRDEPSVAAMVYPFTGDHKQKFYWGHKEILIPVFKNMADAMRKHPEVDVLINFASLRSAYDSTMETMNYAQIRTIAIIAEGIPEALTRKLIKKADQKGVTIIGPATVGGIKPGCFKIGNTGGMLDNILASKLYRPGSVAYVSRSGGMSNELNNIISRTTDGVYEGVAIGGDRYPGSTFMDHVLRYQDTPGVKMIVVLGEIGGTEEYKICRGIKEGRLTKPIVCWCIGTCATMFSSEVQFGHAGACANQASETAVAKNQALKEAGVFVPRSFDELGEIIQSVYEDLVANGVIVPAQEVPPPTVPMDYSWARELGLIRKPASFMTSICDERGQELIYAGMPITEVFKEEMGIGGVLGLLWFQKRLPKYSCQFIEMCLMVTADHGPAVSGAHNTIICARAGKDLVSSLTSGLLTIGDRFGGALDAAAKMFSKAFDSGIIPMEFVNKMKKEGKLIMGIGHRVKSINNPDMRVQILKDYVRQHFPATPLLDYALEVEKITTSKKPNLILNVDGLIGVAFVDMLRNCGSFTREEADEYIDIGALNGIFVLGRSMGFIGHYLDQKRLKQGLYRHPWDDISYVLPEHMSM

SEQ ID NO: 4937 - protein, 1091 aa, Homo sapiens; identical to SEQ ID NO: 4936

SEQ ID NO: 4938 - protein, 1155 aa, Homo sapiens
MGAGKSPAGPGQKPDPGKLPAAGVLRILRGSSGLWKKRRARTSAETGRAGLSAAMSAKAISEQTGKELLYKFICTTSAIQNRFKYARVTPDTDWARLLQDHPWLLSQNLVVKPDQLIKRRGKLGLVGVNLTLDGVKSWLKPRLGQEATVGKATGFLKNFLIEPFVPHSQAEEFYVCIYATREGDYVLFHHEGGVDVGDVDAKAQKLLVGVDEKLNPEDIKKHLLVHAPEDKKEILASFISGLFNFYEDLYFTYLEINPLVVTKDGVYVLDLAAKVDATADYICKVKWGDIEFPPPFGREAYPEEAYIADLDAKSGASLKLTLLNPKGRIWTMVAGGGASVVYSDTICDLGGVNELANYGEYSGAPSEQQTYDYAKTILSLMTREKHPDGKILIIGGSIANFTNVAATFKGIVRAIRDYQGPLKEHEVTIFVRRGGPNYQEGLRVMGEVGKTTGIPIHVFGTETHMTAIVGMALGHRPIPNQPPTAAHTANFLLNASGSTSTPAPSRTASFSESRADEVAPAKKAKPAMPQDSVPSPRSLQGKSTTLFSRHTKAIVWGMQTRAVQGMLDFDYVCSRDEPSVAAMVYPFTGDHKQKFYWGHKEILIPVFKNMADAMRKHPEVDVLINFASLRSAYDSTMETMNYAQIRTIAIIAEGIPEALTRKLIKKADQKGVTIIGPATVGGIKPGCFKIGNTGGMLDNILASKLYRPGSVAYVSRSGGMSNELNNIISRTTDGVYEGVAIGGDRYPGSTFMDHVLRYQDTPGVKMIVVLGEIGGTEEYKICRGIKEGRLTKPIVCWCIGTCATMFSSEVQFGHAGACANQASETAVAKNQALKEAGVFVPRSFDELGEIIQSVYEDLVANGVIVPAQEVPPPTVPMDYSWARELGLIRKPASFMTSICDERGQELIYAGMPITEVFKEEMGIGGVLGLLWFQKRLPKYSCQFIEMCLMVTADHGPAVSGAHNTIICARAGKDLVSSLTSGLLTIGDRFGGALDAAAKMFSKAFDSGIIPMEFVNKMKKEGKLIMGIGHRVKSINNPDMRVQILKDYVRQHFPATPLLDYALEVEKITTSKKPNLILNVDGLIGVAFVDMLRNCGSFTREEADEYIDIGALNGIFVLGRSMGFIGHYLDQKRLKQGLYRHPWDDISYVLPEHMSM

SEQ ID NO: 4939 - protein, 830 aa, Homo sapiens
MSAKAISEQTGKELLYKFICTTSAIQNRFKYARVTPDTDWARLLQDHPWLLSQNLVVKPDQLIKRRGKLGLVGVNLTLDGVKSWLKPRLGQEATGIVRAIRDYQGPLKEHEVTIFVRRGGPNYQEGLRVMGEVGKTTGIPIHVFGTETHMTAIVGMALGHRPIPNQPPTAAHTANFLLNASGSTSTPAPSRTASFSESRADEVAPAKKAKPAMPQGKSTTLFSRHTKAIVWGMQTRAVQGMLDFDYVCSRDEPSVAAMVYPFTGDHKQKFYWGHKEILIPVFKNMADAMRKHPEVDVLINFASLRSAYDSTMETMNYAQIRTIAIIAEGIPEALTRKLIKKADQKGVTIIGPATVGGIKPGCFKIGNTGGMLDNILASKLYRPGSVAYVSRSGGMSNELNNIISRTTDGVYEGVAIGGDRYPGSTFMDHVLRYQDTPGVKMIVVLGEIGGTEEYKICRGIKEGRLTKPIVCWCIGTCATMFSSEVQFGHAGACANQASETAVAKNQALKEAGVFVPRSFDELGEIIQSVYEDLVANGVIVPAQEVPPPTVPMDYSWARELGLIRKPASFMTSICDERGQELIYAGMPITEVFKEEMGIGGVLGLLWFQKRLPKYSCQFIEMCLMVTADHGPAVSGAHNTIICARAGKDLVSSLTSGLLTIGDRFGGALDAAAKMFSKAFDSGIIPMEFVNKMKKEGKLIMGIGHRVKSINNPDMRVQILKDYVRQHFPATPLLDYALEVEKITTSKKPNLILNVDGLIGVAFVDMLRNCGSFTREEADEYIDIGALNGIFVLGRSMGFIGHYLDQKRLKQGLYRHPWDDISYVLPEHMSM

SEQ ID NO: 4940 - protein, 503 aa, Homo sapiens
MSSILEERILGADTSVDLEETGRVLSIGDGIARVHGLRNVQAEEMVEFSSGLKGMSLNLEPDNVGVVVFGNDKLIKEGDIVKRTGAIVDVPVGEELLGRVVDALGNAIDGKGPIGSKTRRRVGLKAPGIIPRISVREPMQTGIKAVDSLVPIGRGQRELIIGDRQTGKTSIAIDTIINQKRFNDGSDEKKKLYCIYVAIGQKRSTVAQLVKRLTDADAMKYTIVVSATASDAAPLQYLAPYSGCSMGEYFRDNGKHALIIYDDLSKQAVAYRQMSLLLRRPPGREAYPGDVFYLHSRLLERAAKMNDAFGGGSLTALPVIETQAGDVSAYIPTNVISITDGQIFLETELFYKGIRPAINVGLSVSRVGSAAQTRAMKQVAGTMKLELAQYREVAAFAQFGSDLDAATQQLLSRGVRLTELLKQGQYSPMAIEEQVAVIYAGVRGYLDKLEPSKITKFENAFLSHVVSQHQALLGTIRADGKISEQSDAKLKEIVTNFLAGFEA

SEQ ID NO: 4941 - protein, 58 aa, Homo sapiens
MLSVRVAAAVVRALPRRAGLVSRNALGSSFIAARNFHASNTHLQKTGKLLFLSLRRTY

SEQ ID NO: 4942 - protein, 531 aa, Homo sapiens
MLSVRVAAAVVRALPRRAGLVSRNALGSSFIAARNFHASNTHLQKTGTAEMSSILEERILGADTSVDLEETGRVLSIGDGIARVHGLRNVQAEEMVEFSSGLKGMSLNLEPDNVGVVVFGNDKLIKEGDIVKRTGAIVDGPIGSKTRRRVGLKAPGIIPRISVREPMQTGIKAVDSLVPIGRGQRELIIGDRQTGKTSIAIDTIINQKRFNDGSDEKKKLYCIYVAIGQKRSTVAQLVKRLTDADAMKYTIVVSATASDAAPLQYLAPYSGCSMGEYFRDNGKHALIIYDDLSKQAVAYRQMSLLLRRPPGREAYPGDVFYLHSRLLERAAKMNDAFGGGSLTALPVIETQAGDVSAYIPTNVISITDGQIFLETELFYKGIRPAINVGLSVSRVGSAAQTRAMKQVAGTMKLELAQYREVAAFAQFGSDLDAATQQLLSRGVRLTELLKQGQYSPMAIEEQVAVIYAGVRGYLDKLEPSKITKFENAFLSHVVSQHQALLGTIRADGKISEQSDAKLKEIVTNFLAGFEA

SEQ ID NO: 4943 - protein, 553 aa, Homo sapiens
MLSVRVAAAVVRALPRRAGLVSRNALGSSFIAARNFHASNTHLQKTGTAEMSSILEERILGADTSVDLEETGRVLSIGDGIARVHGLRNVQAEEMVEFSSGLKGMSLNLEPDNVGVVVFGNDKLIKEGDIVKRTGAIVDVPVGEELLGRVVDALGNAIDGKGPIGSKTRRRVGLKAPGIIPRISVREPMQTGIKAVDSLVPIGRGQRELIIGDRQTGKTSIAIDTIINQKRFNDGSDEKKKLYCIYVAIGQKRSTVAQLVKRLTDADAMKYTIVVSATASDAAPLQYLAPYSGCSMGEYFRDNGKHALIIYDDLSKQAVAYRQMSLLLRRPPGREAYPGDVFYLHSRLLERAAKMNDAFGGGSLTALPVIETQAGDVSAYIPTNVISITDGQIFLETELFYKGIRPAINVGLSVSRVGSAAQTRAMKQVAGTMKLELAQYREVAAFAQFGSDLDAATQQLLSRGVRLTELLKQGQYSPMAIEEQVAVIYAGVRGYLDKLEPSKITKFENAFLSHVVSQHQALLGTIRADGKISEQSDAKLKEIVTNFLAGFEA

SEQ ID NO: 4944 - protein, 553 aa, Homo sapiens; identical to SEQ ID NO: 4943

SEQ ID NO: 4945 - protein, 503 aa, Homo sapiens; identical to SEQ ID NO: 4940

SEQ ID NO: 4946 - protein, 1280 aa, Homo sapiens
MDLEGDRNGGAKKKNFFKLNNKSEKDKKEKKPTVSVFSMFRYSNWLDKLYMVVGTLAAIIHGAGLPLMMLVFGEMTDIFANAGNLEDLMSNITNRSDINDTGFFMNLEEDMTRYAYYYSGIGAGVLVAAYIQVSFWCLAAGRQIHKIRKQFFHAIMRQEIGWFDVHDVGELNTRLTDDVSKINEGIGDKIGMFFQSMATFFTGFIVGFTRGWKLTLVILAISPVLGLSAAVWAKILSSFTDKELLAYAKAGAVAEEVLAAIRTVIAFGGQKKELERYNKNLEEAKRIGIKKAITANISIGAAFLLIYASYALAFWYGTTLVLSGEYSIGQVLTVFFSVLIGAFSVGQASPSIEAFANARGAAYEIFKIIDNKPSIDSYSKSGHKPDNIKGNLEFRNVHFSYPSRKEVKILKGLNLKVQSGQTVALVGNSGCGKSTTVQLMQRLYDPTEGMVSVDGQDIRTINVRFLREIIGVVSQEPVLFATTIAENIRYGRENVTMDEIEKAVKEANAYDFIMKLPHKFDTLVGERGAQLSGGQKQRIAIARALVRNPKILLLDEATSALDTESEAVVQVALDKARKGRTTIVIAHRLSTVRNADVIAGFDDGVIVEKGNHDELMKEKGIYFKLVTMQTAGNEVELENAADESKSEIDALEMSSNDSRSSLIRKRSTRRSVRGSQAQDRKLSTKEALDESIPPVSFWRIMKLNLTEWPYFVVGVFCAIINGGLQPAFAIIFSKIIGVFTRIDDPETKRQNSNLFSLLFLALGIISFITFFLQGFTFGKAGEILTKRLRYMVFRSMLRQDVSWFDDPKNTTGALTTRLANDAAQVKGAIGSRLAVITQNIANLGTGIIISFIYGWQLTLLLLAIVPIIAIAGVVEMKMLSGQALKDKKELEGSGKIATEAIENFRTVVSLTQEQKFEHMYAQSLQVPYRNSLRKAHIFGITFSFTQAMMYFSYAGCFRFGAYLVAHKLMSFEDVLLVFSAVVFGAMAVGQVSSFAPDYAKAKISAAHIIMIIEKTPLIDSYSTEGLMPNTLEGNVTFGEVVFNYPTRPDIPVLQGLSLEVKKGQTLALVGSSGCGKSTVVQLLERFYDPLAGKVLLDGKEIKRLNVQWLRAHLGIVSQEPILFDCSIAENIAYGDNSRVVSQEEIVRAAKEANIHAFIESLPNKYSTKVGDKGTQLSGGQKQRIAIARALVRQPHILLLDEATSALDTESEKVVQEALDKAREGRTCIVIAHRLSTIQNADLIVVFQNGRVKEHGTHQQLLAQKGIYFSMVSVQAGTKRQ

SEQ ID NO: 4947 - protein, 22 aa, Homo sapiens
MDLEGDRNGGAKKKNFFKLNNK

SEQ ID NO: 4948 - protein, 48 aa, Homo sapiens
MDLEGDRNGGAKKKNFFKLNNKSEKDKKEKKPTVSVFSMFRYSNWLDK

SEQ ID NO: 4949 - protein, 1061 aa, Homo sapiens
ALSPVMGVSAGYWPKILSSFTDKELLAYAKAGAVAEEVLAAIRTVIAFGGQKKELERYNKNLEEAKRIGIKKAITANISIGAAFLLIYASYALAFWYGTTLVLSGEYSIGQVLTVFFSVLIGAFSVGQASPSIEAFANARGAAYEIFKIIDNKPSIDSYSKSGHKPDNIKGNLEFRNVHFSYPSRKEVKILKGLNLKVQSGQTVALVGNSGCGKSTTVQLMQRLYDPTEGMVSVDGQDIRTINVRFLREIIGVVSQEPVLFATTIAENIRYGRENVTMDEIEKAVKEANAYDFIMKLPHKFDTLVGERGAQLSGGQKQRIAIARALVRNPKILLLDEATSALDTESEAVVQVALDKARKGRTTIVIAHRLSTVRNADVIAGFDDGVIVEKGNHDELMKEKGIYFKLVTMQTAGNEVELENAADESKSEIDALEMSSNDSRSSLIRKRSTRRSVRGSQAQDRKLSTKEALDESIPPVSFWRIMKLNLTEWPYFVVGVFCAIINGGLQPAFAIIFSKIIGVFTRIDDPETKRQNSNLFSLLFLALGIISFITFFLQGFTFGKAGEILTKRLRYMVFRSMLRQDVSWFDDPKNTTGALTTRLANDAAQVKGAIGSRLAVITQNIANLGTGIIISFIYGWQLTLLLLAIVPIIAIAGVVEMKMLSGQALKDKKELEGSGKIATEAIENFRTVVSLTQEQKFEHMYAQSLQVPYRNSLRKAHIFGITFSFTQAMMYFSYAGCFRFGAYLVAHKLMSFEDVLLVFSAVVFGAMAVGQVSSFAPDYAKAKISAAHIIMIIEKTPLIDSYSTEGLMPNTLEGNVTFGEVVFNYPTRPDIPVLQGLSLEVKKGQTLALVGSSGCGKSTVVQLLERFYDPLAGKVLLDGKEIKRLNVQWLRAHLGIVSQEPILFDCSIAENIAYGDNSRVVSQEEIVRAAKEANIHAFIESLPNKYSTKVGDKGTQLSGGQKQRIAIARALVRQPHILLLDEATSALDTESEKVVQEALDKAREGRTCIVIAHRLSTIQNADLIVVFQNGRVKEHGTHQQLLAQKGIYFSMVSVQAGTKRQ

SEQ ID NO: 4950 - protein, 1216 aa, Homo sapiens
MDLEGDRNGGAKKKNFFKLNNKSEKDKKEKKPTVSVFSMFRYSNWLDKLYMVVGTLAAIIHGAGLPLMMLVFGEMTDIFANAGNLEDLMSNITNRSDINDTGFFMNLEEDMTSDVSKINEGIGDKIGMFFQSMATFFTGFIVGFTRGWKLTLVILAISPVLGLSAAVWAKILSSFTDKELLAYAKAGAVAEEVLAAIRTVIAFGGQKKELERYNKNLEEAKRIGIKKAITANISIGAAFLLIYASYALAFWYGTTLVLSGEYSIGQVLTVFFSVLIGAFSVGQASPSIEAFANARGAAYEIFKIIDNKPSIDSYSKSGHKPDNIKGNLEFRNVHFSYPSRKEVKILKGLNLKVQSGQTVALVGNSGCGKSTTVQLMQRLYDPTEGMVSVDGQDIRTINVRFLREIIGVVSQEPVLFATTIAENIRYGRENVTMDEIEKAVKEANAYDFIMKLPHKFDTLVGERGAQLSGGQKQRIAIARALVRNPKILLLDEATSALDTESEAVVQVALDKARKGRTTIVIAHRLSTVRNADVIAGFDDGVIVEKGNHDELMKEKGIYFKLVTMQTAGNEVELENAADESKSEIDALEMSSNDSRSSLIRKRSTRRSVRGSQAQDRKLSTKEALDESIPPVSFWRIMKLNLTEWPYFVVGVFCAIINGGLQPAFAIIFSKIIGVFTRIDDPETKRQNSNLFSLLFLALGIISFITFFLQGFTFGKAGEILTKRLRYMVFRSMLRQDVSWFDDPKNTTGALTTRLANDAAQVKGAIGSRLAVITQNIANLGTGIIISFIYGWQLTLLLLAIVPIIAIAGVVEMKMLSGQALKDKKELEGSGKIATEAIENFRTVVSLTQEQKFEHMYAQSLQVPYRNSLRKAHIFGITFSFTQAMMYFSYAGCFRFGAYLVAHKLMSFEDVLLVFSAVVFGAMAVGQVSSFAPDYAKAKISAAHIIMIIEKTPLIDSYSTEGLMPNTLEGNVTFGEVVFNYPTRPDIPVLQGLSLEVKKGQTLALVGSSGCGKSTVVQLLERFYDPLAGKVLLDGKEIKRLNVQWLRAHLGIVSQEPILFDCSIAENIAYGDNSRVVSQEEIVRAAKEANIHAFIESLPNKYSTKVGDKGTQLSGGQKQRIAIARALVRQPHILLLDEATSALDTESEKVVQEALDKAREGRTCIVIAHRLSTIQNADLIVVFQNGRVKEHGTHQQLLAQKGIYFSMVSVQAGTKRQ

SEQ ID NO: 4951 - protein, 1466 aa, Homo sapiens
MALRGFCSADGSDPLWDWNVTWNTSNPDFTKCFQNTVLVWVPCFYLWACFPFYFLYLSRHDRGYIQMTPLNKTKTALGFLLWIVCWADLFYSFWERSRGIFLAPVFLVSPTLLGITMLLATFLIQLERRKGVQSSGIMLTFWLVALVCALAILRSKIMTALKEDAQVDLFRDITFYVYFSLLLIQLVLSCFSDRSPLFSETIHDPNPCPESSASFLSRITFWWITGLIVRGYRQPLEGSDLWSLNKEDTSEQVVPVLVKNWKKECAKTRKQPVKVVYSSKDPAQPKESSKVDANEEVEALIVKSPQKEWNPSLFKVLYKTFGPYFLMSFFFKAIHDLMMFSGPQILKLLIKFVNDTKAPDWQGYFYTVLLFVTACLQTLVLHQYFHICFVSGMRIKTAVIGAVYRKALVITNSARKSSTVGEIVNLMSVDAQRFMDLATYINMIWSAPLQVILALYLLWLNLGPSVLAGVAVMVLMVPVNAVMAMKTKTYQVAHMKSKDNRIKLMNEILNGIKVLKLYAWELAFKDKVLAIRQEELKVLKKSAYLSAVGTFTWVCTPFLVALCTFAVYVTIDENNILDAQTAFVSLALFNILRFPLNILPMVISSIVQASVSLKRLRIFLSHEELEPDSIERRPVKDGGGTNSITVRNATFTWARSDPPTLNGITFSIPEGALVAVVGQVGCGKSSLLSALLAEMDKVEGHVAIKGSVAYVPQQAWIQNDSLRENILFGCQLEEPYYRSVIQACALLPDLEILPSGDRTEIGEKGVNLSGGQKQRVSLARAVYSNADIYLFDDPLSAVDAHVGKHIFENVIGPKGMLKNKTRILVTHSMSYLPQVDVIIVMSGGKISEMGSYQELLARDGAFAEFLRTYASTEQEQDAEENGVTGVSGPGKEAKQMENGMLVTDSAGKQLQRQLSSSSSYSGDISRHHNSTAELQKAEAKKEETWKLMEADKAQTGQVKLSVYWDYMKAIGLFISFLSIFLFMCNHVSALASNYWLSLWTDDPIVNGTQEHTKVRLSVYGALGISQGIAVFGYSMAVSIGGILASRCLHVDLLHSILRSPMSFFERTPSGNLVNRFSKELDTVDSMIPEVIKMFMGSLFNVIGACIVILLATPIAAIIIPPLGLIYFFVQRFYVASSRQLKRLESVSRSPVYSHFNETLLGVSVIRAFEEQERFIHQSDLKVDENQKAYYPSIVANRWLAVRLECVGNCIVLFAALFAVISRHSLSAGLVGLSVSYSLQVTTYLNWLVRMSSEMETNIVAVERLKEYSETEKEAPWQIQETAPPSSWPQVGRVEFRNYCLRYREDLDFVLRHINVTINGGEKVGIVGRTGAGKSSLTLGLFRINESAEGEIIIDGINIAKIGLHDLRFKITIIPQDPVLFSGSLRMNLDPFSQYSDEEVWTSLELAHLKDFVSALPDKLDHECAEGGENLRVIVLDKGEIQEYGAPSDLLQQRGLFYSMAKDAGLV

SEQ ID NO: 4952 - protein, 1475 aa, Homo sapiens
MALRGFCSADGSDPLWDWNVTWNTSNPDFTKCFQNTVLVWVPCFYLWACFPFYFLYLSRHDRGYIQMTPLNKTKTALGFLLWIVCWADLFYSFWERSRGIFLAPVFLVSPTLLGITMLLATFLIQLERRKGVQSSGIMLTFWLVALVCALAILRSKIMTALKEDAQVDLFRDITFYVYFSLLLIQLVLSCFSDRSPLFSETIHDPNPCPESSASFLSRITFWWITGLIVRGYRQPLEGSDLWSLNKEDTSEQVVPVLVKNWKKECAKTRKQPVKVVYSSKDPAQPKESSKVDANEEVEALIVKSPQKEWNPSLFKVLYKTFGPYFLMSFFFKAIHDLMMFSGPQILKLLIKFVNDTKAPDWQGYFYTVLLFVTACLQTLVLHQYFHICFVSGMRIKTAVIGAVYRKALVITNSARKSSTVGEIVNLMSVDAQRFMDLATYINMIWSAPLQVILALYLLWLNLGPSVLAGVAVMVLMVPVNAVMAMKTKTYQVAHMKSKDNRIKLMNEILNGIKVLKLYAWELAFKDKVLAIRQEELKVLKKSAYLSAVGTFTWVCTPFLVALCTFAVYVTIDENNILDAQTAFVSLALFNILRFPLNILPMVISSIVQASVSLKRLRIFLSHEELEPDSIERRPVKDGGGTNSITVRNATFTWARSDPPTLNGITFSIPEGALVAVVGQVGCGKSSLLSALLAEMDKVEGHVAIKGSVAYVPQQAWIQNDSLRENILFGCQLEEPYYRSVIQACALLPDLEILPSGDRTEIGEKTRILVTHSMSYLPQVDVIIVMSGGKISEMGSYQELLARDGAFAEFLRTYASTEQEQDAEENGVTGVSGPGKEAKQMENGMLVTDSAGKQLQRQLSSSSSYSGDISRHHNSTAELQKAEAKKEETWKLMEADKAQTGQVKLSVYWDYMKAIGLFISFLSIFLFMCNHVSALASNYWLSLWTDDPIVNGTQEHTKVRLSVYGALGISQGIAVFGYSMAVSIGGILASRCLHVDLLHSILRSPMSFFERTPSGNLVNRFSKELDTVDSMIPEVIKMFMGSLFNVIGACIVILLATPIAAIIIPPLGLIYFFVQRFYVASSRQLKRLESVSRSPVYSHFNETLLGVSVIRAFEEQERFIHQSDLKVDENQKAYYPSIVANRWLAVRLECVGNCIVLFAALFAVISRHSLSAGLVGLSVSYSLQVTTYLNWLVRMSSEMETNIVAVERLKEYSETEKEAPWQIQETAPPSSWPQVGRVEFRNYCLRYREDLDFVLRHINVTINGGEKVGIVGRTGAGKSSLTLGLFRINESAEGEIIIDGINIAKIGLHDLRFKITIIPQDPVLFSGSLRMNLDPFSQYSDEEVWTSLELAHLKDFVSALPDKLDHECAEGGENLSVGQRQLVCLARALLRKTKILVLDEATAAVDLETDDLIQSTIRTQFEDCTVLTIAHRLNTIMDYTRVIVLDKGEIQEYGAPSDLLQQRGLFYSMAKDAGLV

SEQ ID NO: 4953 - protein, 1416 aa, Homo sapiens
MALRGFCSADGSDPLWDWNVTWNTSNPDFTKCFQNTVLVWVPCFYLWACFPFYFLYLSRHDRGYIQMTPLNKTKTALGFLLWIVCWADLFYSFWERSRGIFLAPVFLVSPTLLGITMLLATFLIQLERRKGVQSSGIMLTFWLVALVCALAILRSKIMTALKEDAQVDLFRDITFYVYFSLLLIQLVLSCFSDRSPLFSETIHDPNPCPESSASFLSRITFWWITGLIVRGYRQPLEGSDLWSLNKEDTSEQVVPVLVKNWKKECAKTRKQPVKVVYSSKDPAQPKESSKVDANEEVEALIVKSPQKEWNPSLFKVLYKTFGPYFLMSFFFKAIHDLMMFSGPQILKLLIKFVNDTKAPDWQGYFYTVLLFVTACLQTLVLHQYFHICFVSGMRIKTAVIGAVYRKALVITNSARKSSTVGEIVNLMSVDAQRFMDLATYINMIWSAPLQVILALYLLWLNLGPSVLAGVAVMVLMVPVNAVMAMKTKTYQVAHMKSKDNRIKLMNEILNGIKVLKLYAWELAFKDKVLAIRQEELKVLKKSAYLSAVGTFTWVCTPFLVALCTFAVYVTIDENNILDAQTAFVSLALFNILRFPLNILPMVISSIVQASVSLKRLRIFLSHEELEPDSIERRPVKDGGGTNSITVRNATFTWARSDPPTLNGITFSIPEGALVAVVGQVGCGKSSLLSALLAEMDKVEGHVAIKTRILVTHSMSYLPQVDVIIVMSGGKISEMGSYQELLARDGAFAEFLRTYASTEQEQDAEENGVTGVSGPGKEAKQMENGMLVTDSAGKQLQRQLSSSSSYSGDISRHHNSTAELQKAEAKKEETWKLMEADKAQTGQVKLSVYWDYMKAIGLFISFLSIFLFMCNHVSALASNYWLSLWTDDPIVNGTQEHTKVRLSVYGALGISQGIAVFGYSMAVSIGGILASRCLHVDLLHSILRSPMSFFERTPSGNLVNRFSKELDTVDSMIPEVIKMFMGSLFNVIGACIVILLATPIAAIIIPPLGLIYFFVQRFYVASSRQLKRLESVSRSPVYSHFNETLLGVSVIRAFEEQERFIHQSDLKVDENQKAYYPSIVANRWLAVRLECVGNCIVLFAALFAVISRHSLSAGLVGLSVSYSLQVTTYLNWLVRMSSEMETNIVAVERLKEYSETEKEAPWQIQETAPPSSWPQVGRVEFRNYCLRYREDLDFVLRHINVTINGGEKVGIVGRTGAGKSSLTLGLFRINESAEGEIIIDGINIAKIGLHDLRFKITIIPQDPVLFSGSLRMNLDPFSQYSDEEVWTSLELAHLKDFVSALPDKLDHECAEGGENLSVGQRQLVCLARALLRKTKILVLDEATAAVDLETDDLIQSTIRTQFEDCTVLTIAHRLNTIMDYTRVIVLDKGEIQEYGAPSDLLQQRGLFYSMAKDAGLV

SEQ ID NO: 4954 - protein, 1472 aa, Homo sapiens
MALRGFCSADGSDPLWDWNVTWNTSNPDFTKCFQNTVLVWVPCFYLWACFPFYFLYLSRHDRGYIQMTPLNKTKTALGFLLWIVCWADLFYSFWERSRGIFLAPVFLVSPTLLGITMLLATFLIQLERRKGVQSSGIMLTFWLVALVCALAILRSKIMTALKEDAQVDLFRDITFYVYFSLLLIQLVLSCFSDRSPLFSETIHDPNPCPESSASFLSRITFWWITGLIVRGYRQPLEGSDLWSLNKEDTSEQVVPVLVKNWKKECAKTRKQPVKVVYSSKDPAQPKESSKVDANEEVEALIVKSPQKEWNPSLFKVLYKTFGPYFLMSFFFKAIHDLMMFSGPQILKLLIKFVNDTKAPDWQGYFYTVLLFVTACLQTLVLHQYFHICFVSGMRIKTAVIGAVYRKALVITNSARKSSTVGEIVNLMSVDAQRFMDLATYINMIWSAPLQVILALYLLWLNLGPSVLAGVAVMVLMVPVNAVMAMKTKTYQVAHMKSKDNRIKLMNEILNGIKVLKLYAWELAFKDKVLAIRQEELKVLKKSAYLSAVGTFTWVCTPFLVALCTFAVYVTIDENNILDAQTAFVSLALFNILRFPLNILPMVISSIVQASVSLKRLRIFLSHEELEPDSIERRPVKDGGGTNSITVRNATFTWARSDPPTLNGITFSIPEGALVAVVGQVGCGKSSLLSALLAEMDKVEGHVAIKGVNLSGGQKQRVSLARAVYSNADIYLFDDPLSAVDAHVGKHIFENVIGPKGMLKNKTRILVTHSMSYLPQVDVIIVMSGGKISEMGSYQELLARDGAFAEFLRTYASTEQEQDAEENGVTGVSGPGKEAKQMENGMLVTDSAGKQLQRQLSSSSSYSGDISRHHNSTAELQKAEAKKEETWKLMEADKAQTGQVKLSVYWDYMKAIGLFISFLSIFLFMCNHVSALASNYWLSLWTDDPIVNGTQEHTKVRLSVYGALGISQGIAVFGYSMAVSIGGILASRCLHVDLLHSILRSPMSFFERTPSGNLVNRFSKELDTVDSMIPEVIKMFMGSLFNVIGACIVILLATPIAAIIIPPLGLIYFFVQRFYVASSRQLKRLESVSRSPVYSHFNETLLGVSVIRAFEEQERFIHQSDLKVDENQKAYYPSIVANRWLAVRLECVGNCIVLFAALFAVISRHSLSAGLVGLSVSYSLQVTTYLNWLVRMSSEMETNIVAVERLKEYSETEKEAPWQIQETAPPSSWPQVGRVEFRNYCLRYREDLDFVLRHINVTINGGEKVGIVGRTGAGKSSLTLGLFRINESAEGEIIIDGINIAKIGLHDLRFKITIIPQDPVLFSGSLRMNLDPFSQYSDEEVWTSLELAHLKDFVSALPDKLDHECAEGGENLSVGQRQLVCLARALLRKTKILVLDEATAAVDLETDDLIQSTIRTQFEDCTVLTIAHRLNTIMDYTRVIVLDKGEIQEYGAPSDLLQQRGLFYSMAKDAGLV

SEQ ID NO: 4955 - protein, 1541 aa, Homo sapiens
MALRGFCSADGSDPLWDWNVTWNTSNPDFTKCFQNTVLVWVPCFYLWACFPFYFLYLSRHDRGYIQMTPLNKTKTALGFLLWIVCWADLFYSFWERSRGIFLAPVFLVSPTLLGITMLLATFLIQLERRKGVQSSGIMLTFWLVALVCALAILRSKIMTALKEDAQVDLFRDITFYVYFSLLLIQLVLSCFSDRSPLFSETIHDPNPCPESSASFLSRITFWWITGLIVRGYRQPLEGSDLWSLNKEDTSEQVVPVLVKNWKKECAKTRKQPVKVVYSSKDPAQPKESSKVDANEEVEALIVKSPQKEWNPSLFKVLYKTFGPYFLMSFFFKAIHDLMMFSGPQILKLLIKFVNDTKAPDWQGYFYTVLLFVTACLQTLVLHQYFHICFVSGMRIKTAVIGAVYRKALVITNSARKSSTVGEIVNLMSVDAQRFMDLATYINMIWSAPLQVILALYLLWLNLGPSVLAGVAVMVLMVPVNAVMAMKTKTYQVAHMKSKDNRIKLMNEILNGIKVLKLYAWELAFKDKVLAIRQEELKVLKKSAYLSAVGTFTWVCTPFLVALCTFAVYVTIDENNILDAQTAFVSLALFNILRFPLNILPMVISSIVQASVSLKRLRIFLSHEELEPDSIERRPVKDGGGTNSITVRNATFTWARSDPPTLNGITFSIPEGALVAVVGQVGCGKSSLLSALLAEMDKVEGHVAIKGSVAYVPQQAWIQNDSLRENILFGCQLEEPYYRSVIQACALLPDLEILPSGDRTEIGEKGVNLSGGQKQRVSLARAVYSNADIYLFDDPLSAVDAHVGKHIFENVIGPKGMLKNKTRILVTHSMSYLPQVDVIIVMSGGKISEMGSYQELLARDGAFAEFLRTYASTEQEQDAEENGSTVMDEEEAGVTGVSGPGKEAKQMENGMLVTDSAGKQLQRQLSSSSSYSGDISRHHNSTAELQKAEAKKEETWKLMEADKAQTGQVKLSVYWDYMKAIGLFISFLSIFLFMCNHVSALASNYWLSLWTDDPIVNGTQEHTKVRLSVYGALGISQGIAVFGYSMAVSIGGILASRCLHVDLLHSILRSPMSFFERTPSGNLVNRFSKELDTVDSMIPEVIKMFMGSLFNVIGACIVILLATPIAAIIIPPLGLIYFFVQRFYVASSRQLKRLESVSRSPVYSHFNETLLGVSVIRAFEEQERFIHQSDLKVDENQKAYYPSIVANRWLAVRLECVGNCIVLFAALFAVISRHSLSAGLVGLSVSYSLQVTTYLNWLVRMSSEMETNIVAVERLKEYSETEKEAPWQIQETAPPSSWPQVGRVEFRNYCLRYREDLDFVLRHINVTINGGEKVGIVGRTGAGKSSLTLGLFRINESAEGEIIIDGINIAKIGLHDLRFKITIIPQDPVLFSGSLRMNLDPFSQYSDEEVWTSLELAHLKDFVSALPDKLDHECAEGGENLSVGQRQLVCLARALLRKTKILVLDEATAAVDLETDDLIQSTIRTQFEDCTVLTIAHRLNTIMDYTRVIVLDKGEIQEYGAPSDLLQQRGLFYSMAKDAGLV

SEQ ID NO: 4956 - protein, 1531 aa, Homo sapiens
MALRGFCSADGSDPLWDWNVTWNTSNPDFTKCFQNTVLVWVPCFYLWACFPFYFLYLSRHDRGYIQMTPLNKTKTALGFLLWIVCWADLFYSFWERSRGIFLAPVFLVSPTLLGITMLLATFLIQLERRKGVQSSGIMLTFWLVALVCALAILRSKIMTALKEDAQVDLFRDITFYVYFSLLLIQLVLSCFSDRSPLFSETIHDPNPCPESSASFLSRITFWWITGLIVRGYRQPLEGSDLWSLNKEDTSEQVVPVLVKNWKKECAKTRKQPVKVVYSSKDPAQPKESSKVDANEEVEALIVKSPQKEWNPSLFKVLYKTFGPYFLMSFFFKAIHDLMMFSGPQILKLLIKFVNDTKAPDWQGYFYTVLLFVTACLQTLVLHQYFHICFVSGMRIKTAVIGAVYRKALVITNSARKSSTVGEIVNLMSVDAQRFMDLATYINMIWSAPLQVILALYLLWLNLGPSVLAGVAVMVLMVPVNAVMAMKTKTYQVAHMKSKDNRIKLMNEILNGIKVLKLYAWELAFKDKVLAIRQEELKVLKKSAYLSAVGTFTWVCTPFLVALCTFAVYVTIDENNILDAQTAFVSLALFNILRFPLNILPMVISSIVQASVSLKRLRIFLSHEELEPDSIERRPVKDGGGTNSITVRNATFTWARSDPPTLNGITFSIPEGALVAVVGQVGCGKSSLLSALLAEMDKVEGHVAIKGSVAYVPQQAWIQNDSLRENILFGCQLEEPYYRSVIQACALLPDLEILPSGDRTEIGEKGVNLSGGQKQRVSLARAVYSNADIYLFDDPLSAVDAHVGKHIFENVIGPKGMLKNKTRILVTHSMSYLPQVDVIIVMSGGKISEMGSYQELLARDGAFAEFLRTYASTEQEQDAEENGVTGVSGPGKEAKQMENGMLVTDSAGKQLQRQLSSSSSYSGDISRHHNSTAELQKAEAKKEETWKLMEADKAQTGQVKLSVYWDYMKAIGLFISFLSIFLFMCNHVSALASNYWLSLWTDDPIVNGTQEHTKVRLSVYGALGISQGIAVFGYSMAVSIGGILASRCLHVDLLHSILRSPMSFFERTPSGNLVNRFSKELDTVDSMIPEVIKMFMGSLFNVIGACIVILLATPIAAIIIPPLGLIYFFVQRFYVASSRQLKRLESVSRSPVYSHFNETLLGVSVIRAFEEQERFIHQSDLKVDENQKAYYPSIVANRWLAVRLECVGNCIVLFAALFAVISRHSLSAGLVGLSVSYSLQVTTYLNWLVRMSSEMETNIVAVERLKEYSETEKEAPWQIQETAPPSSWPQVGRVEFRNYCLRYREDLDFVLRHINVTINGGEKVGIVGRTGAGKSSLTLGLFRINESAEGEIIIDGINIAKIGLHDLRFKITIIPQDPVLFSGSLRMNLDPFSQYSDEEVWTSLELAHLKDFVSALPDKLDHECAEGGENLSVGQRQLVCLARALLRKTKILVLDEATAAVDLETDDLIQSTIRTQFEDCTVLTIAHRLNTIMDYTRVIVLDKGEIQEYGAPSDLLQQRGLFYSMAKDAGLV

SEQ ID NO: 4957 - protein, 1215 aa, Homo sapiens
MSFFFKAIHDLMMFSGPQILKLLIKFVNDTKAPDWQGYFYTVLLFVTACLQTLVLHQYFHICFVSGMRIKTAVIGAVYRKALVITNSARKSSTVGEIVNLMSVDAQRFMDLATYINMIWSAPLQVILALYLLWLNLGPSVLAGVAVMVLMVPVNAVMAMKTKTYQVAHMKSKDNRIKLMNEILNGIKVLKLYAWELAFKDKVLAIRQEELKVLKKSAYLSAVGTFTWVCTPFLVALCTFAVYVTIDENNILDAQTAFVSLALFNILRFPLNILPMVISSIVQASVSLKRLRIFLSHEELEPDSIERRPVKDGGGTNSITVRNATFTWARSDPPTLNGITFSIPEGALVAVVGQVGCGKSSLLSALLAEMDKVEGHVAIKGSVAYVPQQAWIQNDSLRENILFGCQLEEPYYRSVIQACALLPDLEILPSGDRTEIGEKGVNLSGGQKQRVSLARAVYSNADIYLFDDPLSAVDAHVGKHIFENVIGPKGMLKNKTRILVTHSMSYLPQVDVIIVMSGGKISEMGSYQELLARDGAFAEFLRTYASTEQEQDAEENGSTVMDEEEAGVTGVSGPGKEAKQMENGMLVTDSAGKQLQRQLSSSSSYSGDISRHHNSTAELQKAEAKKEETWKLMEADKAQTGQVKLSVYWDYMKAIGLFISFLSIFLFMCNHVSALASNYWLSLWTDDPIVNGTQEHTKVRLSVYGALGISQGIAVFGYSMAVSIGGILASRCLHVDLLHSILRSPMSFFERTPSGNLVNRFSKELDTVDSMIPEVIKMFMGSLFNVIGACIVILLATPIAAIIIPPLGLIYFFVQRFYVASSRQLKRLESVSRSPVYSHFNETLLGVSVIRAFEEQERFIHQSDLKVDENQKAYYPSIVANRWLAVRLECVGNCIVLFAALFAVISRHSLSAGLVGLSVSYSLQVTTYLNWLVRMSSEMETNIVAVERLKEYSETEKEAPWQIQETAPPSSWPQVGRVEFRNYCLRYREDLDFVLRHINVTINGGEKVGIVGRTGAGKSSLTLGLFRINESAEGEIIIDGINIAKIGLHDLRFKITIIPQDPVLFSGSLRMNLDPFSQYSDEEVWTSLELAHLKDFVSALPDKLDHECAEGGENLSVGQRQLVCLARALLRKTKILVLDEATAAVDLETDDLIQSTIRTQFEDCTVLTIAHRLNTIMDYTRVIVLDKGEIQEYGAPSDLLQQRGLFYSMAKDAGLV

SEQ ID NO: 4958 - protein, 655 aa, Homo sapiens
MSSSNVEVFIPVSQGNTNGFPATASNDLKAFTEGAVLSFHNICYRVKLKSGFLPCRKPVEKEILSNINGIMKPGLNAILGPTGGGKSSLLDVLAARKDPSGLSGDVLINGAPRPANFKCNSGYVVQDDVVMGTLTVRENLQFSAALRLATTMTNHEKNERINRVIQELGLDKVADSKVGTQFIRGVSGGERKRTSIGMELITDPSILFLDEPTTGLDSSTANAVLLLLKRMSKQGRTIIFSIHQPRYSIFKLFDSLTLLASGRLMFHGPAQEALGYFESAGYHCEAYNNPADFFLDIINGDSTAVALNREEDFKATEIIEPSKQDKPLIEKLAEIYVNSSFYKETKAELHQLSGGEKKKKITVFKEISYTTSFCHQLRWVSKRSFKNLLGNPQASIAQIIVTVVLGLVIGAIYFGLKNDSTGIQNRAGVLFFLTTNQCFSSVSAVELFVVEKKLFIHEYISGYYRVSSYFLGKLLSDLLPMRMLPSIIFTCIVYFMLGLKPKADAFFVMMFTLMMVAYSASSMALAIAAGQSVVSVATLLMTICFVFMMIFSGLLVNLTTIASWLSWLQYFSIPRYGFTALQHNEFLGQNFCPGLNATGNNPCNYATCTGEEYLVKQGIDLSPWGLWKNHVALACMIVIFLTIAYLKLLFLKKYS

SEQ ID NO: 4959 - protein, 611 aa, Homo sapiens
MSSSNVEVFIPVSQGNTNGFPATASNDLKAFTEGAVLSFHNICYRVKLKSGFLPCRKPVEKEILSNINGIMKPGLNAILGPTGGGKSSLLDVLAARKDPSGLSGDVLINGAPRPANFKCNSGYVVQDDVVMGTLTVRENLQFSAALRLATTMTNHEKNERINRVIQELGLDKVADSKVGTQFIRGVSGGERKRTSIGMELITDPSILFLDEPTTGLDSSTANAVLLLLKRMSKQGRTIIFSIHQPRYSIFKLFDSLTLLASGRLMFHGPAQEALGYFESAGYHCEAYNNPADFFLDIINGDSTAVALNREEDFKATEIIEPSKQDKPLIEKLAEIYVNSSFYKETKAELHQLSGGEKKKKITVFKEISYTTSFCHQLRWVSKRSFKNLLGNPQASIAQIIVTVVLGLVIGAIYFGLKNDSTGIQNRAGVLFFLTTNQCFSSVSAVELFVVEKKLFIHEYISGYYRVSSYFLGKLLSDLLPMRMLPSIIFTCIVYFMLGLKPKADAFFVMMFTLMMVAYSASSMALAIAAGQSVVSVATLLMTICFVFMMVCWSISQPLHLGCHGFSTSAFHDMDLRLCSIMNFWDKTSAQDSMQQETILVTMQHVLAKNIW

SEQ ID NO: 4960 - protein, 403 aa, Homo sapiens
MDRSKENCISGPVKATAPVGGPKRVLVTQQFPCQNPLPVNSGQAQRVLCPSNSSQRIPLQAQKLVSSHKPVQNQKQKQLQATSVPHPVSRPLNNTQKSKQPLPSAPENNPEEELASKQKNEESKKRQWALEDFEIGRPLGKGKFGNVYLAREKQSKFILALKVLFKAQLEKAGVEHQLRREVEIQSHLRHPNILRLYGYFHDATRVYLILEYAPLGTVYRELQKLSKFDEQRTATYITELANALSYCHSKRVIHRDIKPENLLLGSAGELKIADFGWSVHAPSSRRTTLCGTLDYLPPEMIEGRMHDEKVDLWSLGVLCYEFLVGKPPFEANTYQETYKRISRVEFTFPDFVTEGARDLISRLLKHNPSQRPMLREVLEHPWITANSSKPSNCQNKESASKQS

SEQ ID NO: 4961 - protein, 403 aa, Homo sapiens; identical to SEQ ID NO: 4960

SEQ ID NO: 4962 - protein, 403 aa, Homo sapiens; identical to SEQ ID NO: 4960

SEQ ID NO: 4963 - protein, 347 aa, Homo sapiens
MDRSKENCISGPVKATAPVGGPKRVLVTQQFPCQNPLPVNSGQAQRVLCPSNSSQRIPLQAQKLVSSHKPVQNQKQKQLQATSVPHPVSRPLNNTQKSKQPLPSAPENNPEEELASKQKNEESKKRQWALEDFEIGRPLGKGKFGNVYLAREKQSKFILALKVLFKAQLEKAGVEHQLRREVEIQSHLRHPNILRLYGYFHDATRVYLILEYAPLGTVYRELQKLSKFDEQRTATYITELANALSYCHSKRVIHRDIKPENLLLGSAGELKIADFGWSVHAPSSRRTTLCGTLDYLPPEMIEGRMHDEKVDLWSLGVLCYEFLVGKPPFEANTYQETYKRISRVRRN

SEQ ID NO: 4964 - protein, 403 aa, Homo sapiens; identical to SEQ ID NO: 4960

SEQ ID NO: 4965 - protein, 403 aa, Homo sapiens; identical to SEQ ID NO: 4960

SEQ ID NO: 4966 - protein, 403 aa, Homo sapiens; identical to SEQ ID NO: 4960

SEQ ID NO: 4967 - protein, 403 aa, Homo sapiens; identical to SEQ ID NO: 4960

SEQ ID NO: 4968 - protein, 403 aa, Homo sapiens; identical to SEQ ID NO: 4960

SEQ ID NO: 4969 - protein, 189 aa, Homo sapiens
MDRSKENCISGPVKATAPVGGPKRVLVTQQFPCQNPLPVNSGQAQRVLCPSNSSQRIPLQAQKLVSSHKPVQNQKQKQLQATSVPHPVSRPLNNTQKSKQPLPSAPENNPEEELASKQKNEESKKRQWALEDFEIGRPLGKGKFGNVYLAREKQSKFILALKVLFKAQLEKAGVEHQLRREVEIQSHLR

SEQ ID NO: 4970 - protein, 147 aa, Homo sapiens
MDRSKENCISGPVKATAPVGGPKRVLVTQQFPCQNPLPVNSGQAQRVLCPSNSSQRIPLQAQKLVSSHKPVQNQKQKQLQATSVPHPVSRPLNNTQKSKQPLPSAPENNPEEELASKQKNEESKKRQWALEDFEIGRPLGKGKFGNV

SEQ ID NO: 4971 - protein, 271 aa, Homo sapiens
MDRSKENCISGPVKATAPVGGPKRVLVTQQFPCQNPLPVNSGQAQRVLCPSNSSQRIPLQAQKLVSSHKPVQNQKQKQLQATSVPHPVSRPLNNTQKSKQPLPSAPENNPEEELASKQKNEESKKRQWALEDFEIGRPLGKGKFGNVYLAREKQSKFILALKVLFKAQLEKAGVEHQLRREVEIQSHLRHPNILRLYGYFHDATRVYLILEYAPLGTVYRELQKLSKFDEQRTATYITELANALSYCHSKRVIHRDIKPENLLLGSAGELK

SEQ ID NO: 4972 - protein, 79 aa, Homo sapiens
MDRSKENCISGPVKATAPVGGPKRVLVTQQFPCQNPLPVNSGQAQRVLCPSNSSQRIPLQAQKLVSSHKPVQNQKQKQL

SEQ ID NO: 4973 - protein, 106 aa, Homo sapiens
MDRSKENCISGPVKATAPVGGPKRVLVTQQFPCQNPLPVNSGQAQRVLCPSNSSQRIPLQAQKLVSSHKPVQNQKQKQLQATSVPHPVSRPLNNTQKSKQPLPSAP

SEQ ID NO: 4974 - protein, 344 aa, Homo sapiens
MAQKENSYPWPYGRQTAPSGLSTLPQRVLRKEPVTPSALVLMSRSNVQPTAAPGQKVMENSSGTPDILTRHFTIDDFEIGRPLGKGKFGNVYLAREKKSHFIVALKVLFKSQIEKEGVEHQLRREIEIQAHLHHPNILRLYNYFYDRRRIYLILEYAPRGELYKELQKSCTFDEQRTATIMEELADALMYCHGKKVIHRDIKPENLLLGLKGELKIADFGWSVHAPSLRRKTMCGTLDYLPPEMIEGRMHNEKVDLWCIGVLCYELLVGNPPFESASHNETYRRIVKVDLKFPASVPMGAQDLISKLLRHNPSERLPLAQVSAHPWVRANSRRVLPPSALQSVA

SEQ ID NO: 4975 - protein, 303 aa, Homo sapiens
MSRSNVQPTAAPGQKVMENSSGTPDILTRHFTIDDFEIGRPLGKGKFGNVYLAREKKSHFIVALKVLFKSQIEKEGVEHQLRREIEIQAHLHHPNILRLYNYFYDRRRIYLILEYAPRGELYKELQKSCTFDEQRTATIMEELADALMYCHGKKVIHRDIKPENLLLGLKGELKIADFGWSVHAPSLRRKTMCGTLDYLPPEMIEGRMHNEKVDLWCIGVLCYELLVGNPPFESASHNETYRRIVKVDLKFPASVPMGAQDLISKLLRHNPSERLPLAQVSAHPWVRANSRRVLPPSALQSVA

SEQ ID NO: 4976 - protein, 344 aa, Homo sapiens; identical to SEQ ID NO: 4974

SEQ ID NO: 4977 - protein, 309 aa, Homo sapiens
MSSPRAVVQLGKAQPAGEELATANQTAQQPSSPAMRRLTVDDFEIGRPLGKGKFGNVYLARLKESHFIVALKVLFKSQIEKEGLEHQLRREIEIQAHLQHPNILRLYNYFHDARRVYLILEYAPRGELYKELQKSEKLDEQRTATIIEELADALTYCHDKKVIHRDIKPENLLLGFRGEVKIADFGWSVHTPSLRRKTMCGTLDYLPPEMIEGRTYDEKVDLWCIGVLCYELLVGYPPFESASHSETYRRILKVDVRFPLSMPLGARDLISRLLRYQPLERLPLAQILKHPWVQAHSRRVLPPCAQMAS

SEQ ID NO: 4978 - protein, 290 aa, Homo sapiens
MATANQTAQQPSSPAMRRLTVDDFEIGRPLGKGKFGNVYLARLKESHFIVALKVLFKSQIEKEGLEHQLRREIEIQAHLQHPNILRLYNYFHDARRVYLILEYAPRGELYKELQKSEKLDEQRTATIIEELADALTYCHDKKVIHRDIKPENLLLGFRGEVKIADFGWSVHTPSLRRKTMCGTLDYLPPEMIEGRTYDEKVDLWCIGVLCYELLVGYPPFESASHSETYRRILKVDVRFPLSMPLGARDLISRLLRYQPLERLPLAQILKHPWVQAHSRRVLPPCAQMAS

SEQ ID NO: 4979 - protein, 275 aa, Homo sapiens
MRRLTVDDFEIGRPLGKGKFGNVYLARLKESHFIVALKVLFKSQIEKEGLEHQLRREIEIQAHLQHPNILRLYNYFHDARRVYLILEYAPRGELYKELQKSEKLDEQRTATIIEELADALTYCHDKKVIHRDIKPENLLLGFRGEVKIADFGWSVHTPSLRRKTMCGTLDYLPPEMIEGRTYDEKVDLWCIGVLCYELLVGYPPFESASHSETYRRILKVDVRFPLSMPLGARDLISRLLRYQPLERLPLAQILKHPWVQAHSRRVLPPCAQMAS

SEQ ID NO: 4980 - protein, 862 aa, Homo sapiens
MNIQEQGFPLDLGASFTEDAPRPPVPGEEGELVSTDPRPASYSFCSGKGVGIKGETSTATPRRSDLDLGYEPEGSASPTPPYLKWAESLHSLLDDQDGISLFRTFLKQEGCADLLDFWFACTGFRKLEPCDSNEEKRLKLARAIYRKYILDNNGIVSRQTKPATKSFIKGCIMKQLIDPAMFDQAQTEIQATMEENTYPSFLKSDIYLEYTRTGSESPKVCSDQSSGSGTGKGISGYLPTLNEDEEWKCDQDMDEDDGRDAAPPGRLPQKLLLETAAPRVSSSRRYSEGREFRYGSWREPVNPYYVNAGYALAPATSANDSEQQSLSSDADTLSLTDSSVDGIPPYRIRKQHRREMQESVQVNGRVPLPHIPRTYRVPKEVRVEPQKFAEELIHRLEAVQRTREAEEKLEERLKRVRMEEEGEDGDPSSGPPGPCHKLPPAPAWHHFPPRCVDMGCAGLRDAHEENPESILDEHVQRVLRTPGRQSPGPGHRSPDSGHVAKMPVALGGAASGHGKHVPKSGAKLDAAGLHHHRHVHHHVHHSTARPKEQVEAEATRRAQSSFAWGLEPHSHGARSRGYSESVGAAPNASDGLAHSGKVGVACKRNAKKAESGKSASTEVPGASEDAEKNQKIMQWIIEGEKEISRHRRTGHGSSGTRKPQPHENSRPLSLEHPWAGPQLRTSVQPSHLFIQDPTMPPHPAPNPLTQLEEARRRLEEEEKRASRAPSKQRYVQEVMRRGRACVRPACAPVLHVVPAVSDMELSETETRSQRKVGGGSAQPCDSIVVAYYFCGEPIPYRTLVRGRAVTLGQFKELLTKKGSYRYYFKKVSDEFDCGVVFEEVREDEAVLPVFEEKIIGKVEKVD

SEQ ID NO: 4981 - protein, 826 aa, Homo sapiens
MNIQEQGFPLDLGASFTEDAPRPPVPGEEGELVSTDPRPASYSFCSGKGVGIKGETSTATPRRSDLDLGYEPEGSASPTPPYLKWAESLHSLLDDQDGISLFRTFLKQEGCADLLDFWFACTGFRKLEPCDSNEEKRLKLARAIYRKYILDNNGIVSRQTKPATKSFIKGCIMKQLIDPAMFDQAQTEIQATMEENTYPSFLKSDIYLEYTRTGSESPKVCSDQSSGSGTGKGISGYLPTLNEDEEWKCDQDMDEDDGRDAAPPGRLPQKLLLETAAPRVSSSRRYSEGREFRYGSWREPVNPYYVNAGYALAPATSANDSEQQSLSSDADTLSLTDSSVDGIPPYRIRKQHRREMQESVQVNGRVPLPHIPRTYRVPKEVRVEPQKFAEELIHRLEAVQRTREAEEKLEERLKRVRMEEEGEDGDPSSGPPGPCHKLPPAPAWHHFPPRCVDMGCAGLRDAHEENPESILDEHVQRVLRTPGRQSPGPGHRSPDSGHVAKMPVALGGAASGHGKHVPKSGAKLDAAGLHHHRHVHHHVHHSTARPKEQVEAEATRRAQSSFAWGLEPHSHGARSRGYSESVGAAPNASDGLAHSGKVGVACKRNAKKAESGKSASTEVPGASEDAEKNQKIMQWIIEGEKEISRHRRTGHGSSGTRKPQPHENSRPLSLEHPWAGPQLRTSVQPSHLFIQDPTMPPHPAPNPLTQLEEARRRLEEEEKRASRAPSKQRTRSQRKVGGGSAQPCDSIVVAYYFCGEPIPYRTLVRGRAVTLGQFKELLTKKGSYRYYFKKVSDEFDCGVVFEEVREDEAVLPVFEEKIIGKVEKVD

SEQ ID NO: 4982 - protein, 102 aa, Homo sapiens
  VARIANT 1: note = MOD_RES - Any amino acid
XLEEEEKRASRAPSKQRTRSQRKVGGGSAQPCDSIVVAYYFCGEPIPYRTLVRGRAVTLGQFKELLTKKGSYRPPSHLRCCLLTALLTSVLQILLQESERRV

SEQ ID NO: 4983 - protein, 618 aa, Homo sapiens
MHKTASQRLFPGPSYQNIKSIMEDSTILSDWTNSNKQKMKYDFSCELYRMSTYSTFPAGVPVSERSLARAGFYYTGVNDKVKCFCCGLMLDNWKLGDSPIQKHKQLYPSCSFIQNLVSASLGSTSKNTSPMRNSFAHSLSPTLEHSSLFSGSYSSLSPNPLNSRAVEDISSSRTNPYSYAMSTEEARFLTYHMWPLTFLSPSELARAGFYYIGPGDRVACFACGGKLSNWEPKDDAMSEHRRHFPNCPFLENSLETLRFSISNLSMQTHAARMRTFMYWPSSVPVQPEQLASAGFYYVGRNDDVKCFCCDGGLRCWESGDDPWVEHAKWFPRCEFLIRMKGQEFVDEIQGRYPHLLEQLLSTSDTTGEENADPPIIHFGPGESSSEDAVMMNTPVVKSALEMGFNRDLVKQTVQSKILTTGENYKTVNDIVSALLNAEDEKREEEKEKQAEEMASDDLSLIRKNRMALFQQLTCVLPILDNLLKANVINKQEHDIIKQKTQIPLQARELIDTILVKGNAAANIFKNCLKEIDSTLYKNLFVDKNMKYIPTEDVSGLSLEEQLRRLQEERTCKVCMDKEVSVVFIPCGHLVVCQECAPSLRKCPICRGIIKGTVRTFLS

SEQ ID NO: 4984 - protein, 569 aa, Homo sapiens
MSTYSTFPAGVPVSERSLARAGFYYTGVNDKVKCFCCGLMLDNWKLGDSPIQKHKQLYPSCSFIQNLVSASLGSTSKNTSPMRNSFAHSLSPTLEHSSLFSGSYSSLSPNPLNSRAVEDISSSRTNPYSYAMSTEEARFLTYHMWPLTFLSPSELARAGFYYIGPGDRVACFACGGKLSNWEPKDDAMSEHRRHFPNCPFLENSLETLRFSISNLSMQTHAARMRTFMYWPSSVPVQPEQLASAGFYYVGRNDDVKCFCCDGGLRCWESGDDPWVEHAKWFPRCEFLIRMKGQEFVDEIQGRYPHLLEQLLSTSDTTGEENADPPIIHFGPGESSSEDAVMMNTPVVKSALEMGFNRDLVKQTVQSKILTTGENYKTVNDIVSALLNAEDEKREEEKEKQAEEMASDDLSLIRKNRMALFQQLTCVLPILDNLLKANVINKQEHDIIKQKTQIPLQARELIDTILVKGNAAANIFKNCLKEIDSTLYKNLFVDKNMKYIPTEDVSGLSLEEQLRRLQEERTCKVCMDKEVSVVFIPCGHLVVCQECAPSLRKCPICRGIIKGTVRTFLS

SEQ ID NO: 4985 - protein, 597 aa, Homo sapiens
MEDSTILSDWTNSNKQKMKYDFSCELYRMSTYSTFPAGVPVSERSLARAGFYYTGVNDKVKCFCCGLMLDNWKLGDSPIQKHKQLYPSCSFIQNLVSASLGSTSKNTSPMRNSFAHSLSPTLEHSSLFSGSYSSLSPNPLNSRAVEDISSSRTNPYSYAMSTEEARFLTYHMWPLTFLSPSELARAGFYYIGPGDRVACFACGGKLSNWEPKDDAMSEHRRHFPNCPFLENSLETLRFSISNLSMQTHAARMRTFMYWPSSVPVQPEQLASAGFYYVGRNDDVKCFCCDGGLRCWESGDDPWVEHAKWFPRCEFLIRMKGQEFVDEIQGRYPHLLEQLLSTSDTTGEENADPPIIHFGPGESSSEDAVMMNTPVVKSALEMGFNRDLVKQTVQSKILTTGENYKTVNDIVSALLNAEDEKREEEKEKQAEEMASDDLSLIRKNRMALFQQLTCVLPILDNLLKANVINKQEHDIIKQKTQIPLQARELIDTILVKGNAAANIFKNCLKEIDSTLYKNLFVDKNMKYIPTEDVSGLSLEEQLRRLQEERTCKVCMDKEVSVVFIPCGHLVVCQECAPSLRKCPICRGIIKGTVRTFLS

SEQ ID NO: 4986 - protein, 534 aa, Homo sapiens [sequence omitted]

SEQ ID NO: 4987 - protein, 604 aa, Homo sapiens
MNIVENSIFLSNLMKSANTFELKYDLSCELYRMSTYSTFPAGVPVSERSLARAGFYYTGVNDKVKCFCCGLMLDNWKRGDSPTEKHKKLYPSCRFVQSLNSVNNLEATSQPTFPSSVTNSTHSLLPGTENSGYFRGSYSNSPSNPVNSRANQDFSALMRSSYHCAMNNENARLLTFQTWPLTFLSPTDLAKAGFYYIGPGDRVACFACGGKLSNWEPKDNAMSEHLRHFPKCPFIENQLQDTSRYTVSNLSMQTHAARFKTFFNWPSSVLVNPEQLASAGFYYVGNSDDVKCFCCDGGLRCWESGDDPWVQHAKWFPRCEYLIRIKGQEFIRQVQASYPHLLEQLLSTSDSPGDENAESSIIHFEPGEDHSEDAIMMNTPVINAAVEMGFSRSLVKQTVQRKILATGENYRLVNDLVLDLLNAEDEIREEERERATEEKESNDLLLIRKNRMALFQHLTCVIPILDSLLTAGIINEQEHDVIKQKTQTSLQARELIDTILVKGNIAATVFRNSLQEAEAVLYEHLFVQQDIKYIPTEDVSDLPVEEQLRRLQEERTCKVCMDKEVSIVFIPCGHLVVCKDCAPSLRKCPICRSTIKGTVRTFLS

SEQ ID NO: 4988 - protein, 604 aa, Homo sapiens; identical to SEQ ID NO: 4987

SEQ ID NO: 4989 - protein, 165 aa, Homo sapiens
MGAPTLPPAWQPFLKDHRISTFKNWPFLEGCACTPERMAEAGFIHCPTENEPDLAQCFFCFKELEGWEPDDDPIGPGTVAYACNTSTLGGRGGRITREEHKKHSSGCAFLSVKKQFEELTLGEFLKLDRERAKNKIAKETNNKKKEFEETAEKVRRAIEQLAAMD

SEQ ID NO: 4990 - protein, 142 aa, Homo sapiens
MGAPTLPPAWQPFLKDHRISTFKNWPFLEGCACTPERMAEAGFIHCPTENEPDLAQCFFCFKELEGWEPDDDPIEEHKKHSSGCAFLSVKKQFEELTLGEFLKLDRERAKNKIAKETNNKKKEFEETAEKVRRAIEQLAAMD

SEQ ID NO: 4991 - protein, 137 aa, Homo sapiens
MGAPTLPPAWQPFLKDHRISTFKNWPFLEGCACTPERMAEAGFIHCPTENEPDLAQCFFCFKELEGWEPDDDPMQRKPTIRRKNLRKLRRKCAVPSSSWLPWIEASGRSCLVPEWLHHFQGLFPGATSLPVGPLAMS

SEQ ID NO: 4992 - protein, 143 aa, Homo sapiens
MGAPTLPPAWQPFLKDHRISTFKNWPFLEGCACTPERMAEAGFIHCPTENEPDLAQCFFCFKELEGWEPDDDPIGPGTVAYACNTSTLGGRGGRITREEHKKHSSGCAFLSVKKQFEELTLGEFLKLDRERAKNKIERALLAE

SEQ ID NO: 4993 - protein, 4857 aa, Homo sapiens
MVTGGGAAPPGTVTEPLPSVIVLSAGRKMAAAAAAASGPGCSSAAGAGAAGVSEWLVLRDGCMHCDADGLHSLSYHPALNAILAVTSRGTIKVIDGTSGATLQASALSAKPGGQVKCQYISAVDKVIFVDDYAVGCRKDLNGILLLDTALQTPVSKQDDVVQLELPVTEAQQLLSACLEKVDISSTEGYDLFITQLKDGLKNTSHETAANHKVAKWATVTFHLPHHVLKSIASAIVNELKKINQNVAALPVASSVMDRLSYLLPSARPELGVGPGRSVDRSLMYSEANRRETFTSWPHVGYRWAQPDPMAQAGFYHQPASSGDDRAMCFTCSVCLVCWEPTDEPWSEHERHSPNCPFVKGEHTQNVPLSVTLATSPAQFPCTDGTDRISCFGSGSCPHFLAAATKRGKICIWDVSKLMKVHLKFEINAYDPAIVQQLILSGDPSSGVDSRRPTLAWLEDSSSCSDIPKLEGDSDDLLEDSDSEEHSRSDSVTGHTSQKEAMEVSLDITALSILQQPEKLQWEIVANVLEDTVKDLEELGANPCLTNSKSEKTKEKHQEQHNIPFPCLLAGGLLTYKSPATSPISSNSHRSLDGLSRTQGESISEQGSTDNESCTNSELNSPLVRRTLPVLLLYSIKESDEKAGKIFSQMNNIMSKSLHDDGFTVPQIIEMELDSQEQLLLQDPPVTYIQQFADAAANLTSPDSEKWNSVFPKPGTLVQCLRLPKFAEEENLCIDSITPCADGIHLLVGLRTCPVESLSAINQVEALNNLNKLNSALCNRRKGELESNLAVVNGANISVIQHESPADVQTPLIIQPEQRNVSGGYLVLYKMNYATRIVTLEEEPIKIQHIKDPQDTITSLILLPPDILDNREDDCEEPIEDMQLTSKNGFEREKTSDISTLGHLVITTQGGYVKILDLSNFEILAKVEPPKKEGTEEQDTFVSVIYCSGTDRLCACTKGGELHFLQIGGTCDDIDEADILVDGSLSKGIEPSSEGSKPLSNPSSPGISGVDLLVDQPFTLEILTSLVELTRFETLTPRFSATVPPCWVEVQQEQQQRRHPQHLHQQHHGDAAQHTRTWKLQTDSNSWDEHVFELVLPKACMVGHVDFKFVLNSNITNIPQIQVTLLKNKAPGLGKVNALNIEVEQNGKPSLVDLNEEMQHMDVEESQCLRLCPFLEDHKEDILCGPVWLASGLDLSGHAGMLTLTSPKLVKGMAGGKYRSFLIHVKAVNERGTEEICNGGMRPVVRLPSLKHQSNKGYSLASLLAKVAAGKEKSSNVKNENTSGTRKSENLRGCDLLQEVSVTIRRFKKTSISKERVQRCAMLQFSEFHEKLVNTLCRKTDDGQITEHAQSLVLDTLCWLAGVHSNGPGSSKEGNENLLSKTRKFLSDIVRVCFFEAGRSIAHKCARFLALCISNGKCDPCQPAFGPVLLKALLDNMSFLPAATTGGSVYWYFVLLNYVKDEDLAGCSTACASLLTAVSRQLQDRLTPMEALLQTRYGLYSSPFDPVLFDLEMSGSSCKNVYNSSIGVQSDEIDLSDVLSGNGKVSSCTAAEGSFTSLTGLLEVEPLHFTCVSTSDGTRIERDDAMSSFGVTPAVGGLSSGTVGEASTALSSAAQVALQSLSHAMASAEQQLQVLQEKQQQLLKLQQQKAKLEAKLHQTTAAAAAAASAVGPVHNSVPSNPVAAPGFFIHPSDVIPPTPKTTPLFMTPPLTPPNEAVSVVINAELAQLFPGSVIDPPAVNLAAHNKNSNKSRMNPLGSGLALAISHASHFLQPPPHQSIIIERMHSGARRFVTLDFGRPILLTDVLIPTCGDLASLSIDIWTLGEEVDGRRLVVATDISTHSLILHDLIPPPVCRFMKITVIGRYGSTNARAKIPLGFYYGHTYILPWESELKLMHDPLKGEGESANQPEIDQHLAMMVALQEDIQCRYNLACHRLETLLQSIDLPPLNSANNAQYFLRKPDKAVEEDSRVFSAYQDCIQLQLQLNLAHNAVQRLKVALGASRKMLSETSNPEDLIQTSSTEQLRTIIRYLLDTLLSLLHASNGHSVPAVLQSTFHAQACEELFKHLCISGTPKIRLHTGLLLVQLCGGERWWGQFLSNVLQELYNSEQLLIFPQDRVFMLLSCIGQRSLSNSGVLESLLNLLDNLLSPLQPQLPMHRRTEGVLDIPMISWVVMLVSRLLDYVATVEDEAAAAKKPLNGNQWSFINNNLHTQSLNRSSKGSSSLDRLYSRKIRKQLVHHKQQLNLLKAKQKALVEQMEKEKIQSNKGSSYKLLVEQAKLKQATSKHFKDLIRLRRTAEWSRSNLDTEVTTAKESPEIEPLPFTLAHERCISVVQKLVLFLLSMDFTCHADLLLFVCKVLARIANATRPTIHLCEIVNEPQLERLLLLLVGTDFNRGDISWGGAWAQYSLTCMLQDILAGELLAPVAAEAMEEGTVGDDVGATAGDSDDSLQQSSVQLLETIDEPLTHDITGAPPLSSLEKDKEIDLELLQDLMEVDIDPLDIDLEKDPLAAKVFKPISSTWYDYWGADYGTYNYNPYIGGLGIPVAKPPANTEKNGSQTVSVSVSQALDARLEVGLEQQAELMLKMMSTLEADSILQALTNTSPTLSQSPTGTDDSLLGGLQAANQTSQLIIQLSSVPMLNVCFNKLFSMLQVHHVQLESLLQLWLTLSLNSSSTGNKENGADIFLYNANRIPVISLNQASITSFLTVLAWYPNTLLRTWCLVLHSLTLMTNMQLNSGSSSAIGTQESTAHLLVSDPNLIHVLVKFLSGTSPHGTNQHSPQVGPTATQAMQEFLTRLQVHLSSTCPQIFSEFLLKLIHILSTERGAFQTGQGPLDAQVKLLEFTLEQNFEVVSVSTISAVIESVTFLVHHYITCSDKVMSRSGSDSSVGARACFGGLFANLIRPGDAKAVCGEMTRDQLMFDLLKLVNILVQLPLSGNREYSARVSVTTNTTDSVSDEEKVSGGKDGNGSSTSVQGSPAYVADLVLANQQIMSQILSALGLCNSSAMAMIIGASGLHLTKHENFHGGLDAISVGDGLFTILTTLSKKASTVHMMLQPILTYMACGYMGRQGSLATCQLSEPLLWFILRVLDTSDALKAFHDMGGVQLICNNMVTSTRAIVNTARSMVSTIMKFLDSGPNKAVDSTLKTRILASEPDNAEGIHNFAPLGTITSSSPTAQPAEVLLQATPPHRRARSAAWSYIFLPEEAWCDLTIHLPAAVLLKEIHIQPHLASLATCPSSVSVEVSADGVNMLPLSTPVVTSGLTYIKIQLVKAEVASAVCLRLHRPRDASTLGLSQIKLLGLTAFGTTSSATVNNPFLPSEDQVSKTSIGWLRLLHHCLTHISDLEGMMASAAAPTANLLQTCAALLMSPYCGMHSPNIEVVLVKIGLQSTRIGLKLIDILLRNCAASGSDPTDLNSPLLFGRLNGLSSDSTIDILYQLGTTQDPGTKDRIQALLKWVSDSARVAAMKRSGRMNYMCPNSSTVEYGLLMPSPSHLHCVAAILWHSYELLVEYDLPALLDQELFELLFNWSMSLPCNMVLKKAVDSLLCSMCHVHPNYFSLLMGWMGITPPPVQCHHRLSMTDDSKKQDLSSSLTDDSKNAQAPLALTESHLATLASSSQSPEAIKQLLDSGLPSLLVRSLASFCFSHISSSESIAQSIDISQDKLRRHHVPQQCNKMPITADLVAPILRFLTEVGNSHIMKDWLGGSEVNPLWTALLFLLCHSGSTSGSHNLGAQQTSARSASLSSAATTGLTTQQRTAIENATVAFFLQCISCHPNNQKLMAQVLCELFQTSPQRGNLPTSGNISGFIRRLFLQLMLEDEKVTMFLQSPCPLYKGRINATSHVIQHPMYGAGHKFRTLHLPVSTTLSDVLDRVSDTPSITAKLISEQKDDKEKKNHEEKEKVKAENGFQDNYSVVVASGLKSQSKRAVSATPPRPPSRRGRTIPDKIGSTSGAEAANKIITVPVFHLFHKLLAGQPLPAEMTLAQLLTLLYDRKLPQGYRSIDLTVKLGSRVITDPSLSKTDSYKRLHPEKDHGDLLASCPEDEALTPGDECMDGILDESLLETCPIQSPLQVFAGMGGLALIAERLPMLYPEVIQQVSAPVVTSTTQEKPKDSDQFEWVTIEQSGELVYEAPETVAAEPPPIKSAVQTMSPIPAHSLAAFGLFLRLPGYAEVLLKERKHAQCLLRLVLGVTDDGEGSHILQSPSANVLPTLPFHVLRSLFSTTPLTTDDGVLLRRMALEIGALHLILVCLSALSHHSPRVPNSSVNQTEPQVSSSHNPTSTEEQQLYWAKGTGFGTGSTASGWDVEQALTKQRLEEEHVTCLLQVLASYINPVSSAVNGEAQSSHETRGQNSNALPSVLLELLSQSCLIPAMSSYLRNDSVLDMARHVPLYRALLELLRAIASCAAMVPLLLPLSTENGEEEEEQSECQTSVGTLLAKMKTCVDTYTNRLRSKRENVKTGVKPDASDQEPEGLTLLVPDIQKTAEIVYAATTSLRQANQEKKLGEYSKKAAMKPKPLSVLKSLEEKYVAVMKKLQFDTFEMVSEDEDGKLGFKVNYHYMSQVKNANDANSAARARRLAQEAVTLSTSLPLSSSSSVFVRCDEERLDIMKVLITGPADTPYANGCFEFDVYFPQDYPSSPPLVNLETTGGHSVRFNPNLYNDGKVCLSILNTWHGRPEEKWNPQTSSFLQVLVSVQSLILVAEPYFNEPGYERSRGTPSGTQSSREYDGNIRQATVKWAMLEQIRNPSPCFKEVIHKHFYLKRVEIMAQCEEWIADIQQYSSDKRVGRTMSHHAAALKRHTAQLREELLKLPCPEGLDPDTDDAPEVCRATTGAEETLMHDQVKPSSSKELPSDFQL

SEQ ID NO: 4994 - protein, 521 aa, Homo sapiens
MSLSRSEEMHRLTENVYKTIMEQFNPSLRNFIAMGKNYEKALAGVTYAAKGYFDALVKMGELASESQGSKELGDVLFQMAEVHRQIQNQLEEMLKSFHNELLTQLEQKVELDSRYLSAALKKYQTEQRSKGDALDKCQAELKKLRKKSQGSKNPQKYSDKELQYIDAISNKQGELENYVSDGYKTALTEERRRFCFLVEKQCAVAKNSAAYHSKGKELLAQKLPLWQQACADPSKIPERAVQLMQQVASNGATLPSALSASKSNLVISDPIPGAKPLPVPPELAPFVGRMSAQESTPIMNGVTGPDGEDYSPWADRKAAQPKSLSPPQSQSKLSDSYSNTLPVRKSVTPKNSYATTENKTLPRSSSMAAGLERNGRMRVKAIFSHAAGDNSTLLSFKEGDLITLLVPEARDGWHYGESEKTKMRGWFPFSYTRVLDSDGSDRLHMSLQQGKSSSTGNLLDKDDLAIPPPDYGAASRAFPAQTASGFKQRPYSVAVPAFSQGLDDYGARSMSSGSGTLVSTV

SEQ ID NO: 4995 - protein, 552 aa, Homo sapiens
MSLSRSEEMHRLTENVYKTIMEQFNPSLRNFIAMGKNYEKALAGVTYAAKGYFDALVKMGELASESQGSKELGDVLFQMAEVHRQIQNQLEEMLKSFHNELLTQLEQKVELDSRYLSAALKKYQTEQRSKGDALDKCQAELKKLRKKSQGSKNPQKYSDKELQYIDAISNKQGELENYVSDGYKTALTEERRRFCFLVEKQCAVAKNSAAYHSKGKELLAQKLPLWQQACADPSKIPERAVQLMQQVASNGATLPSALSASKSNLVISDPIPGAKPLPVPPELAPFVGRMSAQESTPIMNGVTGPDGEDYSPWADRKAAQPKSLSPPQSQSKLSDSYSNTLPVRKSVTPKNSYATTENKTLPRSSSMAAGLERNGRMRVKAIFSHAAGDNSTLLSFKEGDLITLLVPEARDGWHYGESEKTKMRGWFPFSYTRVLDSDGSDRLHMSLQQGKSSSTGNLLDKDDLAIPPPDYGAASRAFPAQTASGFKQRPYSVAVPAFSQGLDDYGARSMSRNPFAHVQLKPTVTNDRCDLSAQGPEGREHGDGSARTLAGR

SEQ ID NO: 4996 - protein, 456 aa, Homo sapiens
MAEVHRQIQNQLEEMLKSFHNELLTQLEQKVELDSRYLSAALKKYQTEQRSKGDALDKCQAELKKLRKKSQGSKNPQKYSDKELQYIDAISNKQGELENYVSDGYKTALTEERRRFCFLVEKQCAVAKNSAAYHSKGKELLAQKLPLWQQACADPSKIPERAVQLMQQVASNGATLPSALSASKSNLVISDPIPGAKPLPVPPELAPFVGRMSAQESTPIMNGVTGPDGEDYSPWADRKAAQPKSLSPPQSQSKLSDSYSNTLPVRKSVTPKNSYATTENKTLPRSSSMAAGLERNGRMRVKAIFSHAAGDNSTLLSFKEGDLITLLVPEARDGWHYGESEKTKMRGWFPFSYTRVLDSDGSDRLHMSLQQGKSSSTGNLLDKDDLAIPPPDYGAASRAFPAQTASGFKQRPYSVAVPAFSQGLDDYGARSMSRNPFAHVQLKPTVTNDRSAPLLS

SEQ ID NO: 4997 - protein, 375 aa, Homo sapiens
MLLPEGQRQRALGFGTVTSTYSPVGQYIDAISNKQGELENYVSDGYKTALTEERRRFCFLVEKQCAVAKNSAAYHSKGKELLAQKLPLWQQACADPSKIPERAVQLMQQVASNGATLPSALSASKSNLVISDPIPGAKPLPVPPELAPFVGRMSAQESTPIMNGVTGPDGEDYSPWADRKAAQPKSLSPPQSQSKLSDSYSNTLPVRKSVTPKNSYATTENKTLPRSSSMAAGLERNGRMRVKAIFSHAAGDNSTLLSFKEGDLITLLVPEARDGWHYGESEKTKMRGWFPFSYTRVLDSDGSDRLHMSLQQGKSSSTGNLLDKDDLAIPPPDYGAASRAFPAQTASGFKQRPYSVAVPAFSQGLDDYGARSMSR

SEQ ID NO: 4998 - protein, 534 aa, Homo sapiens
MSLSRSEEMHRLTENVYKTIMEQFNPSLRNFIAMGKNYEKALAGVTYAAKGYFDALVKMGELASESQGSKELGDVLFQMAEVHRQIQNQLEEMLKSFHNELLTQLEQKVELDSRYLSAALKKYQTEQRSKGDALDKCQAELKKLRKKSQGSKNPQKYSDKELQYIDAISNKQGELENYVSDGYKTALTEERRRFCFLVEKQCAVAKNSAAYHSKGKELLAQKLPLWQQACADPSKIPERAVQLMQQVASNGATLPSALSASKSNLVISDPIPGAKPLPVPPELAPFVGRMSAQESTPIMNGVTGPDGEDYSPWADRKAAQPKSLSPPQSQSKLSDSYSNTLPVRKSVTPKNSYATTENKTLPRSSSMAAGLERNGRMRVKAIFSHAAGDNSTLLSFKEGDLITLLVPEARDGWHYGESEKTKMRGWFPFSYTRVLDSDGSDRLHMSLQQGKSSSTGNLLDKDDLAIPPPDYGAASRAFPAQTASGFKQRPYSVAVPAFSQGLDDYGARSMSRNPFAHVQLKPTVTNDRSAPLLS

SEQ ID NO: 4999 - protein, 520 aa, Homo sapiens
MSLSRSEEMHRLTENVYKTIMEQFNPSLRNFIAMGKNYEKALAGVTYAAKGYFDALVKMGELASESQGSKELGDVLFQMAEVHRQIQNQLEEMLKSFHNELLTQLEQKVELDSRYLSAALKKYQTEQRSKGDALDKCQAELKKLRKKSQGSKNPQKYSDKELQYIDAISNKQGELENYVSDGYKTALTEERRRFCFLVEKQCAVAKNSAAYHSKGKELLAQKLPLWQQACADPSKIPERAVQLMQQVASNGATLPSALSASKSNLVISDPIPGAKPLPVPPELAPFVGRMSAQESTPIMNGVTGPDGEDYSPWADRKAAQPKSLSPPQSQSKLSDSYSNTLPVRKSVTPKNSYATTENKTLPRSSSMAAGLERNGRMRVKAIFSHAAGDNSTLLSFKEGDLITLLVPEARDGWHYGESEKTKMRGWFPFSYTRVLDSDGSDRLHMSLQQGKSSSTGNLLDKDDLAIPPPDYGAASRAFPAQTASGFKQRPYSVAVPAFSQGLDDYGARSMSSADVEVARF

SEQ ID NO: 5000 - protein, 239 aa, Homo sapiens
MAHAGRTGYDNREIVMKYIHYKLSQRGYEWDAGDVGAAPPGAAPAPGIFSSQPGHTPHPAASRDPVARTSPLQTPAAPGAAAGPALSPVPPVVHLTLRQAGDDFSRRYRRDFAEMSSQLHLTPFTARGRFATVVEELFRDGVNWGRIVAFFEFGGVMCVESVNREMSPLVDNIALWMTEYLNRHLHTWIQDNGGWDAFVELYGPSMRPLFDFSWLSLKTLLSLALVGACITLGAYLGHK

SEQ ID NO: 5001 - protein, 239 aa, Homo sapiens; identical to SEQ ID NO: 5000

SEQ ID NO: 5002 - protein, 205 aa, Homo sapiens
MAHAGRTGYDNREIVMKYIHYKLSQRGYEWDAGDVGAAPPGAAPAPGIFSSQPGHTPHPAASRDPVARTSPLQTPAAPGAAAGPALSPVPPVVHLTLRQAGDDFSRRYRRDFAEMSSQLHLTPFTARGRFATVVEELFRDGVNWGRIVAFFEFGGVMCVESVNREMSPLVDNIALWMTEYLNRHLHTWIQDNGGWVGALGDVSLG

SEQ ID NO: 5003 - protein, 706 aa, Homo sapiens
MASPADSCIQFTRHASDVLLNLNRLRSRDILTDVVIVVSREQFRAHKTVLMACSGLFYSIFTDQLKCNLSVINLDPEINPEGFCILLDFMYTSRLNLREGNIMAVMATAMYLQMEHVVDTCRKFIKASEAEMVSAIKPPREEFLNSRMLMPQDIMAYRGREVVENNLPLRSAPGCESRAFAPSLYSGLSTPPASYSMYSHLPVSSLLFSDEEFRDVRMPVANPFPKERALPCDSARPVPGEYSRPTLEVSPNVCHSNIYSPKETIPEEARSDMHYSVAEGLKPAAPSARNAPYFPCDKASKEEERPSSEDEIALHFEPPNAPLNRKGLVSPQSPQKSDCQPNSPTESCSSKNACILQASGSPPAKSPTDPKACNWKKYKFIVLNSLNQNAKPEGPEQAELGRLSPRAYTAPPACQPPMEPENLDLQSPTKLSASGEDSTIPQASRLNNIVNRSMTGSPRSSSESHSPLYMHPPKCTSCGSQSPQHAEMCLHTAGPTFPEEMGETQSEYSDSSCENGAFFCNECDCRFSEEASLKRHTLQTHSDKPYKCDRCQASFRYKGNLASHKTVHTGEKPYRCNICGAQFNRPANLKTHTRIHSGEKPYKCETCGARFVQVAHLRAHVLIHTGEKPYPCEICGTRFRHLQTLKSHLRIHTGEKPYHCEKCNLHFRHKSQLRLHLRQKHGAITNTKVQYRVSATDLPPELPKAC

SEQ ID NO: 5004 - protein, 706 aa, Homo sapiens; identical to SEQ ID NO: 5003

SEQ ID NO: 5005 - protein, 122 aa, Homo sapiens
MASPADSCIQFTRHASDVLLNLNRLRSRDILTDVVIVVSREQFRAHKTVLMACSGLFYSIFTDQLKCNLSVINLDPEINPEGFCILLDFMYTSRLNLREGNIMAVMATAMYLQMEHVVDTCR

SEQ ID NO: 5006 - protein, 104 aa, Homo sapiens
MASPADSCIQFTRHASDVLLNLNRLRSRDILTDVVIVVSREQFRAHKTVLMACSGLFYSIFTDQLKCNLSVINLDPEINPEGFCILLDFMYTSRLNLREGNIMA

SEQ ID NO: 5007 - protein, 650 aa, Homo sapiens
MASPADSCIQFTRHASDVLLNLNRLRSRDILTDVVIVVSREQFRAHKTVLMACSGLFYSIFTDQLKCNLSVINLDPEINPEGFCILLDFMYTSRLNLREGNIMAVMATAMYLQMEHVVDTCRKFIKASEAEMVSAIKPPREEFLNSRMLMPQDIMAYRGREVVENNLPLRSAPGCESRAFAPSLYSGLSTPPASYSMYSHLPVSSLLFSDEEFRDVRMPVANPFPKERALPCDSARPVPGEYSRPTLEVSPNVCHSNIYSPKETIPEEARSDMHYSVAEGLKPAAPSARNAPYFPCDKASKEEERPSSEDEIALHFEPPNAPLNRKGLVSPQSPQKSDCQPNSPTESCSSKNACILQASGSPPAKSPTDPKACNWKKYKFIVLNSLNQNAKPEGPEQAELGRLSPRAYTAPPACQPPMEPENLDLQSPTKLSASGEDSTIPQASRLNNIVNRSMTGSPRSSSESHSPLYMHPPKCTSCGSQSPQHAEMCLHTAGPTFPEEMGETQSEYSDSSCGEKPYRCNICGAQFNRPANLKTHTRIHSGEKPYKCETCGARFVQVAHLRAHVLIHTGEKPYPCEICGTRFRHLQTLKSHLRIHTGEKPYHCEKCNLHFRHKSQLRLHLRQKHGAITNTKVQYRVSATDLPPELPKAC

SEQ ID NO: 5008 - protein, 101 aa, Homo sapiens
MKFGMGSAQACPCQVPRAASTTWVPCQICETRGAAAAPPLTLEGPVQSHHGTPALTQGPQSPRDGAQLGACTRPVDVRDSGGRPLPPPDTLASAGDFLCTM

SEQ ID NO: 5009 - protein, 131 aa, Homo sapiens
MKFGMGSAQACPCQVPRAASTTWVPCQICGPQPSLSLAEQHLESPVPSAPGALAGGPTQAAPGVRGEEEQWAREIGAQLRRMADDLNAQYERRRQEEQQRHRPSPWRVLYNLIMGLLPLPRGHRAPEMEPN

SEQ ID NO: 5010 - protein, 193 aa, Homo sapiens
MARARQEGSSPEPVEGLARDGPRPFPLGRLVPSAVSCGLCEPGLAAAPAAPTLLPAAYLCAPTAPPAVTAALGGSRWPGGPRSRPRGPRPDGPQPSLSLAEQHLESPVPSAPGALAGGPTQAAPGVRGEEEQWAREIGAQLRRMADDLNAQYERRRQEEQQRHRPSPWRVLYNLIMGLLPLPRGHRAPEMEPN

SEQ ID NO: 5011 - protein, 261 aa, Homo sapiens
MKFGMGSAQACPCQVPRAASTTWVPCQICGPRERHGPRTPGGQLPGARRGPGPRRPAPLPARPPGALGSVLRPLRARPGCRPRRPHPAARCLPLRPHRPTRRHRRPGGFPLAWGSPQPAPRPAPGRSSALALAGGAAPGVARAQRPGGSGGRSHPGGPGSPRGGGTVGPGDRGPAAADGGRPQRTVRAAETRGAAAAPPLTLEGPVQSHHGTPALTQGPQSPRDGAQLGACTRPVDVRDSGGRPLPPPDTLASAGDFLCTM

SEQ ID NO: 5012 - protein, 435 aa, Homo sapiens
MLCGFQEDATPPPPPRPRRLHRRLPRPEEVGMLSLPPGLLTVSGSAAAADAVPLRPGDWAGVSTADRGERAPLGPAFCDLAVSPTSPAWRGEEDEGAKASSGDIGSLDYQEFVVDIESRLRMEGVELKEEWQDEDFPIPLPEDDSIEADILAITGPEDQPGSLEVNGNKVRKKLMAPDISLTLDPSDGSVLSDDLDESGEIDLDGLDTPSENSNEFEWEDDLPKPKTTEVIRKGSITEYTAAEEKEDGRRWRMFRIGEQDHRVDMKAIEPYKKVISHGGYYGDGLNAIVVFAVCFMPESSQPNYRYLMDNLFKYVIGTLELLVAENYMIVYLNGATTRRKMPSLGWLRKCYQQIDRRLRKNLKSLIIVHPSWFIRTLLAVTRPFISSKFSQKIRYVFNLAELAELVPMEYVGIPECIKQVDQELNGKQDEPKNEQ

SEQ ID NO: 5013 - protein, 376 aa, Homo sapiens
MEPCPSSAPPPFYPGVGEVAGLRWFSIYDQRPSWYRTKKLGLLDIGSLDYQEFVVDIESRLRMEGVELKEEWQDEDFPIPLPEDDSIEADILAITGPEDQPGSLEVNGNKVRKKLMAPDISLTLDPSDGSVLSDDLDESGEIDLDGLDTPSENSNEFEWEDDLPKPKTTEVIRKGSITEYTAAEEKEDGRRWRMFRIGEQDHRVDMKAIEPYKKVISHGGYYGDGLNAIVVFAVCFMPESSQPNYRYLMDNLFKYVIGTLELLVAENYMIVYLNGATTRRKMPSLGWLRKCYQQIDRRLRKNLKSLIIVHPSWFIRTLLAVTRPFISSKFSQKIRYVFNLAELAELVPMEYVGIPECIKQVDQELNGKQDEPKNEQ

SEQ ID NO: 5014 - protein, 229 aa, Homo sapiens
MSSHLVEPPPPLHNNNNNCEENEQSLPPPAGLNSSWVELPMNSSNGNDNGNGKNGGLEHVPSSSSIHNGDMEKILLDAQHESGQSSSRGSSHCDSPSPQEDGQIMFDVEMHTSRDHSSQSEEEVVEGEKEVEALKKSADWVSDWSSRPENIPPKEFHFRHPKRSVSLSMRKSGAMKKGGIFSAEFLKVFIPSLFLSHVLALGLGIYIGKRLSTPCQHLLRERKSPWKCV

SEQ ID NO: 5015 - protein, 219 aa, Homo sapiens
MSSHLVEPPPPLHNNNNNCEENEQSLPPPAGLNSSWVELPMNSSNGNDNGNGKNGGLEHVPSSSSIHNGDMEKILLDAQHESGQSSSRGSSHCDSPSPQEDGQIMFDVEMHTSRDHSSQSEEEVVEGEKEVEALKKSADWVSDWSSRPENIPPKEFHFRHPKRSVSLSMRKSGAMKKGGIFSAEFLKVFIPSLFLSHVLALGLGIYIGKRLSTPSASTY

SEQ ID NO: 5016 - protein, 179 aa, Homo sapiens
MNSSNGNDNGNGKNGGLEHVPSSSSIHNGDMEKILLDAQHESGQSSSRGSSHCDSPSPQEDGQIMFDVEMHTSRDHSSQSEEEVVEGEKEVEALKKSADWVSDWSSRPENIPPKEFHFRHPKRSVSLSMRKSGAMKKGGIFSAEFLKVFIPSLFLSHVLALGLGIYIGKRLSTPSASTY

SEQ ID NO: 5017 - protein, 179 aa, Homo sapiens; identical to SEQ ID NO: 5016

SEQ ID NO: 5018 - protein, 179 aa, Homo sapiens; identical to SEQ ID NO: 5016

SEQ ID NO: 5019 - protein, 211 aa, Homo sapiens
MASGQGPGPPRQECGEPALPSASEEQVAQDTEEVFRSYVFYRHQQEQEAEGVAAPADPEMVTLPLQPSSTMGQVGRQLAIIGDDINRRYDSEFQTMLQHLQPTAENAYEYFTKIATSLFESGINWGRVVALLGFGYRLALHVYQHGLTGFLGQVTRFVVDFMLHHCIARWIAQRGGWVAALNLGNGPILNVLVVLGVVLLGQFVVRRFFKS

SEQ ID NO: 5020 - protein, 191 aa, Homo sapiens
MASGQGPGPPRQECGEPALPSASEEQVAQDTEEVFRSYVFYRHQQQPSSTMGQVGRQLAIIGDDINRRYDSEFQTMLQHLQPTAENAYEYFTKIATSLFESGINWGRVVALLGFGYRLALHVYQHGLTGFLGQVTRFVVDFMLHHCIARWIAQRGGWVAALNLGNGPILNVLVVLGVVLLGQFVVRRFFKS

SEQ ID NO: 5021 - protein, 211 aa, Homo sapiens; identical to SEQ ID NO: 5019

SEQ ID NO: 5022 - protein, 153 aa, Homo sapiens
MASGQGPGPPRQECGEPALPSASEEQVAQDTEEVFRSYVFYRHQQEQEAEGVAAPADPEMVTLPLQPSSTMGQVGRQLAIIGDDINRRYDSEFQTMLQHLQPTAENAYEYFTKIATRPAATPTACLRVASIGAVWWLFWASATVWPYTSTSMA

SEQ ID NO: 5023 - protein, 168 aa, Homo sapiens
MFQIPEFEPSEQEDSSSAERGLGPSPAGDGPSGSGKHHRQAPGLLWDASHQQEQPTSSSHHGGAGAVEIRSRHSSYPAGTEDDEGMGEEPSPFRGRSRSAPPNLWAAQRYGRELRRMSDEFVDSFKKGLPRPKSAGTATQMRQSSSWTRVFQSWWDRNLGRGSSAPSQ

SEQ ID NO: 5024 - protein, 168 aa, Homo sapiens; identical to SEQ ID NO: 5023

SEQ ID NO: 5025 - protein, 149 aa, Homo sapiens
MFQIPEFEPSEQEDSSSAERGLGPSPAGDGPSGSGKHHRQAPGLLWDASHQQEQPTSSSHHGGAGAVEIRSRHSSYPAGTEDDEGMGEEPSPFRGRSRSAPPNLWAAQRYGRELRRMSDEFVDSFKKGLPRPKSAGTATQMRQSSRRLR

SEQ ID NO: 5026 - protein, 196 aa, Homo sapiens
MNRSQEVTRDEESTRSEEVTREEMAAAGLTVTVTHSNEKHDLHVTSQQGSSEPVVQDLAQVVEEVIGVPQSFQKLIFKGKSLKEMETPLSALGIQDGCRVMLIGKKNSPQEEVELKKLKHLEKSVEKIADQLEELNKELTGIQQGFLPKDLQAEALCKLDRRVKATIEQFMKILEEIDTLILPENFPTLTLVLNEK

SEQ ID NO: 5027 - protein, 230 aa, Homo sapiens
MNRSQEVTRDEESTRSEEVTREEMAAAGLTVTVTHSNEKHDLHVTSQQGSSEPVVQDLAQVVEEVIGVPQSFQKLIFKGKSLKEMETPLSALGIQDGCRVMLIGKKNSPQEEVELKKLKHLEKSVEKIADQLEELNKELTGIQQGFLPKDLQAEALCKLDRRVKATIEQFMKILEEIDTLILPENFKDSRLKRKGLVKKVQAFLAECDTVEQNICQETERLQSTNFALAE

SEQ ID NO: 5028 - protein, 345 aa, Homo sapiens
LAQRGGARRPRGDRERLGSRLRALRPGREPRQSEPPAQRGPPPSGRPPARSTASGHDRPTRGAAAGARRPRMKKKTRRRSTRSEELTRSEELTLSEEATWSEEATQSEEATQGEEMNRSQEVTRDEESTRSEEVTREEMAAAGLTVTVTHSNEKHDLHVTSQQGSSEPVVQDLAQVVEEVIGVPQSFQKLIFKGKSLKEMETPLSALGIQDGCRVMLIGKKNSPQEEVELKKLKHLEKSVEKIADQLEELNKELTGIQQGFLPKDLQAEALCKLDRRVKATIEQFMKILEEIDTLILPENFKDSRLKRKGLVKKVQAFLAECDTVEQNICQETERLQSTNFALAE

SEQ ID NO: 5029 - protein, 575 aa, Homo sapiens
MSAATHSPMMQVASGNGDRDPLPPGWEIKIDPQTGWPFFVDHNSRTTTWNDPRVPSEGPKETPSSANGPSREGSRLPPAREGHPVYPQLRPGYIPIPVLHEGAENRQVHPFHVYPQPGMQRFRTEAAAAAPQRSQSPLRGMPETTQPDKQCGQVAAAAAAQPPASHGPERSQSPAASDCSSSSSSASLPSSGRSSLGSHQLPRGYISIPVIHEQNVTRPAAQPSFHQAQKTHYPAQQGEYQTHQPVYHKIQGDDWEPRPLRAASPFRSSVQGASSREGSPARSSTPLHSPSPIRVHTVVDRPQQPMTHRETAPVSQPENKPESKPGPVGPELPPGHIPIQVIRKEVDSKPVSQKPPPPSEKVEVKVPPAPVPCPPPSPGPSAVPSSPKSVATEERAAPSTAPAEATPPKPGEAEAPPKHPGVLKVEAILEKVQGLEQAVDNFEGKKTDKKYLMIEEYLTKELLALDSVDPEGRADVRQARRDGVRKVQTILEKLEQKAIDVPGQVQVYELQPSNLEADQPLQAIMEMGAVAADKGKKNAGNAEDPHTETQQPEATAAATSNPSSMTDTPGNPAAP

SEQ ID NO: 5030 - protein, 325 aa, Homo sapiens
MQETPSSANGPSREGSRLPPAREGHPVYPQLRPGYIPIPVLHEGAENRQVHPFHVYPQPGMQRFRTEAAAAAPQRSQSPLRGMPETTQPDKQCGQVAAAAAAQPPASHGPERSQSPAASDCSSSSSSASLPSSGRSSLGSHQLPRGYISIPVIHEQNVTRPAAQPSFHQAQKTHYPAQQGEYQTHQPVYHKIQGDDWEPRPLRAASPFRSSVQGASSREGSPARSSTPLHSPSPIRVHTVVDRPQPMTHRETAPVSQPENKPESKPGPVGPELPPGHIPIQVIRKEVDSKPVSQKPPPPSEKVEVKVPPAPVPCPPPSPGPSAVP

SEQ ID NO: 5031 - protein, 218 aa, Homo sapiens
MDGSGEQPRGGGPTSSEQIMKTGALLLQGFIQDRAGRMGGEAPELALDPVPQDASTKKLSECLKRIGDELDSNMELQRMIAAVDTDSPREVFFRVAADMFSDGNFNWGRVVALFYFASKLVLKALCTKVPELIRTIMGWTLDFLRERLLGWIQDQGGWVRLLKPPHPHHRALTTAPAPPSLPPATPLGPWAFWSRSQWCPLPIFRSSDVVYNAFSLRV

SEQ ID NO: 5032 - protein, 192 aa, Homo sapiens
MDGSGEQPRGGGPTSSEQIMKTGALLLQGFIQDRAGRMGGEAPELALDPVPQDASTKKLSECLKRIGDELDSNMELQRMIAAVDTDSPREVFFRVAADMFSDGNFNWGRVVALFYFASKLVLKALCTKVPELIRTIMGWTLDFLRERLLGWIQDQGGWDGLLSYFGTPTWQTVTIFVAGVLTASLTIWKKMG

SEQ ID NO: 5033 - protein, 143 aa, Homo sapiens
MDGSGEQPRGGGPTSSEQIMKTGALLLQGMIAAVDTDSPREVFFRVAADMFSDGNFNWGRVVALFYFASKLVLKALCTKVPELIRTIMGWTLDFLRERLLGWIQDQGGWDGLLSYFGTPTWQTVTIFVAGVLTASLTIWKKMG

SEQ ID NO: 5034 - protein, 41 aa, Homo sapiens
MDGSGEQPRGGVSSRIEQGEWGGRHPSWPWTRCLRMRPPRS

SEQ ID NO: 5035 - protein, 179 aa, Homo sapiens
MDGSGEQPRGGGPTSSEQIMKTGALLLQGFIQDRAGRMGGEAPELALDPVPQDASTKKLSECLKRIGDELDSNMELQRMIAAVDTDSPREVFFRVAADMFSDGNFNWGRVVALFYFASKLVLKALCTKVPELIRTIMGWTLDFLRERLLGWIQDQGGWTVTIFVAGVLTASLTIWKKMG

SEQ ID NO: 5036 - protein, 164 aa, Homo sapiens
MDGSGEQPRGGGPTSSEQIMKTGALLLQGFIQDRAGRMGGEAPELALDPVPQDASTKKLSECLKRIGDELDSNMELQRMIAAVDTDSPREVFFRVAADMFSDGNFNWGRVVALFYFASKLVLKAGVKWRDLGSLQPLPPGFKRFTCLSIPRSWDYRPCAPRCRN

SEQ ID NO: 5037 - protein, 160 aa, Homo sapiens
MSEVRPLSRDILMETLLYEQLLEPPTMEVLGMTDSEEDLDPMEDFDSLECMEGSDALALRLACIGDEMDVSLRAPRLAQLSEVAMHSLGLAFIYDQTEDIRDVLRSFMDGFTTLKENIMRFWRSPNPGSWVSCEQVLLALLLLLALLLPLLSGGLHLLLK

SEQ ID NO: 5038 - protein, 233 aa, Homo sapiens
MSQSNRELVVDFLSYKLSQKGYSWSQFSDVEENRTEAPEGTESEMETPSAINGNPSWHLADSPAVNGATGHSSSLDAREVIPMAAVKQALREAGDEFELRYRRAFSDLTSQLHITPGTAYQSFEQVVNELFRDGVNWGRIVAFFSFGGALCVESVDKEMQVLVSRIAAWMATYLNDHLEPWIQENGGWDTFVELYGNNAAAESRKGQERFNRWFLTGMTVAGVVLLGSLFSRK

SEQ ID NO: 5039 - protein, 170 aa, Homo sapiens
MSQSNRELVVDFLSYKLSQKGYSWSQFSDVEENRTEAPEGTESEMETPSAINGNPSWHLADSPAVNGATGHSSSLDAREVIPMAAVKQALREAGDEFELRYRRAFSDLTSQLHITPGTAYQSFEQDTFVELYGNNAAAESRKGQERFNRWFLTGMTVAGVVLLGSLFSRK

SEQ ID NO: 5040 - protein, 233 aa, Homo sapiens; identical to SEQ ID NO: 5038

SEQ ID NO: 5041 - protein, 188 aa, Homo sapiens
MSQSNRELVVDFLSYKLSQKGYSWSQFSDVEENRTEAPEGTESEMETPSAINGNPSWHLADSPAVNGATGHSSSLDAREVIPMAAVKQALREAGDEFELRYRRAFSDLTSQLHITPGTAYQSFEQVVNELFRDGVNWGRIVAFFSFGGALCVESVDKEMQVLVSRIAAWMATYLNDHLEPWIQENGGW

SEQ ID NO: 5042 - protein, 233 aa, Homo sapiens; identical to SEQ ID NO: 5038

SEQ ID NO: 5043 - protein, 188 aa, Homo sapiens; identical to SEQ ID NO: 5041

SEQ ID NO: 5044 - protein, 48 aa, Homo sapiens
MSQSNRELVVDFLSYKLSQKGYSWSQFSDVEENRTEAPEGTESEMETP

SEQ ID NO: 5045 - protein, 181 aa, Homo sapiens
MSQSNRELVVDFLSYKLSQKGYSWSQFSDVEENRTEAPEGTESEMETPSAINGNPSWHLADSPAVNGATGHSSSLDAREVIPMAAVKQALREAGDEFELRYRRAFSDLTSQLHITPGTAYQSFEQVVNELFRDGVNWGRIVAFFSFGGALCVESVDKEMQVLVSRIAAWMATYLNDHLEPW

SEQ ID NO: 5046 - protein, 205 aa, Homo sapiens
MSQSNRELVVDFLSYKLSQKGYSWSQFSDVEENRTEAPEGTESEMETPSAINGNPSWHLADSPAVNGATGHSSSLDAREVIPMAAVKQALREAGDEFELRYRRAFSDLTSQLHITPGTAYQSFEQVVNELFRDGVNWGRIVAFFSFGGALCVESVDKEMQVLVSRIAAWMATYLNDHLEPWIQENGGWDTFVELYGNNAAAESRK

SEQ ID NO: 5047 - protein, 188 aa, Homo sapiens; identical to SEQ ID NO: 5041

SEQ ID NO: 5048 - protein, 204 aa, Homo sapiens
MVDQLRERTTMADPLRERTELLLADYLGYCAREPGTPEPAPSTPEAAVLRSAAARLRQIHRSFFSAYLGYPGNRFELVALMADSVLSDSPGPTWGRVVTLVTFAGTLLERGPLVTARWKKWGFQPRLKEQEGDVARDCQRLVALLSSRLMGQHRAWLQAQGGWDGFCHFFRTPFPLAFWRKQLVQAFLSCLLTTAFIYLWTRLL

SEQ ID NO: 5049 - protein, 138 aa, Homo sapiens
MAKQPSDVSSECDREGRQLQPAERPPQLRPGAPTSLQTEPQDRSPAPMSCDKSTQTPSPPCQAFNHYLSAMASMRQAEPADMRPEIWIAQELRRIGDEFNAYYARRVFLNNYQAAEDHPRMVILRLLRYIVRLVWRMH

SEQ ID NO: 5050 - protein, 112 aa, Homo sapiens
MAKQPSDVSSECDREGRQLQPAERPPQLRPGAPTSLQTEPQDRSPAPMSCDKSTQTPSPPCQAFNHYLSAMVVILEDIGDLSLCFGFIFTGLDLYGHHHSQDTEQLNHKDFS

SEQ ID NO: 5051 - protein, 172 aa, Homo sapiens
MAKQPSDVSSECDREGRQLQPAERPPQLRPGAPTSLQTEPQGNPEGNHGGEGDSCPHGSPQGPLAPPASPGPFATRSPLFIFMRRSSLLSRSSSGYFSFDTDRSPAPMSCDKSTQTPSPPCQAFNHYLSAMASMRQAEPADMRPEIWIAQELRRIGDEFNAYYARRMPLPPD

SEQ ID NO: 5052 - protein, 72 aa, Homo sapiens
MAKQPSDVSSECDREGRQLQPAERPPQLRPGAPTSLQTEPQGNPEGNHGGEGDSCPHGSPQGPLAPPASPGP

SEQ ID NO: 5053 - protein, 85 aa, Homo sapiens
MAKQPSDVSSECDREGRQLQPAERPPQLRPGAPTSLQTEPQASMRQAEPADMRPEIWIAQELRRIGDEFNAYYARRLAKLLASST

SEQ ID NO: 5054 - protein, 198 aa, Homo sapiens
MAKQPSDVSSECDREGRQLQPAERPPQLRPGAPTSLQTEPQGNPEGNHGGEGDSCPHGSPQGPLAPPASPGPFATRSPLFIFMRRSSLLSRSSSGYFSFDTDRSPAPMSCDKSTQTPSPPCQAFNHYLSAMASMRQAEPADMRPEIWIAQELRRIGDEFNAYYARRVFLNNYQAAEDHPRMVILRLLRYIVRLVWRMH

SEQ ID NO: 5055 - protein, 122 aa, Homo sapiens
MAKQPSDVSSECDREGRQLQPAERPPQLRPGAPTSLQTEPQGNPEGNHGGEGDSCPHGSPQGPLAPPASPGPFATRSPLFIFMRRSSLLSRSSSGYFSFDTDRSPAPMSCDKSTQTPSPPCQ

SEQ ID NO: 5056 - protein, 73 aa, Homo sapiens
MRQAEPADMRPEIWIAQELRRIGDEFNAYYARRVMMFSLPAFLLTPSPSTLYFFKKTVTSCNYMLILEMITVA

SEQ ID NO: 5057 - protein, 80 aa, Homo sapiens
MAKQPSDVSSECDREGRQLQPAERPPQLRPGAPTSLQTEPQDRSPAPMSCDKSTQTPSPPCQAFNHYLSAMVREIEEVVV

SEQ ID NO: 5058 - protein, 135 aa, Homo sapiens
MAKQPSDVSSECDREGRQLQPAERPPQLRPGAPTSLQTEPQGNPEGNHGGEGDSCPHGSPQGPLAPPASPGPFATRSPLFIFMRRSSLLSRSSSGYFSFDTDRSPAPMSCDKSTQTPSPPCQAFNHYLSAMANWD

SEQ ID NO: 5059 - protein, 140 aa, Homo sapiens
MAKQPSDVSSECDREGRQLQPAERPPQLRPGAPTSLQTEPQGNPEGNHGGEGDSCPHGSPQGPLAPPASPGPFATRSPLFIFMRRSSLLSRSSSGYFSFDTDRSPAPMSCDKSTQTPSPPCQAFNHYLSAMVREIEEVVV

SEQ ID NO: 5060 - protein, 96 aa, Homo sapiens
KQPSDVSSECDREGRQLQPAERPPQLRPGAPTSLQTEPQDRSPAPMSCDKSTQTPSPPCQAFNHYLSAMDDSAGSSLRIALHREVQWPLKWLAKSS

SEQ ID NO: 5061 - protein, 82 aa, Homo sapiens
MAKQPSDVSSECDREGRQLQPAERPPQLRPGAPTSLQTEPQASMRQAEPADMRPEIWIAQELRRIGDEFNAYYARRMPLPPD

SEQ ID NO: 5062 - protein, 193 aa, Homo sapiens
MATPASAPDTRALVADFVGYKLRQKGYVCGAGPGEGPAADPLHQAMRAAGDEFETRFRRTFSDLAAQLHVTPGSAQQRFTQVSDELFQGGPNWGRLVAFFVFGAALCAESVNKEMEPLVGQVQEWMVAYLETQLADWIHSSGGWAEFTALYGDGALEEARRLREGNWASVRTVLTGAVALGALVTVGAFFASK

SEQ ID NO: 5063 - protein, 51 aa, Homo sapiens
MATPASAPDTRALVADFVGYKLRQKGYVCGAGPGEGPAADPLHQAMRAAGD

SEQ ID NO: 5064 - protein, 72 aa, Homo sapiens
MATPASAPDTRALVADFVGYKLRQKGYVCGAGPGEGPAADPLHQAMRAAGDEFETRFRRTFSDLAAQLHVTP

SEQ ID NO: 5065 - protein, 149 aa, Homo sapiens
MATPASAPDTRALVADFVGYKLRQKGYVCGAGPGEGPAADPLHQAMRAAGDEFETRFRRTFSDLAAQLHVTPGSAQQRFTQVSDELFQGGPNWGRLVAFFVFGAALCAESVNKEMEPLVGQVQEWMVAYLETQLADWIHSSGGWAEFTA

SEQ ID NO: 5066 - protein, 144 aa, Homo sapiens
MATPASAPDTRALVADFVGYKLRQKGYVCGAGPGEGPAADPLHQAMRAAGDEFETRFRRTFSDLAAQLHVTPGSAQQRFTQVSDELFQGGPNWGRLVAFFVFGAALCAESVNKEMEPLVGQVQEWMVAYLETQLADWIHSSGGW

SEQ ID NO: 5067 - protein, 175 aa, Homo sapiens
MTDCEFGYIYRLAQDYLQCVLQIPQPGSGPSKTSRVLQNVAFSVQKEVEKNLKSCLDNVNVVSVDTARTLFNQVMEKEFEDGIINWGRIVTIFAFEGILIKKLLRQQIAPDVDTYKEISYFVAEFIMNNTGEWIRQNGGWENGFVKKFEPKSGWMTFLEVTGKICEMLSLLKQYC

SEQ ID NO: 5068 - protein, 163 aa, Homo sapiens
MTDCEFGYIYRLAQDYLQCVLQIPQPGSGPSKTSRVLQNVAFSVQKEVEKNLKSCLDNVNVVSVDTARTLFNQVMEKEFEDGIINWGRIVTIFAFEGILIKKLLRQQIAPDVDTYKEISYFVAEFIMNNTGEWIRQNGGWGKWHNHTPMLVESVAHKKRKMAL

SEQ ID NO: 5069 - protein, 241 aa, Homo sapiens
MCSGAGVMMARWAARGRAGWRSTVRILSPLGHCEPGVSRSCRAAQAMDCEVNNGSSLRDECITNLLVFGFLQSCSDNSFRRELDALGHELPVLAPQWEGYDELQTDGNRSSHSRLGRIEADSESQEDIIRNIARHLAQVGDSMDRSIPPGLVNGLALQLRNTSRSEEDRNRDLATALEQLLQAYPRDMEKEKTMLVLALLLAKKVASHTPSLLRDVFHTTVNFINQNLRTYVRSLARNGMD

SEQ ID NO: 5070 - protein, 137 aa, Homo sapiens
MDCEVNNGSSLRDECITNLLVFGFLQSCSDNSFRRELDALGHELPVLAPQWEGYDELQTDGNRSSHSRLGRIEAGASDNNTASAEEETEAAGSVAVERGLHGAATVILKVKKTSSGILPGTSPRSGTAWTVASLRAW

SEQ ID NO: 5071 - protein, 99 aa, Homo sapiens
MDRSIPPGLVNGLALQLRNTSRSEEDRNRDLATALEQLLQAYPRDMEKEKTMLVLALLLAKKVASHTPSLLRDVFHTTVNFINQNLRTYVRSLARNGMD

SEQ ID NO: 5072 - protein, 99 aa, Homo sapiens; identical to SEQ ID NO: 5071

SEQ ID NO: 5073 - protein, 195 aa, Homo sapiens
MDCEVNNGSSLRDECITNLLVFGFLQSCSDNSFRRELDALGHELPVLAPQWEGYDELQTDGNRSSHSRLGRIEADSESQEDIIRNIARHLAQVGDSMDRSIPPGLVNGLALQLRNTSRSEEDRNRDLATALEQLLQAYPRDMEKEKTMLVLALLLAKKVASHTPSLLRDVFHTTVNFINQNLRTYVRSLARNGMD

SEQ ID NO: 5074 - protein, 195 aa, Homo sapiens; identical to SEQ ID NO: 5073

SEQ ID NO: 5075 - protein, 450 aa, Homo sapiens
MEEPQKSYVNTMDLERDEPLKSTGPQISVSEFSCHCCYDILVNPTTLNCGHSFCRHCLALWWASSKKTECPECREKWEGFPKVSILLRDAIEKLFPDAIRLRFEDIQQNNDIVQSLAAFQKYGNDQIPLAPNTGRANQQMGGGFFSGVLTALTGVAVVLLVYHWSSRESEHDLLVHKAVAKWTAEEVVLWLEQLGPWASLYRERFLSERVNGRLLLTLTEEEFSKTPYTIENSSHRRAILMELERVKALGVKPPQNLWEYKAVNPGRSLFLLYALKSSPRLSLLYLYLFDYTDTFLPFIHTICPLQEDSSGEDIVTKLLDLKEPTWKQWREFLVKYSFLPYQLIAEFAWDWLEVHYWTSRFLIINAMLLSVLELFSFWRIWSRSELKTVPQRMWSHFWKVSTQGLFVAMFWPLIPQFVCNCLFYWALYFNPIINIDLVVKELRRLETQVL

SEQ ID NO: 5076 - protein, 322 aa, Homo sapiens
MVGIFKENRMSRMQRKMGRFPQSQYSPQVVLLVYHWSSRESEHDLLVHKAVAKWTAEEVVLWLEQLGPWASLYRERFLSERVNGRLLLTLTEEEFSKTPYTIENSSHRRAILMELERVKALGVKPPQNLWEYKAVNPGRSLFLLYALKSSPRLSLLYLYLFDYTDTFLPFIHTICPLQEDSSGEDIVTKLLDLKEPTWKQWREFLVKYSFLPYQLIAEFAWDWLEVHYWTSRFLIINAMLLSVLELFSFWRIWSRSELKTVPQRMWSHFWKVSTQGLFVAMFWPLIPQFVCNCLFYWALYFNPIINIDLVVKELRRLETQVL

SEQ ID NO: 5077 - protein, 1417 aa, Homo sapiens
MAAVPQNNLQEQLERHSARTLNNKLSLSKPKFSGFTFKKKTSSDNNVSVTNVSVAKTPVLRNKDVNVTEDFSFSEPLPNTTNQQRVKDFFKNAPAGQETQRGGSKSLLPDFLQTPKEVVCTTQNTPTVKKSRDTALKKLEFSSSPDSLSTINDWDDMDDFDTSETSKSFVTPPQSHFVRVSTAQKSKKGKRNFFKAQLYTTNTVKTDLPPPSSESEQIDLTEEQKDDSEWLSSDVICIDDGPIAEVHINEDAQESDSLKTHLEDERDNSEKKKNLEEAELHSTEKVPCIEFDDDDYDTDFVPPSPEEIISASSSSSKCLSTLKDLDTSDRKEDVLSTSKDLLSKPEKMSMQELNPETSTDCDARQISLQQQLIHVMEHICKLIDTIPDDKLKLLDCGNELLQQRNIRRKLLTEVDFNKSDASLLGSLWRYRPDSLDGPMEGDSCPTGNSMKELNFSHLPSNSVSPGDCLLTTTLGKTGFSATRKNLFERPLFNTHLQKSFVSSNWAETPRLGKKNESSYFPGNVLTSTAVKDQNKHTASINDLERETQPSYDIDNFDIDDFDDDDDWEDIMHNLAASKSSTAAYQPIKEGRPIKSVSERLSSAKTDCLPVSSTAQNINFSESIQNYTDKSAQNLASRNLKHERFQSLSFPHTKEMMKIFHKKFGLHNFRTNQLEAINAALLGEDCFILMPTGGGKSLCYQLPACVSPGVTVVISPLRSLIVDQVQKLTSLDIPATYLTGDKTDSEATNIYLQLSKKDPIIKLLYVTPEKICASNRLISTLENLYERKLLARFVIDEAHCVSQWGHDFRQDYKRMNMLRQKFPSVPVMALTATANPRVQKDILTQLKILRPQVFSMSFNRHNLKYYVLPKKPKKVAFDCLEWIRKHHPYDSGIIYCLSRRECDTMADTLQRDGLAALAYHAGLSDSARDEVQQKWINQDGCQVICATIAFGMGIDKPDVRFVIHASLPKSVEGYYQESGRAGRDGEISHCLLFYTYHDVTRLKRLIMMEKDGNHHTRETHFNNLYSMVHYCENITECRRIQLLAYFGENGFNPDFCKKHPDVSCDNCCKTKDYKTRDVTDDVKSIVRFVQEHSSSQGMRNIKHVGPSGRFTMNMLVDIFLGSKSAKIQSGIFGKGSAYSRHNAERLFKKLILDKILDEDLYINANDQAIAYVMLGNKAQTVLNGNLKVDFMETENSSSVKKQKALVAKVSQREEMVKKCLGELTEVCKSLGKVFGVHYFNIFNTVTLKKLAESLSSDPEVLLQIDGVTEDKLEKYGAEVISVLQKYSEWTSPAEDSSPGISLSSSRGPGRSAAEELDEEIPVSSHYFASKTRNERKRKKMPASQRSKRRKTASSGSKAKGGSATCRKISSKTKSSSIIGSSSASHTSQATSGANSKLGIMAPPKPINRPFLKPSYAFS

SEQ ID NO: 5078 - protein, 1047 aa, Homo sapiens
MSMQELNPETSTDCDARQISLQQQLIHVMEHICKLIDTIPDDKLKLLDCGNELLQQRNIRRKLLTEVDFNKSDASLLGSLWRYRPDSLDGPMEGDSCPTGNSMKELNFSHLPSNSVSPGDCLLTTTLGKTGFSATRKNLFERPLFNTHLQKSFVSSNWAETPRLGKKNESSYFPGNVLTSTAVKDQNKHTASINDLERETQPSYDIDNFDIDDFDDDDDWEDIMHNLAASKSSTAAYQPIKEGRPIKSVSERLSSAKTDCLPVSSTAQNINFSESIQNYTDKSAQNLASRNLKHERFQSLSFPHTKEMMKIFHKKFGLHNFRTNQLEAINAALLGEDCFILMPTGGGKSLCYQLPACVSPGVTVVISPLRSLIVDQVQKLTSLDIPATYLTGDKTDSEATNIYLQLSKKDPIIKLLYVTPEKICASNRLISTLENLYERKLLARFVIDEAHCVSQWGHDFRQDYKRMNMLRQKFPSVPVMALTATANPRVQKDILTQLKILRPQVFSMSFNRHNLKYYVLPKKPKKVAFDCLEWIRKHHPYDSGIIYCLSRRECDTMADTLQKWINQDGCQVICATIAFGMGIDKPDVRFVIHASLPKSVEGYYQESGRAGRDGEISHCLLFYTYHDVTRLKRLIMMEKDGNHHTRETHFNNLYSMVHYCENITECRRIQLLAYFGENGFNPDFCKKHPDVSCDNCCKTKDYKTRDVTDDVKSIVRFVQEHSSSQGMRNIKHVGPSGRFTMNMLVDIFLGSKSAKIQSGIFGKGSAYSRHNAERLFKKLILDKILDEDLYINANDQAIAYVMLGNKAQTVLNGNLKVDFMETENSSSVKKQKALVAKVSQREEMVKKCLGELTEVCKSLGKVFGVHYFNIFNTVTLKKLAESLSSDPEVLLQIDGVTEDKLEKYGAEVISVLQKYSEWTSPAEDSSPGISLSSSRGPGRSAAEELDEEIPVSSHYFASKTRNERKRKKMPASQRSKRRKTASSGSKAKGGSATCRKISSKTKSSSIIGSSSASHTSQATSGANSKLGIMAPPKPINRPFLKPSYAFS

SEQ ID NO: 5079 - protein, 519 aa, Homo sapiens
MNMLRQKFPSVPVMALTATANPRVQKDILTQLKILRPQVFSMSFNRHNLKYYVLPKKPKKVAFDCLEWIRKHHPYDSGIIYCLSRRECDTMADTLQRDGLAALAYHAGLSDSARDEVQQKWINQDGCQVICATIAFGMGIDKPDVRFVIHASLPKSVEGYYQESGRAGRDGEISHCLLFYTYHDVTRLKRLIMMEKDGNHHTRETHFNNLYSMVHYCENITECRRIQLLAYFGENGFNPDFCKKHPDVSCDNCCKTKDYKTRDVTDDVKSIVRFVQEHSSSQGMRNIKHVGPSGRFTMNMLVDIFLGSKSAKIQSGIFGKGSAYSRHNAERLFKKLILDKILDEDLYINANDQAIAYVMLGNKAQTVLNGNLKVDFMETENSSSVKKQKALVAKVSQREEMVKKCLGELTEVCKSLGKVFGVHYFNIFNTVTLKKLAESLSSDPEVLLQIDGVTEDKLEKYGAEVISVLQKYSEWTSPAEDSSPGISLSSSRGPGRSAAEELDEEIPVSSHYFASKTRN

SEQ ID NO: 5080 - protein, 326 aa, Homo sapiens
MHRTTRIKITELNPHLMCVLCGGYFIDATTIIECLHSFCKTCIVRYLETSKYCPICDVQVHKTRPLLNIRSDKTLQDIVYKLVPGLFKNEMKRRRDFYAAHPSADAANGSNEDRGEVADEDKRIITDDEIISLSIEFFDQNRLDRKVNKDKEKSKEEVNDKRYLRCPAAMTVMHLRKFLRSKMDIPNTFQIDVMYEEEPLKDYYTLMDIAYIYTWRRNGPLPLKYRVRPTCKRMKISHQRDGLTNAGELESDSGSDKANSPAGGIPSTSSCLPSPSTPVQSPHPQFPHISSTMNGTSNSPSGNHQSSFANRPRKSSVNGSSATSSG

SEQ ID NO: 5081 - protein, 238 aa, Homo sapiens
MCVLCGGYFIDATTIIECLHSFCKTCIVRYLETSKYCPICDVQVHKTRPLLNIRLDRKVNKDKEKSKEEVNDKRYLRCPAAMTVMHLRKFLRSKMDIPNTFQIDVMYEEEPLKDYYTLMDIAYIYTWRRNGPLPLKYRVRPTCKRMKISHQRDGLTNAGELESDSGSDKANSPAGGIPSTSSCLPSPSTPVQSPHPQFPHISSTMNGTSNSPSGNHQSSFANRPRKSSVNGSSATSSG

SEQ ID NO: 5082 - protein, 105 aa, Homo sapiens
MHRTTRIKITELNPHLMCVLCGGYFIDATTIIECLHSFCKTCIVRYLETSKYCPICDVQVHKTRPLLNIRSDKTLQDIVYKLVPGLFKNEMKRRRDFYAAHPSAD

SEQ ID NO: 5083 - protein, 207 aa, Homo sapiens
MHRTTRIKITELNPHLMCVLCGGYFIDATTIIECLHSFCKTCIVRYLETSKYCPICDVQVHKTRPLLNIRSDKTLQDIVYKLVPGLFKNEMKRRRDFYAAHPSADAANGSNEDRGEVADEDKRIITDDEIISLSIEFFDQNRLDRKVNKDKEKSKEEVNDKRYLRCPAAMTVMHLRKFLRSKMDIPNTFQIDVMYEEEPLKDYYTLM

SEQ ID NO: 5084 - protein, 150 aa, Homo sapiens
MHRTTRIKITELNPHLMCVLCGGYFIDATTIIECLHSFCKTCIVRYLETSKYCPICDVQVHKTRPLLNIRSDKTLQDIVYKLVPGLFKNEMKRRRDFYAAHPSADAANGSNEDRGEVADEDKRIITDDEIISLSIEFFDQNRLDRKVNKD

SEQ ID NO: 5085 - protein, 184 aa, Homo sapiens
YFIDATTIIECLHSFCKTCIVRYLETSKYCPICDVQVHKTRPLLNIRLDRKVNKDKEKSKEEVNDKRYLRCPAAMTVMHLRKFLRSKMDIPNTFQIDVMYEEEPLKDYYTLMDIAYIYTWRRNGPLPLKYRVRPTCKRMKISHQRDGLTNAGELESDSGSDKANSPAGGIPSTSSCLPSPSTPV

SEQ ID NO: 5086 - protein, 92 aa, Homo sapiens
MHRTTRIKITELNPHLMCVLCGGYFIDATTIIECLHSFCKTCIVRYLETSKYCPICDVQVHKTRPLLNIRSDKTLQDIVYKLVPGLFTANGS

SEQ ID NO: 5087 - protein, 730 aa, Homo sapiens
MPGVARLPLLLGLLLLPRPGRPLDLADYTYDLAEEDDSEPLNYKDPCKAAAFLGDIALDEEDLRAFQVQQAVDLRRHTARKSSIKAAVPGNTSTPSCQSTNGQPQRGACGRWRGRSRSRRAATSRPERVWPDGVIPFVIGGNFTGSQRAVFRQAMRHWEKHTCVTFLERTDEDSYIVFTYRPCGCCSYVGRRGGGPQAISIGKNCDKFGIVVHELGHVVGFWHEHTRPDRDRHVSIVRENIQPGQEYNFLKMEPQEVESLGETYDFDSIMHYARNTFSRGIFLDTIVPKYEVNGVKPPIGQRTRLSKGDIAQARKLYKCPACGETLQDSTGNFSSPEYPNGYSAHMHCVWRISVTPGEKIILNFTSLDLYRSRLCWYDYVEVRDGFWRKAPLRGRFCGSKLPEPIVSTDSRLWVEFRSSSNWVGKGFFAVYEAICGGDVKKDYGHIQSPNYPDDYRPSKVCIWRIQVSEGFHVGLTFQSFEIERHDSCAYDYLEVRDGHSESSTLIGRYCGYEKPDDIKSTSSRLWLKFVSDGSINKAGFAVNFFKEVDECSRPNRGGCEQRCLNTLGSYKCSCDPGYELAPDKRRCEAACGGFLTKLNGSITSPGWPKEYPPNKNCIWQLVAPTQYRISLQFDFFETEGNDVCKYDFVEVRSGLTADSKLHGKFCGSEKPEVITSQYNNMRVEFKSDNTVSKKGFKAHFFSEKRPALQPPRGRPHQLKFRVQKRNRTPQ

SEQ ID NO: 5088 - protein, 986 aa, Homo sapiens
MPGVARLPLLLGLLLLPRPGRPLDLADYTYDLAEEDDSEPLNYKDPCKAAAFLGDIALDEEDLRAFQVQQAVDLRRHTARKSSIKAAVPGNTSTPSCQSTNGQPQRGACGRWRGRSRSRRAATSRPERVWPDGVIPFVIGGNFTGSQRAVFRQAMRHWEKHTCVTFLERTDEDSYIVFTYRPCGCCSYVGRRGGGPQAISIGKNCDKFGIVVHELGHVVGFWHEHTRPDRDRHVSIVRENIQPGQEYNFLKMEPQEVESLGETYDFDSIMHYARNTFSRGIFLDTIVPKYEVNGVKPPIGQRTRLSKGDIAQARKLYKCPACGETLQDSTGNFSSPEYPNGYSAHMHCVWRISVTPGEKIILNFTSLDLYRSRLCWYDYVEVRDGFWRKAPLRGRFCGSKLPEPIVSTDSRLWVEFRSSSNWVGKGFFAVYEAICGGDVKKDYGHIQSPNYPDDYRPSKVCIWRIQVSEGFHVGLTFQSFEIERHDSCAYDYLEVRDGHSESSTLIGRYCGYEKPDDIKSTSSRLWLKFVSDGSINKAGFAVNFFKEVDECSRPNRGGCEQRCLNTLGSYKCSCDPGYELAPDKRRCEAACGGFLTKLNGSITSPGWPKEYPPNKNCIWQLVAPTQYRISLQFDFFETEGNDVCKYDFVEVRSGLTADSKLHGKFCGSEKPEVITSQYNNMRVEFKSDNTVSKKGFKAHFFSDKDECSKDNGGCQQDCVNTFGSYECQCRSGFVLHDNKHDCKEAGCDHKVTSTSGTITSPNWPDKYPSKKECTWAISSTPGHRVKLTFMEMDIESQPECAYDHLEVFDGRDAKAPVLGRFCGSKKPEPVLATGSRMFLRFYSDNSVQRKGFQASHATECGGQVRADVKTKDLYSHAQFGDNNYPGGVDCEWVIVAEEGYGVELVFQTFEVEEETDCGYDYMELFDGYDSTAPRLGRYCGSGPPEEVYSAGDSVLVKFHSDDTITKKGFHLRYTSTKFQDTLHSRK

SEQ ID NO: 5089 - protein, 302 aa, Homo sapiens
MPGVARLPLLLGLLLLPRPGRPLDLADYTYDLAEEDDSEPLNYKDPCKAAAFLGDIALDEEDLRAFQVQQAVDLRRHTARKSSIKAAVPGNTSTPSCQSTNGQPQRGACGRWRGRSRSRRAATSRPERVWPDGVIPFVIGGNFTGSQRAVFRQAMRHWEKHTCVTFLERTDEDSYIVFTYRPCGCCSYVGRRGGGPQAISIGKNCDKFGIVVHELGHVVGFWHEHTRPDRDRHVSIVRENIQPGVLHSSLLLLSCGSRNGASFPCSLESSIHQALCWTGLFLRPSPFPRLPLAAPRTLRAGV

SEQ ID NO: 5090 - protein, 622 aa, Homo sapiens
MPGVARLPLLLGLLLLPRPGRPLDLADYTYDLAEEDDSEPLNYKDPCKAAAFLGDIALDEEDLRAFQVQQAVDLRRHTARKSSIKAAVPGNTSTPSCQSTNGQPQRGACGRWRGRSRSRRAATSRPERVWPDGVIPFVIGGNFTGSQRAVFRQAMRHWEKHTCVTFLERTDEDSYIVFTYRPCGCCSYVGRRGGGPQAISIGKNCDKFGIVVHELGHVVGFWHEHTRPDRDRHVSIVRENIQPGQEYNFLKMEPQEVESLGETYDFDSIMHYARNTFSRGIFLDTIVPKYEVNGVKPPIGQRTRLSKGDIAQARKLYKCPACGETLQDSTGNFSSPEYPNGYSAHMHCVWRISVTPGEKIILNFTSLDLYRSRLCWYDYVEVRDGFWRKAPLRGRFCGSKLPEPIVSTDSRLWVEFRSSSNWVGKGFFAVYEAICGGDVKKDYGHIQSPNYPDDYRPSKVCIWRIQVSEGFHVGLTFQSFEIERHDSCAYDYLEVRDGHSESSTLIGRYCGYEKPDDIKSTSSRLWLKFVSDGSINKAGFAVNFFKEVDECSRPNRGGCEQRCLNTLGSYKCSCDPGYELAPDKRRCEGCYDLQVGKPLLWDRHCFRLSTHGPEMLGTALRG

SEQ ID NO: 5091 - protein, 823 aa, Homo sapiens
MPGVARLPLLLGLLLLPRPGRPLDLADYTYDLAEEDDSEPLNYKDPCKAAAFLGDIALDEEDLRAFQVQQAVDLRRHTARKSSIKAAVPGNTSTPSCQSTNGQPQRGACGRWRGRSRSRRAATSRPERVWPDGVIPFVIGGNFTGSQRAVFRQAMRHWEKHTCVTFLERTDEDSYIVFTYRPCGCCSYVGRRGGGPQAISIGKNCDKFGIVVHELGHVVGFWHEHTRPDRDRHVSIVRENIQPGQEYNFLKMEPQEVESLGETYDFDSIMHYARNTFSRGIFLDTIVPKYEVNGVKPPIGQRTRLSKGDIAQARKLYKCPACGETLQDSTGNFSSPEYPNGYSAHMHCVWRISVTPGEKIILNFTSLDLYRSRLCWYDYVEVRDGFWRKAPLRGRFCGSKLPEPIVSTDSRLWVEFRSSSNWVGKGFFAVYEAICGGDVKKDYGHIQSPNYPDDYRPSKVCIWRIQVSEGFHVGLTFQSFEIERHDSCAYDYLEVRDGHSESSTLIGRYCGYEKPDDIKSTSSRLWLKFVSDGSINKAGFAVNFFKEVDECSRPNRGGCEQRCLNTLGSYKCSCDPGYELAPDKRRCEAACGGFLTKLNGSITSPGWPKEYPPNKNCIWQLVAPTQYRISLQFDFFETEGNDVCKYDFVEVRSGLTADSKLHGKFCGSEKPEVITSQYNNMRVEFKSDNTVSKKGFKAHFFSVLEGAGDRHSHLSGLELLLCPHALVDTVPAPPSALHGDTHAHTHTHVHTHCPIAQETCRGPPLGASRLSPQGPGHLTLAPQEGSYLDFWDTHRGDPKPRRRRKSLKTFSLTPATFRGIWAL

SEQ ID NO: 5092 - protein, 730 aa, Homo sapiens; identical to SEQ ID NO: 5087

SEQ ID NO: 5093 - protein, 502 aa, Homo sapiens
MLLRSAGKLNVGTKKEDGESTAPTPRPKVLRCKCHHHCPEDSVNNICSTDGYCFTMIEEDDSGLPVVTSGCLGLEGSDFQCRDTPIPHQRRSIECCTERNECNKDLHPTLPPLKNRDFVDGPIHHRALLISVTVCSLLLVLIILFCYFRYKRQETRPRYSIGLEQDETYIPPGESLRDLIEQSQSSGSGSGLPLLVQRTIAKQIQMVKQIGKGRYGEVWMGKWRGEKVAVKVFFTTEEASWFRETEIYQTVLMRHENILGFIAADIKGTGSWTQLYLITDYHENGSLYDYLKSTTLDAKSMLKLAYSSVSGLCHLHTEIFSTQGKPAIAHRDLKSKNILVKKNGTCCIADLGLAVKFISDTNEVDIPPNTRVGTKRYMPPEVLDESLNRNHFQSYIMADMYSFGLILWEVARRCVSGGIVEEYQLPYHDLVPSDPSYEDMREIVCIKKLRPSFPNRWSSDECLRQMGKLMTECWAHNPASRLTALRVKKTLAKMSESQDIKL

SEQ ID NO: 5094 - protein, 502 aa, Homo sapiens; identical to SEQ ID NO: 5093

SEQ ID NO: 5095 - protein, 532 aa, Homo sapiens
MGWLEELNWQLHIFLLILLSMHTRANFLDNMLLRSAGKLNVGTKKEDGESTAPTPRPKVLRCKCHHHCPEDSVNNICSTDGYCFTMIEEDDSGLPVVTSGCLGLEGSDFQCRDTPIPHQRRSIECCTERNECNKDLHPTLPPLKNRDFVDGPIHHRALLISVTVCSLLLVLIILFCYFRYKRQETRPRYSIGLEQDETYIPPGESLRDLIEQSQSSGSGSGLPLLVQRTIAKQIQMVKQIGKGRYGEVWMGKWRGEKVAVKVFFTTEEASWFRETEIYQTVLMRHENILGFIAADIKGTGSWTQLYLITDYHENGSLYDYLKSTTLDAKSMLKLAYSSVSGLCHLHTEIFSTQGKPAIAHRDLKSKNILVKKNGTCCIADLGLAVKFISDTNEVDIPPNTRVGTKRYMPPEVLDESLNRNHFQSYIMADMYSFGLILWEVARRCVSGGIVEEYQLPYHDLVPSDPSYEDMREIVCIKKLRPSFPNRWSSDECLRQMGKLMTECWAHNPASRLTALRVKKTLAKMSESQDIKL

SEQ ID NO: 5096 - protein, 114 aa, Homo sapiens
MLLRSAGKLNVGTKKEDGESTAPTPRPKVLRCKCHHHCPEDSVNNICSTDGYCFTMIEEDDSGLPVVTSGCLGLEGSDFQCRVRTLPFLIKEDQLNAAQKGTNVIKTYTLHCLH

SEQ ID NO: 5097 - protein, 125 aa, Homo sapiens
MLLRSAGKLNVGTKKEDGESTAPTPRPKVLRCKCHHHCPEDSVNNICSTDGYCFTMIEEDDSGLPVVTSGCLGLEGSDFQCRDTPIPHQRRSIECCTERNECNKDLHPTLPPLKNRDFVDGPIHH

SEQ ID NO: 5098 - protein, 502 aa, Homo sapiens; identical to SEQ ID NO: 5093

SEQ ID NO: 5099 - protein, 502 aa, Homo sapiens; identical to SEQ ID NO: 5093

SEQ ID NO: 5100 - protein, 502 aa, Homo sapiens; identical to SEQ ID NO: 5093

SEQ ID NO: 5101 - protein, 1584 aa, Homo sapiens
MRGQAAAPGPVWILAPLLLLLLLLGRRARAAAGADAGPGPEPCATLVQGKFFGYFSAAAVFPANASRCSWTLRNPDPRRYTLYMKVAKAPVPCSGPGRVRTYQFDSFLESTRTYLGVESFDEVLRLCDPSAPLAFLQASKQFLQMRRQQPPQHDGLRPRAGPPGPTDDFSVEYLVVGNRNPSRAACQMLCRWLDACLAGSRSSHPCGIMQTPCACLGGEAGGPAAGPLAPRGDVCLRDAVAGGPENCLTSLTQDRGGHGATGGWKLWSLWGECTRDCGGGLQTRTRTCLPAPGVEGGGCEGVLEEGRQCNREACGPAGRTSSRSQSLRSTDARRREELGDELQQFGFPAPQTGDPAAEEWSPWSVCSSTCGEGWQTRTRFCVSSSYSTQCSGPLREQRLCNNSAVCPVHGAWDEWSPWSLCSSTCGRGFRDRTRTCRPPQFGGNPCEGPEKQTKFCNIALCPGRAVDGNWNEWSSWSACSASCSQGRQQRTRECNGPSYGGAECQGHWVETRDCFLQQCPVDGKWQAWASWGSCSVTCGAGSQRRERVCSGPFFGGAACQGPQDEYRQCGTQRCPEPHEICDEDNFGAVIWKETPAGEVAAVRCPRNATGLILRRCELDEEGIAYWEPPTYIRCVSIDYRNIQMMTREHLAKAQRGLPGEGVSEVIQTLVEISQDGTSYSGDLLSTIDVLRNMTEIFRRAYYSPTPGDVQNFVQILSNLLAEENRDKWEEAQLAGPNAKELFRLVEDFVDVIGFRMKDLRDAYQVTDNLVLSIHKLPASGATDISFPMKGWRATGDWAKVPEDRVTVSKSVFSTGLTEADEASVFVVGTVLYRNLGSFLALQRNTTVLNSKVISVTVKPPPRSLRTPLEIEFAHMYNGTTNQTCILWDETDVPSSSAPPQLGPWSWRGCRTVPLDALRTRCLCDRLSTFAILAQLSADANMEKATLPSVTLIVGCGVSSLTLLMLVIIYVSVWRYIRSERSVILINFCLSIISSNALILIGQTQTRNKVVCTLVAAFLHFFFLSSFCWVLTEAWQSYMAVTGHLRNRLIRKRFLCLGWGLPALVVAISVGFTKAKGYSTMNYCWLSLEGGLLYAFVGPAAAVVLVNMVIGILVFNKLVSKDGITDKKLKERAGASLWSSCVVLPLLALTWMSAVLAVTDRRSALFQILFAVFDSLEGFVIVMVHCILRREVQDAVKCRVVDRQEEGNGDSGGSFQNGHAQLMTDFEKDVDLACRSVLNKDIAACRTATITGTLKRPSLPEEEKLKLAHAKGPPTNFNSLPANVSKLHLHGSPRYPGGPLPDFPNHSLTLKRDKAPKSSFVGDGDIFKKLDSELSRAQEKALDTSYVILPTATATLRPKPKEEPKYSIHIDQMPQTRLIHLSTAPEASLPARSPPSRQPPSGGPPEAPPAQPPPPPPPPPPPPQQPLPPPPNLEPAPPSLGDPGEPAAHPGPSTGPSTKNENVATLSVSSLERRKSRYAELDFEKIMHTRKRHQDMFQDLNRKLQHAAEKDKEVLGPDSKPEKQQTPNKRPWESLRKAHGTPTWVKKELEPLQPSPLELRSVEWERSGATIPLVGQDIIDLQTEV

SEQ ID NO: 5102 - protein, 1584 aa, Homo sapiens; identical to SEQ ID NO: 5101

SEQ ID NO: 5103 - protein, 777 aa, Homo sapiens
MPDNRQPRNRQPRIRSGNEPRSAPAMEPDGRGAWAHSRAALDRLEKLLRCSRCTNILREPVCLGGCEHIFCSNCVSDCIGTGCPVCYTPAWIQDLKINRQLDSMIQLCSKLRNLLHDNELSDLKEDKPRKSLFNDAGNKKNSIKMWFSPRSKKVRYVVSKASVQTQPAIKKDASAQQDSYEFVSPSPPADVSERAKKASARSGKKQKKKTLAEINQKWNLEAEKEDGEFDSKEESKQKLVSFCSQPSVISSPQINGEIDLLASGSLTESECFGSLTEVSLPLAEQIESPDTKSRNEVVTPEKVCKNYLTSKKSLPLENNGKRGHHNRLSSPISKRCRTSILSTSGDFVKQTVPSENIPLPECSSPPSCKRKVGGTSGRKNSNMSDEFISLSPGTPPSTLSSSSYRRVMSSPSAMKLLPNMAVKRNHRGETLLHIASIKGDIPSVEYLLQNGSDPNVKDHAGWTPLHEACNHGHLKVVELLLQHKALVNTTGYQNDSPLHDAAKNGHVDIVKLLLSYGASRNAVNIFGLRPVDYTDDESMKSLLLLPEKNESSSASHCSVMNTGQRRDGPLVLIGSGLSSEQQKMLSELAVILKAKKYTEFDSTVTHVVVPGDAVQSTLKCMLGILNGCWILKFEWVKACLRRKVCEQEEKYEIPEGPRRSRLNREQLLPKLFDGCYFYLWGTFKHHPKDNLIKLVTAGGGQILSRKPKPDSDVTQTINTVAYHARPDSDQRFCTQYIIYEDLCNYHPERVRQGKVWKAPSSWFIDCVMSFELLPLDS

SEQ ID NO: 5104 - protein, 567 aa, Homo sapiens
MWFSPRSKKVRYVVSKASVQTQPAIKKDASAQQDSYEFVSPSPPADVSERAKKASARSGKKQKKKTLAEINQKWNLEAEKEDGEFDSKEESKQKLVSFCSQPSVISSPQINGEIDLLASGSLTESECFGSLTEVSLPLAEQIESPDTKSRNEVVTPEKVCKNYLTSKKSLPLENNGKRGHHNRLSSPISKRCRTSILSTSGDFVKQTVPSENIPLPECSSPPSCKRKVGGTSGRKNSNMSDEFISLSPGTPPSTLSSSSYRRVMSSPSAMKLLPNMAVKRNHRGETLLHIASIKGDIPSVEYLLQNGSDPNVKDHAGWTPLHEACNHGHLKVVELLLQHKALVNTTGYQNDSPLHDAAKNGHVDIVKLLLSYGASRNAVNIFGLRPVDYTDDESMKSLLLLPEKNESSSASHCSVMNTGQRRDGPLVLIGSGLSSEQQKMLSELAVILKAKKYTEFDSTVTHVVVPGDAVQSTLKCMLGILNGCWILKFEWVKACLRRKVCEQEEKYEIPEGPRRSRLNREHCQSCLMDATSICGEPSNTIQRTTLLSSSLQVGARSSVESPSQTVT

SEQ ID NO: 5105 - protein, 1249 aa, Homo sapiens
MSSMWSEYTIGGVKIYFPYKAYPSQLAMMNSILRGLNSKQHCLLESPTGSGKSLALLCSALAWQQSLSGKPADEGVSEKAEVQLSCCCACHSKDFTNNDMNQGTSRHFNYPSTPPSERNGTSSTCQDSPEKTTLAAKLSAKKQASIYRDENDDFQVEKKRIRPLETTQQIRKRHCFGTEVHNLDAKVDSGKTVKLNSPLEKINSFSPQKPPGHCSRCCCSTKQGNSQESSNTIKKDHTGKSKIPKIYFGTRTHKQIAQITRELRRTAYSGVPMTILSSRDHTCVHPEVVGNFNRNEKCMELLDGKNGKSCYFYHGVHKISDQHTLQTFQGMCKAWDIEELVSLGKKLKACPYYTARELIQDADIIFCPYNYLLDAQIRESMDLNLKEQVVILDEAHNIEDCARESASYSVTEVQLRFARDELDSMVNNNIRKKDHEPLRAVCCSLINWLEANAEYLVERDYESACKIWSGNEMLLTLHKMGITTATFPILQGHFSAVLQKEEKISPIYGKEEAREVPVISASTQIMLKGLFMVLDYLFRQNSRFADDYKIAIQQTYSWTNQIDISDKNGLLVLPKNKKRSRQKTAVHVLNFWCLNPAVAFSDINGKVQTIVLTSGTLSPMKSFSSELGVTFTIQLEANHIIKNSQVWVGTIGSGPKGRNLCATFQNTETFEFQDEVGALLLSVCQTVSQGILCFLPSYKLLEKLKERWLSTGLWHNLELVKTVIVEPQGGEKTNFDELLQVYYDAIKYKGEKDGALLVAVCRGKVSEGLDFSDDNARAVITIGIPFPNVKDLQVELKRQYNDHHSKLRGLLPGRQWYEIQAYRALNQALGRCIRHRNDWGALILVDDRFRNNPSRYISGLSKWVRQQIQHHSTFESALESLAEFSKKHQKVLNVSIKDRTNIQDNESTLEVTSLKYSTSPYLLEAASHLSPENFVEDEAKICVQELQCPKIITKNSPLPSSIISRKEKNDPVFLEEAGKAEKIVISRSTSPTFNKQTKRVSWSSFNSLGQYFTGKIPKATPELGSSENSASSPPRFKTEKMESKTVLPFTDKCESSNLTVNTSFGSCPQSETIISSLKIDATLTRKNHSEHPLCSEEALDPDIELSLVSEEDKQSTSNRDFETEAEDESIYFTPELYDPEDTDEEKNDLAETDRGNRLANNSDCILAKDLFEIRTIKEVDSAREVKAEDCIDTKLNGILHIEESKIDDIDGNVKTTWINELELGKTHEIEIKNFKPSPSKNKGMFPGFK

SEQ ID NO: 5106 - protein, 314 aa, Homo sapiens
MASRSKRRAVESGVPQPPDPPVQRDEEEEKEVENEDEDDDDSDKEKDEEDEVIDEEVNIEFEAYSLSDNDYDGIKKLLQQLFLKAPVNTAELTDLLIQQNHIGSVIKQTDVSEDSNDDMDEDEVFGFISLLNLTERKGTQCVEQIQELVLRFCEKNCEKSMVEQLDKFLNDTTKPVGLLLSERFINVPPQIALPMYQQLQKELAGAHRTNKPCGKCYFYLLISKTFVEAGKNNSKKKPSNKKKAALMFANAEEEFFYEKAILKFNYSVQEESDTCLGGKWSFDDVPMTPLRTVMLIPGDKMNEIMDKLKEYLSV

SEQ ID NO: 5107 - protein, 292 aa, Homo sapiens
MASRSKRRAVESGVPQPPDPPVQRDEEEEKEVENEDEDDDDSDKEKDEEDEVIDEEVNIEFEAYSLSDNDYDGIKKLLQQLFLKAPVNTAELTDLLIQQNHIGSVIKQTDVSEDSNDDMDEDEVFGFISLLNLTERKGTQCVEQIQELVLRFCEKNCEKSMVEQLDKFLNDTTKPVGLLLSERFINVPPQIALPMYQQLQKELAGAHRTNKPCGKCYFYLLISKTFVEAGKNNSKKKPSNKKKAALMFANAEEEFFYEEQGKPEVLGGPDTRRGLEPVPIQHNGWSVPPVLE

SEQ ID NO: 5108 - protein, 322 aa, Homo sapiens
MASRSKRRAVESGVPQPPDPPVQRDEEEEKEVENEDEDDDDSDKEKDEEDEVIDEEVNIEFEAYSLSDNDYDGIKKLLQQLFLKAPVNTAELTDLLIQQNHIGSVIKQTDVSEDSNDDMDEDEVFGFISLLNLTERKGTQCVEQIQELVLRFCEKNCEKSMVEQLDKFLNDTTKPVGLLLSERFINVPPQIALPMYQQLQKELAGAHRTNKPCGKCYFYLLISKTFVEAGKNNSKKKPSNKKKAALMFANAEEEFFYEEQGKPEVLGGPDTRRGLEPVPIQHNGGSRGQVTALVSLKAGLIQSRSTLSDFQGTFMTVGIALS

SEQ ID NO: 5109 - protein, 292 aa, Homo sapiens
MASRSKRRAVESGVPQPPDPPVQRDEEEEKEVENEDEDDDDSDKEKDEEDEVIDEEVNIEFEAYSLSDNDYDGIKKLLQQLFLKAPVNTAELTDLLIQQNHIGSVIKQTDVSEDSNDDMDEDEVFGFISLLNLTERKGTQCVEQIQELVLRFCEKNCEKSMVEQLDKFLNDTTKPVGLLLSERFINVPPQIALPMYQQLQKELAGAHRTNKPCGKCYFYLLISKTFVEAGKNNSKKKPSNKKKAALMFANAEEEFFYEKAILKFNYSVQEESDTCLGGKWSFDDWSVPPVLE

SEQ ID NO: 5110 - protein, 262 aa, Homo sapiens
MASRSKRRAVESGVPQPPDPPVQRDEEEEKEVENEDEDDDDSDKEKDEEDEVIDEEVNIEFEAYSLSDNDYDGIKKLLQQLFLKAPVNTAELTDLLIQQNHIGSVIKGTQCVEQIQELVLRFCEKNCEKSMVEQLDKFLNDTTKPVGLLLSERFINVPPQIALPMYQQLQKELAGAHRTNKPCGKCYFYLLISKTFVEAGKNNSKKKPSNKKKAALMFANAEEEFFYEEQGKPEVLGGPDTRRGLEPVPIQHNGWSVPPVLE

SEQ ID NO: 5111 - protein, 465 aa, Homo sapiens
MVDPVGFAEAWKAQFPDSEPPRMELRSVGDIEQELERCKASIRRLEQEVNQERFRMIYLQTLLAKEKKSYDRQRWGFRRAAQAPDGASEPRASASRPQPAPADGADPPPAEEPEARPDGEGSPGKARPGTARRPGAAASGERDDRGPPASVAALRSNFERIRKGHGQPGADAEKPFYVNVEFHHERGLVKVNDKEVSDRISSLGSQAMQMERKKSQHGAGSSVGDASRPPYRGRSSESSCGVDGDYEDAELNPRFLKDNLIDANGGSRPPWPPLEYQPYQSIYVGGMMEGEGKGPLLRSQSTSEQEKRLTWPRRSYSPRSFEDCGGGYTPDCSSNENLTSSEEDFSSGQSSRVSPSPTTYRMFRDKSRSPSQNSQQSFDSSSPPTPQCHKRHRHCPVVVSEATIVGVRKTGQIWPNDGEGAFHGEHPGAAEEVFQKLLPDIRGAADADQLVCETPDCPQHSADHQ

SEQ ID NO: 5112 - protein, 458 aa, Homo sapiens
MVDPVGFAEAWKAQFPDSEPPRMELRSVGDIEQELERCKASIRRLEQEVNQERFRMIYLQTLLAKEKKSYDRQRWGFRRAAQAPDGASEPRASASRPQPAPADGADPPPAEEPEARPDGEGSPGKARPGTARRPGAAASGERDDRGPPASVAALRSNFERIRKGHGQPGADAEKPFYVNVEFHHERGLVKVNDKEVSDRISSLGSQAMQMERKKSQHGAGSSVGDASRPPYRGRSSESSCGVDGDYEDAELNPRFLKDNLIDANGGSRPPWPPLEYQPYQSIYVGGMMEGEGKGPLLRSQSTSEQEKRLTWPRRSYSPRSFEDCGGGYTPDCSSNENLTSSEEDFSSGQSSRVSPSPTTYRMFRDKSRSPSQNSQQSFDSSSPPTPQCHKRHRHCPVVVSEATIVGVRKTGQIWPNDGEGAFHGDADGSFGTPPGYGCLCLPAWPSGCTAATARVTRS

SEQ ID NO: 5113 - protein, 1271 aa, Homo sapiens
MVDPVGFAEAWKAQFPDSEPPRMELRSVGDIEQELERCKASIRRLEQEVNQERFRMIYLQTLLAKEKKSYDRQRWGFRRAAQAPDGASEPRASASRPQPAPADGADPPPAEEPEARPDGEGSPGKARPGTARRPGAAASGERDDRGPPASVAALRSNFERIRKGHGQPGADAEKPFYVNVEFHHERGLVKVNDKEVSDRISSLGSQAMQMERKKSQHGAGSSVGDASRPPYRGRSSESSCGVDGDYEDAELNPRFLKDNLIDANGGSRPPWPPLEYQPYQSIYVGGMMEGEGKGPLLRSQSTSEQEKRLTWPRRSYSPRSFEDCGGGYTPDCSSNENLTSSEEDFSSGQSSRVSPSPTTYRMFRDKSRSPSQNSQQSFDSSSPPTPQCHKRHRHCPVVVSEATIVGVRKTGQIWPNDGEGAFHGDADGSFGTPPGYGCAADRAEEQRRHQDGLPYIDDSPSSSPHLSSKGRGSRDALVSGALESTKASELDLEKGLEMRKWVLSGILASEETYLSHLEALLLPMKPLKAAATTSQPVLTSQQIETIFFKVPELYEIHKEFYDGLFPRVQQWSHQQRVGDLFQKLASQLGVYRAFVDNYGVAMEMAEKCCQANAQFAEISENLRARSNKDAKDPTTKNSLETLLYKPVDRVTRSTLVLHDLLKHTPASHPDHPLLQDALRISQNFLSSINEEITPRRQSMTVKKGEHRQLLKDSFMVELVEGARKLRHVFLFTDLLLCTKLKKQSGGKTQQYDCKWYIPLTDLSFQMVDELEAVPNIPLVPDEELDALKIKISQIKNDIQREKRANKGSKATERLKKKLSEQESLLLLMSPSMAFRVHSRNGKSYTFLISSDYERAEWRENIREQQKKCFRSFSLTSVELQMLTNSCVKLQTVHSIPLTINKEDDESPGLYGFLNVIVHSATGFKQSSNLYCTLEVDSFGYFVNKAKTRVYRDTAEPNWNEEFEIELEGSQTLRILCYEKCYNKTKIPKEDGESTDRLMGKGQVQLDPQALQDRDWQRTVIAMNGIEVKLSVKFNSREFSLKRMPSRKQTGVFGVKIAVVTKRERSKVPYIVRQCVEEIERRGMEEVGIYRVSGVATDIQALKAAFDVNNKDVSVMMSEMDVNAIAGTLKLYFRELPEPLFTDEFYPNFAEGIALSDPVAKESCMLNLLLSLPEANLLTFLFLLDHLKRVAEKEAVNKMSLHNLATVFGPTLLRPSEKESKLPANPSQPITMTDSWSLEVMSQVQVLLYFLQLEAIPAPDSKRQSILFSTEV

SEQ ID NO: 5114 - protein, 936 aa, Homo sapiens
PSAPRVSTVGLLCSGAGPHLCPCAEEGTGGLESQGEIIPSRGSRKPDGVSGSRRLFSSLCKSQEGSRKECLRKHRRLGPAMPVSSPGFPGPLARSEHHLDTAALQTGQRSSAGTKMGCPTLMTRPPHRPTSAARAGAAGMRWSREPWSPLKRSELDLEKGLEMRKWVLSGILASEETYLSHLEALLLPMKPLKAAATTSQPVLTSQQIETIFFKVPELYEIHKEFYDGLFPRVQQWSHQQRVGDLFQKLASQLGVYRAFVDNYGVAMEMAEKCCQANAQFAEISENLRARSNKDAKDPTTKNSLETLLYKPVDRVTRSTLVLHDLLKHTPASHPDHPLLQDALRISQNFLSSINEEITPRRQSMTVKKGEHRQLLKDSFMVELVEGARKLRHVFLFTDLLLCTKLKKQSGGKTQQYDCKWYIPLTDLSFQMVDELEAVPNIPLVPDEELDALKIKISQIKNDIQREKRANKGSKATERLKKKLSEQESLLLLMSPSMAFRVHSRNGKSYTFLISSDYERAEWRENIREQQKKCFRSFSLTSVELQMLTNSCVKLQTVHSIPLTINKEDDESPGLYGFLNVIVHSATGFKQSSNLYCTLEVDSFGYFVNKAKTRVYRDTAEPNWNEEFEIELEGSQTLRILCYEKCYNKTKIPKEDGESTDRLMGKGQVQLDPQALQDRDWQRTVIAMNGIEVKLSVKFNSREFSLKRMPSRKQTGVFGVKIAVVTKRERSKVPYIVRQCVEEIERRGMEEVGIYRVSGVATDIQALKAAFDVNNKDVSVMMSEMDVNAIAGTLKLYFRELPEPLFTDEFYPNFAEGIALSDPVAKESCMLNLLLSLPEANLLTFLFLLDHLKRVAEKEAVNKMSLHNLATVFGPTLLRPSEKESKLPANPSQPITMTDSWSLEVMSQVQVLLYFLQLEAIPAPDSKRQSILFSTEV

SEQ ID NO: 5115 - protein, 1227 aa, Homo sapiens
MVDPVGFAEAWKAQFPDSEPPRMELRSVGDIEQELERCKASIRRLEQEVNQERFRMIYLQTLLAKEKKSYDRQRWGFRRAAQAPDGASEPRASASRPQPAPADGADPPPAEEPEARPDGEGSPGKARPGTARRPGAAASGERDDRGPPASVAALRSNFERIRKGHGQPGADAEKPFYVNVEFHHERGLVKVNDKEVSDRISSLGSQAMQMERKKSQHGAGSSVGDASRPPYRGRSSESSCGVDGDYEDAELNPRFLKDNLIDANGGSRPPWPPLEYQPYQSIYVGGMMEGEGKGPLLRSQSTSEQEKRLTWPRRSYSPRSFEDCGGGYTPDCSSNENLTSSEEDFSSGQSSRVSPSPTTYRMFRDKSRSPSQNSQQSFDSSSPPTPQCHKRHRHCPVVVSEATIVGVRKTGQIWPNDGEGAFHGDADGSFGTPPGYGCAADRAEEQRRHQDGLPYIDDSPSSSPHLSSKGRGSRDALVSGALESTKASELDLEKGLEMRKWVLSGILASEETYLSHLEALLLPMKPLKAAATTSQPVLTSQQIETIFFKVPELYEIHKEFYDGLFPRVQQWSHQQRVGDLFQKLASQLGVYRAFVDNYGVAMEMAEKCCQANAQFAEISENLRARSNKDAKDPTTKNSLETLLYKPVDRVTRSTLVLHDLLKHTPASHPDHPLLQDALRISQNFLSSINEEITPRRQSMTVKKGEHRQLLKDSFMVELVEGARKLRHVFLFTDLLLCTKLKKQSGGKTQQYDCKWYIPLTDLSFQMVDELEAVPNIPLVPDEELDALKIKISQIKNDIQREKRANKGSKATERLKKKLSEQESLLLLMSPSMAFRVHSRNGKSYTFLISSDYERAEWRENIREQQKKCFRSFSLTSVELQMLTNSCVKLQTVHSIPLTINKEDDESPGLYGFLNVIVHSATGFKQSSNLYCTLEVDSFGYFVNKAKTRVYRDTAEPNWNELDPQALQDRDWQRTVIAMNGIEVKLSVKFNSREFSLKRMPSRKQTGVFGVKIAVVTKRERSKVPYIVRQCVEEIERRGMEEVGIYRVSGVATDIQALKAAFDVNNKDVSVMMSEMDVNAIAGTLKLYFRELPEPLFTDEFYPNFAEGIALSDPVAKESCMLNLLLSLPEANLLTFLFLLDHLKRVAEKEAVNKMSLHNLATVFGPTLLRPSEKESKLPANPSQPITMTDSWSLEVMSQVQVLLYFLQLEAIPAPDSKRQSILFSTEV

SEQ ID NO: 5116 - protein, 467 aa, Homo sapiens
MVDPVGFAEAWKAQFPDSEPPRMELRSVGDIEQELERCKASIRRLEQEVNQERFRMIYLQTLLAKEKKSYDRQRWGFRRAAQAPDGASEPRASASRPQPAPADGADPPPAEEPEARPDGEGSPGKARPGTARRPGAAASGERDDRGPPASVAALRSNFERIRKGHGQPGADAEKPFYVNVEFHHERGLVKVNDKEVSDRISSLGSQAMQMERKKSQHGAGSSVGDASRPPYRGRSSESSCGVDGDYEDAELNPRFLKDNLIDANGGSRPPWPPLEYQPYQSIYVGGMMEGEGKGPLLRSQSTSEQEKRLTWPRRSYSPRSFEDCGGGYTPDCSSNENLTSSEEDFSSGQSSRVSPSPTTYRMFRDKSRSPSQNSQQSFDSSSPPTPQCHKRHRHCPVVVSEATIVGVRKTGQIWPNDGEGAFHGDAVLKTEVPHQGVRRARLSLEALGEDPSFLFPASDGPRHSSTW

SEQ ID NO: 5117 - protein, 454 aa, Homo sapiens
MVDPVGFAEAWKAQFPDSEPPRMELRSVGDIEQELERCKASIRRLEQEVNQERFRMIYLQTLLAKEKKSYDRQRWGFRRAAQAPDGASEPRASASRPQPAPADGADPPPAEEPEARPDGEGSPGKARPGTARRPGAAASGERDDRGPPASVAALRSNFERIRKGHGQPGADAEKPFYVNVEFHHERGLVKVNDKEVSDRISSLGSQAMQMERKKSQHGAGSSVGDASRPPYRGRSSESSCGVDGDYEDAELNPRFLKDNLIDANGGSRPPWPPLEYQPYQSIYVGGMMEGEGKGPLLRSQSTSEQEKRLTWPRRSYSPRSFEDCGGGYTPDCSSNENLTSSEEDFSSGQSSRVSPSPTTYRMFRDKSRSPSQNSQQSFDSSSPPTPQCHKRHRHCPVVVSEATIVGVRKTGQIWPNDGEGAFHGDADGSFGTPPGYGCAAGRPPHLTELPVQHQ

SEQ ID NO: 5118 - protein, 1567 aa, Homo sapiens
MNVEKAEFCNKSKQPGLARSQHNRWAGSKETCNDRRTPSTEKKVDLNADPLCERKEWNKQKLPCSENPRDTEDVPWITLNSSIQKVNEWFSRSDELLGSDDSHDGESESNAKVADVLDVLNEVDEYSGSSEKIDLLASDPHEALICKSERVHSKSVESNIEDKIFGKTYRKKASLPNLSHVTENLIIGAFVTEPQIIQERPLTNKLKRKRRPTSGLHPEDFIKKADLAVQKTPEMINQGTNQTEQNGQVMNITNSGHENKTKGDSIQNEKNPNPIESLEKESAFKTKAEPISSSISNMELELNIHNSKAPKKNRLRRKSSTRHIHALELVVSRNLSPPNCTELQIDSCSSSEEIKKKKYNQMPVRHSRNLQLMEGKEPATGAKKSNKPNEQTSKRHDSDTFPELKLTNAPGSFTKCSNTSELKEFVNPSLPREEKEEKLETVKVSNNAEDPKDLMLSGERVLQTERSVESSSISLVPGTDYGTQESISLLEVSTLGKAKTEPNKCVSQCAAFENPKGLIHGCSKDNRNDTEGFKYPLGHEVNHSRETSIEMEESELDAQYLQNTFKVSKRQSFAPFSNPGNAEEECATFSAHSGSLKKQSPKVTFECEQKEENQGKNESNIKPVQTVNITAGFPVVGQKDKPVDNAKCSIKGGSRFCLSSQFRGNETGLITPNKHGLLQNPYRIPPLFPIKSFVKTKCKKNLLEENFEEHSMSPEREMGNENIPSTVSTISRNNIRENVFKEASSSNINEVGSSTNEVGSSINEIGSSDENIQAELGRNRGPKLNAMLRLGVLQPEVYKQSLPGSNCKHPEIKKQEYEEVVQTVNTDFSPYLISDNLEQPMGSSHASQVCSETPDDLLDDGEIKEDTSFAENDIKESSAVFSKSVQKGELSRSPSPFTHTHLAQGYRRGAKKLESSEENLSSEDEELPCFQHLLFGKVNNIPSQSTRHSTVATECLSKNTEENLLSLKNSLNDCSNQVILAKASQEHHLSEETKCSASLFSSQCSELEDLTANTNTQDPFLIGSSKQMRHQSESQGVGLSDKELVSDDEERGTGLEENNQEEQSMDSNLGEAASGCESETSVSEDCSGLSSQSDILTTQQRDTMQHNLIKLQQEMAELEAVLEQHGSQPSNSYPSIISDSSALEDLRNPEQSTSEKAVLTSQKSSEYPISQNPEGLSADKFEVSADSSTSKNKEPGVERSSPSKCPSLDDRWYMHSCSGSLQNRNYPSQEELIKVVDVEEQQLEESGPHDLTETSYLPRQDLEGTPYLESGISLFSDDPESDPSEDRAPESARVGNIPSSTSALKVPQLKVAESAQSPAAAHTTDTAGYNAMEESVSREKPELTASTERVNKRMSMVVSGLTPEEFMLVYKFARKHHITLTNLITEETTHVVMKTDAEFVCERTLKYFLGIAGGKWVVSYFWVTQSIKERKMLNEHDFEVRGDVVNGRNHQGPKRARESQDRKIFRGLEICCYGPFTNMPTDQLEWMVQLCGASVVKELSSFTLGTGVHPIVVVQPDAWTEDNGFHAIGQMCEAPVVTREWVLDSVALYQCQELDTYLIPQIPHSHY

SEQ ID NO: 5119 - protein, 1624 aa, Homo sapiens
MDLSALRVEEVQNVINAMQKILECPICLELIKEPVSTKCDHIFCKFCMLKLLNQKKGPSQCPLCKNDITKRSLQESTRFSQLVEELLKIICAFQLDTGLEYANSYNFAKKENNSPEHLKDEVSIIQSMGYRNRAKRLLQSEPENPSLQETSLSVQLSNLGTVRTLRTKQRIQPQKTSVYIELGSDSSEDTVNKATYCSVGDQELLQITPQGTRDEISLDSAKKAACEFSETDVTNTEHHQPSNNDLNTTEKRAAERHPEKYQGSSVSNLHVEPCGTNTHASSLQHENSSLLLTKDRMNVEKAEFCNKSKQPGLARSQHNRWAGSKETCNDRRTPSTEKKVDLNADPLCERKEWNKQKLPCSENPRDTEDVPWITLNSSIQKVNEWFSRSDELLGSDDSHDGESESNAKVADVLDVLNEVDEYSGSSEKIDLLASDPHEALICKSERVHSKSVESNIEDKIFGKTYRKKASLPNLSHVTENLIIGAFVTEPQIIQERPLTNKLKRKRRPTSGLHPEDFIKKADLAVQKTPEMINQGTNQTEQNGQVMNITNSGHENKTKGDSIQNEKNPNPIESLEKESAFKTKAEPISSSISNMELELNIHNSKAPKKNRLRRKSSTRHIHALELVVSRNLSPPNCTELQIDSCSSSEEIKKKKYNQMPVRHSRNLQLMEGKEPATGAKKSNKPNEQTSKRHDSDTFPELKLTNAPGSFTKCSNTSELKEFVNPSLPREEKEEKLETVKVSNNAEDPKDLMLSGERVLQTERSVESSSISLVPGTDYGTQESISLLEVSTLGKAKTEPNKCVSQCAAFENPKGLIHGCSKDNRNDTEGFKYPLGHEVNHSRETSIEMEESELDAQYLQNTFKVSKRQSFAPFSNPGNAEEECATFSAHSGSLKKQSPKVTFECEQKEENQGKNESNIKPVQTVNITAGFPVVGQKDKPVDNAKCSIKGGSRFCLSSQFRGNETGLITPNKHGLLQNPYRIPPLFPIKSFVKTKCKKNLLEENFEEHSMSPEREMGNENIPSTVSTISRNNIRENVFKEASSSNINEVGSSTNEVGSSINEIGSSDENIQAELGRNRGPKLNAMLRLGVLQPEVYKQSLPGSNCKHPEIKKQEYEEVVQTVNTDFSPYLISDNLEQPMGSSHASQVCSETPDDLLDDGEIKEDTSFAENDIKESSAVFSKSVQKGELSRSPSPFTHTHLAQGYRRGAKKLESSEENLSSEDEELPCFQHLLFGKVNNIPSQSTRHSTVATECLSKNTEENLLSLKNSLNDCSNQVILAKASQEHHLSEETKCSASLFSSQCSELEDLTANTNTQDPFLIGSSKQMRHQSESQGVGLSDKELVSDDEERGTGLEENNQEEQSMDSNLGEAASGCESETSVSEDCSGLSSQSDILTTQQRDTMQHNLIKLQQEMAELEAVLEQHGSQPSNSYPSIISDSSALEDLRNPEQSTSEKDAEFVCERTLKYFLGIAGGKWVVSYFWVTQSIKERKMLNEHDFEVRGDVVNGRNHQGPKRARESQDRKIFRGLEICCYGPFTNMPTDQLEWMVQLCGASVVKELSSFTLGTGVHPIVVVQPDAWTEDNGFHAIGQMCEAPVVTREWVLDSVALYQCQELDTYLIPQIPHSHY

SEQ ID NO: 5120 - protein, 680 aa, Homo sapiens
MDLSALRVEEVQNVINAMQKILECPICLELIKEPVSTKCDHIFCKFCMLKLLNQKKGPSQCPLCKNDITKRSLQESTRFSQLVEELLKIICAFQLDTGLEYANSYNFAKKENNSPEHLKDEVSIIQSMGYRNRAKRLLQSEPENPSLQETSLSVQLSNLGTVRTLRTKQRIQPQKTSVYIELGEAASGCESETSVSEDCSGLSSQSDILTTQQRDTMQHNLIKLQQEMAELEAVLEQHGSQPSNSYPSIISDSSALEDLRNPEQSTSEKAVLTSQKSSEYPISQNPEGLSADKFEVSADSSTSKNKEPGVERSSPSKCPSLDDRWYMHSCSGSLQNRNYPSQEELIKVVDVEEQQLEESGPHDLTETSYLPRQDLEGTPYLESGISLFSDDPESDPSEDRAPESARVGNIPSSTSALKVPQLKVAESAQSPAAAHTTDTAGYNAMEESVSREKPELTASTERVNKRMSMVVSGLTPEEFMLVYKFARKHHITLTNLITEETTHVVMKTDAEFVCERTLKYFLGIAGGKWVVSYFWVTQSIKERKMLNEHDFEVRGDVVNGRNHQGPKRARESQDRKIFRGLEICCYGPFTNMPTDQLEWMVQLCGASVVKELSSFTLGTGVHPIVVVQPDAWTEDNGFHAIGQMCEAPVVTREWVLDSVALYQCQELDTYLIPQIPHSHY

SEQ ID NO: 5121 - protein, 721 aa, Homo sapiens
MDLSALRVEEVQNVINAMQKILECPICLELIKEPVSTKCDHIFCKFCMLKLLNQKKGPSQCPLCKNDITKRSLQESTRFSQLVEELLKIICAFQLDTGLEYANSYNFAKKENNSPEHLKDEVSIIQSMGYRNRAKRLLQSEPENPSLQETSLSVQLSNLGTVRTLRTKQRIQPQKTSVYIELGSDSSEDTVNKATYCSVGDQELLQITPQGTRDEISLDSAKKGEAASGCESETSVSEDCSGLSSQSDILTTQQRDTMQHNLIKLQQEMAELEAVLEQHGSQPSNSYPSIISDSSALEDLRNPEQSTSEKAVLTSQKSSEYPISQNPEGLSADKFEVSADSSTSKNKEPGVERSSPSKCPSLDDRWYMHSCSGSLQNRNYPSQEELIKVVDVEEQQLEESGPHDLTETSYLPRQDLEGTPYLESGISLFSDDPESDPSEDRAPESARVGNIPSSTSALKVPQLKVAESAQSPAAAHTTDTAGYNAMEESVSREKPELTASTERVNKRMSMVVSGLTPEEFMLVYKFARKHHITLTNLITEETTHVVMKTDAEFVCERTLKYFLGIAGGKWVVSYFWVTQSIKERKMLNEHDFEVRGDVVNGRNHQGPKRARESQDRKIFRGLEICCYGPFTNMPTDQLEWMVQLCGASVVKELSSFTLGTGVHPIVVVQPDAWTEDNGFHAIGQMCEAPVVTREWVLDSVALYQCQELDTYLIPQIPHSHY

SEQ ID NO: 5122 - protein, 1598 aa, Homo sapiens
MDLSALRVEEVQNVINAMQKILECPICLELIKEPVSTKCDHIFCKFCMLKLLNQKKGPSQCPLCKNDITKRSLQESTRFSQLVEELLKIICAFQLDTGLEYANSYNFAKKENNSPEHLKDEVSIIQSMGYRNRAKRLLQSEPENPSLQETSLSVQLSNLGTVRTLRTKQRIQPQKTSVYIELGSDSSEDTVNKATYCSVGDQELLQITPQGTRDEISLDSAKKAACEFSETDVTNTEHHQPSNNDLNTTEKRAAERHPEKYQGSSVSNLHVEPCGTNTHASSLQHENSSLLLTKDRMNVEKAEFCNKSKQPGLARSQHNRWAGSKETCNDRRTPSTEKKVDLNADPLCERKEWNKQKLPCSENPRDTEDVPWITLNSSIQKVNEWFSRSDELLGSDDSHDGESESNAKVADVLDVLNEVDEYSGSSEKIDLLASDPHEALICKSERVHSKSVESNIEDKIFGKTYRKKASLPNLSHVTENLIIGAFVTEPQIIQERPLTNKLKRKRRPTSGLHPEDFIKKADLAVQKTPEMINQGTNQTEQNGQVMNITNSGHENKTKGDSIQNEKNPNPIESLEKESAFKTKAEPISSSISNMELELNIHNSKAPKKNRLRRKSSTRHIHALELVVSRNLSPPNCTELQIDSCSSSEEIKKKKYNQMPVRHSRNLQLMEGKEPATGAKKSNKPNEQTSKRHDSDTFPELKLTNAPGSFTKCSNTSELKEFVNPSLPREEKEEKLETVKVSNNAEDPKDLMLSGERVLQTERSVESSSISLVPGTDYGTQESISLLEVSTLGKAKTEPNKCVSQCAAFENPKGLIHGCSKDNRNDTEGFKYPLGHEVNHSRETSIEMEESELDAQYLQNTFKVSKRQSFAPFSNPGNAEEECATFSAHSGSLKKQSPKVTFECEQKEENQGKNESNIKPVQTVNITAGFPVVGQKDKPVDNAKCSIKGGSRFCLSSQFRGNETGLITPNKHGLLQNPYRIPPLFPIKSFVKTKCKKNLLEENFEEHSMSPEREMGNENIPSTVSTISRNNIRENVFKEASSSNINEVGSSTNEVGSSINEIGSSDENIQAELGRNRGPKLNAMLRLGVLQPEVYKQSLPGSNCKHPEIKKQEYEEVVQTVNTDFSPYLISDNLEQPMGSSHASQVCSETPDDLLDDGEIKEDTSFAENDIKESSAVFSKSVQKGELSRSPSPFTHTHLAQGYRRGAKKLESSEENLSSEDEELPCFQHLLFGKVNNIPSQSTRHSTVATECLSKNTEENLLSLKNSLNDCSNQVILAKASQEHHLSEETKCSASLFSSQCSELEDLTANTNTQDPFLIGSSKQMRHQSESQGVGLSDKELVSDDEERGTGLEENNQEEQSMDSNLGEAASGCESETSVSEDCSGLSSQSDILTTQQRDTMQHNLIKLQQEMAELEAVLEQHGSQPSNSYPSIISDSSALEDLRNPEQSTSEKGVTQSIKERKMLNEHDFEVRGDVVNGRNHQGPKRARESQDRKIFRGLEICCYGPFTNMPTDQLEWMVQLCGASVVKELSSFTLGTGVHPIVVVQPDAWTEDNGFHAIGQMCEAPVVTREWVLDSVALYQCQELDTYLIPQIPHSHY

SEQ ID NO: 5123 - protein, 1863 aa, Homo sapiens
MDLSALRVEEVQNVINAMQKILECPICLELIKEPVSTKCDHIFCKFCMLKLLNQKKGPSQCPLCKNDITKRSLQESTRFSQLVEELLKIICAFQLDTGLEYANSYNFAKKENNSPEHLKDEVSIIQSMGYRNRAKRLLQSEPENPSLQETSLSVQLSNLGTVRTLRTKQRIQPQKTSVYIELGSDSSEDTVNKATYCSVGDQELLQITPQGTRDEISLDSAKKAACEFSETDVTNTEHHQPSNNDLNTTEKRAAERHPEKYQGSSVSNLHVEPCGTNTHASSLQHENSSLLLTKDRMNVEKAEFCNKSKQPGLARSQHNRWAGSKETCNDRRTPSTEKKVDLNADPLCERKEWNKQKLPCSENPRDTEDVPWITLNSSIQKVNEWFSRSDELLGSDDSHDGESESNAKVADVLDVLNEVDEYSGSSEKIDLLASDPHEALICKSERVHSKSVESNIEDKIFGKTYRKKASLPNLSHVTENLIIGAFVTEPQIIQERPLTNKLKRKRRPTSGLHPEDFIKKADLAVQKTPEMINQGTNQTEQNGQVMNITNSGHENKTKGDSIQNEKNPNPIESLEKESAFKTKAEPISSSISNMELELNIHNSKAPKKNRLRRKSSTRHIHALELVVSRNLSPPNCTELQIDSCSSSEEIKKKKYNQMPVRHSRNLQLMEGKEPATGAKKSNKPNEQTSKRHDSDTFPELKLTNAPGSFTKCSNTSELKEFVNPSLPREEKEEKLETVKVSNNAEDPKDLMLSGERVLQTERSVESSSISLVPGTDYGTQESISLLEVSTLGKAKTEPNKCVSQCAAFENPKGLIHGCSKDNRNDTEGFKYPLGHEVNHSRETSIEMEESELDAQYLQNTFKVSKRQSFAPFSNPGNAEEECATFSAHSGSLKKQSPKVTFECEQKEENQGKNESNIKPVQTVNITAGFPVVGQKDKPVDNAKCSIKGGSRFCLSSQFRGNETGLITPNKHGLLQNPYRIPPLFPIKSFVKTKCKKNLLEENFEEHSMSPEREMGNENIPSTVSTISRNNIRENVFKEASSSNINEVGSSTNEVGSSINEIGSSDENIQAELGRNRGPKLNAMLRLGVLQPEVYKQSLPGSNCKHPEIKKQEYEEVVQTVNTDFSPYLISDNLEQPMGSSHASQVCSETPDDLLDDGEIKEDTSFAENDIKESSAVFSKSVQKGELSRSPSPFTHTHLAQGYRRGAKKLESSEENLSSEDEELPCFQHLLFGKVNNIPSQSTRHSTVATECLSKNTEENLLSLKNSLNDCSNQVILAKASQEHHLSEETKCSASLFSSQCSELEDLTANTNTQDPFLIGSSKQMRHQSESQGVGLSDKELVSDDEERGTGLEENNQEEQSMDSNLGEAASGCESETSVSEDCSGLSSQSDILTTQQRDTMQHNLIKLQQEMAELEAVLEQHGSQPSNSYPSIISDSSALEDLRNPEQSTSEKAVLTSQKSSEYPISQNPEGLSADKFEVSADSSTSKNKEPGVERSSPSKCPSLDDRWYMHSCSGSLQNRNYPSQEELIKVVDVEEQQLEESGPHDLTETSYLPRQDLEGTPYLESGISLFSDDPESDPSEDRAPESARVGNIPSSTSALKVPQLKVAESAQSPAAAHTTDTAGYNAMEESVSREKPELTASTERVNKRMSMVVSGLTPEEFMLVYKFARKHHITLTNLITEETTHVVMKTDAEFVCERTLKYFLGIAGGKWVVSYFWVTQSIKERKMLNEHDFEVRGDVVNGRNHQGPKRARESQDRKIFRGLEICCYGPFTNMPTDQLEWMVQLCGASVVKELSSFTLGTGVHPIVVVQPDAWTEDNGFHAIGQMCEAPVVTREWVLDSVALYQCQELDTYLIPQIPHSHY

SEQ ID NO: 5124 - protein, 712 aa, Homo sapiens
MLKLLNQKKGPSQCPLCKNDITKRSLQESTRFSQLVEELLKIICAFQLDTGLEYANSYNFAKKENNSPEHLKDEVSIIQSMGYRNRAKRLLQSEPENPSLQETSLSVQLSNLGTVRTLRTKQRIQPQKTSVYIELGSDSSEDTVNKATYCSVGDQELLQITPQGTRDEISLDSAKKAACEFSETDVTNTEHHQPSNNDLNTTEKRAAERHPEKYQGEAASGCESETSVSEDCSGLSSQSDILTTQQRDTMQHNLIKLQQEMAELEAVLEQHGSQPSNSYPSIISDSSALEDLRNPEQSTSEKVLTSQKSSEYPISQNPEGLSADKFEVSADSSTSKNKEPGVERSSPSKCPSLDDRWYMHSCSGSLQNRNYPSQEELIKVVDVEEQQLEESGPHDLTETSYLPRQDLEGTPYLESGISLFSDDPESDPSEDRAPESARVGNIPSSTSALKVPQLKVAESAQSPAAAHTTDTAGYNAMEESVSREKPELTASTERVNKRMSMVVSGLTPEEFMLVYKFARKHHITLTNLITEETTHVVMKTDAEFVCERTLKYFLGIAGGKWVVSYFWVTQSIKERKMLNEHDFEVRGDVVNGRNHQGPKRARESQDRKIFRGLEICCYGPFTNMPTDQLEWMVQLCGASVVKELSSFTLGTGVHPIVVVQPDAWTEDNGFHAIGQMCEAPVVTREWVLDSVALYQCQELDTYLIPQIPHSHY

SEQ ID NO: 5125 - protein, 1884 aa, Homo sapiens
MDLSALRVEEVQNVINAMQKILECPICLELIKEPVSTKCDHIFCKFCMLKLLNQKKGPSQCPLCKNDITKRSLQESTRFSQLVEELLKIICAFQLDTGLEYANSYNFAKKENNSPEHLKDEVSIIQSMGYRNRAKRLLQSEPENPSLQETSLSVQLSNLGTVRTLRTKQRIQPQKTSVYIELGSDSSEDTVNKATYCSVGDQELLQITPQGTRDEISLDSAKKAACEFSETDVTNTEHHQPSNNDLNTTEKRAAERHPEKYQGSSVSNLHVEPCGTNTHASSLQHENSSLLLTKDRMNVEKAEFCNKSKQPGLARSQHNRWAGSKETCNDRRTPSTEKKVDLNADPLCERKEWNKQKLPCSENPRDTEDVPWITLNSSIQKVNEWFSRSDELLGSDDSHDGESESNAKVADVLDVLNEVDEYSGSSEKIDLLASDPHEALICKSERVHSKSVESNIEDKIFGKTYRKKASLPNLSHVTENLIIGAFVTEPQIIQERPLTNKLKRKRRPTSGLHPEDFIKKADLAVQKTPEMINQGTNQTEQNGQVMNITNSGHENKTKGDSIQNEKNPNPIESLEKESAFKTKAEPISSSISNMELELNIHNSKAPKKNRLRRKSSTRHIHALELVVSRNLSPPNCTELQIDSCSSSEEIKKKKYNQMPVRHSRNLQLMEGKEPATGAKKSNKPNEQTSKRHDSDTFPELKLTNAPGSFTKCSNTSELKEFVNPSLPREEKEEKLETVKVSNNAEDPKDLMLSGERVLQTERSVESSSISLVPGTDYGTQESISLLEVSTLGKAKTEPNKCVSQCAAFENPKGLIHGCSKDNRNDTEGFKYPLGHEVNHSRETSIEMEESELDAQYLQNTFKVSKRQSFAPFSNPGNAEEECATFSAHSGSLKKQSPKVTFECEQKEENQGKNESNIKPVQTVNITAGFPVVGQKDKPVDNAKCSIKGGSRFCLSSQFRGNETGLITPNKHGLLQNPYRIPPLFPIKSFVKTKCKKNLLEENFEEHSMSPEREMGNENIPSTVSTISRNNIRENVFKEASSSNINEVGSSTNEVGSSINEIGSSDENIQAELGRNRGPKLNAMLRLGVLQPEVYKQSLPGSNCKHPEIKKQEYEEVVQTVNTDFSPYLISDNLEQPMGSSHASQVCSETPDDLLDDGEIKEDTSFAENDIKESSAVFSKSVQKGELSRSPSPFTHTHLAQGYRRGAKKLESSEENLSSEDEELPCFQHLLFGKVNNIPSQSTRHSTVATECLSKNTEENLLSLKNSLNDCSNQVILAKASQEHHLSEETKCSASLFSSQCSELEDLTANTNTQDPFLIGSSKQMRHQSESQGVGLSDKELVSDDEERGTGLEENNQEEQSMDSNLGEAASGCESETSVSEDCSGLSSQSDILTTQQRDTMQHNLIKLQQEMAELEAVLEQHGSQPSNSYPSIISDSSALEDLRNPEQSTSEKDSHIHGQRNNSMFSKRPREHISVLTSQKSSEYPISQNPEGLSADKFEVSADSSTSKNKEPGVERSSPSKCPSLDDRWYMHSCSGSLQNRNYPSQEELIKVVDVEEQQLEESGPHDLTETSYLPRQDLEGTPYLESGISLFSDDPESDPSEDRAPESARVGNIPSSTSALKVPQLKVAESAQSPAAAHTTDTAGYNAMEESVSREKPELTASTERVNKRMSMVVSGLTPEEFMLVYKFARKHHITLTNLITEETTHVVMKTDAEFVCERTLKYFLGIAGGKWVVSYFWVTQSIKERKMLNEHDFEVRGDVVNGRNHQGPKRARESQDRKIFRGLEICCYGPFTNMPTDQLEWMVQLCGASVVKELSSFTLGTGVHPIVVVQPDAWTEDNGFHAIGQMCEAPVVTREWVLDSVALYQCQELDTYLIPQIPHSHY

SEQ ID NO: 5126 - protein, 63 aa, Homo sapiens
MDLSALRVEEVQNVINAMQKILECPICLELIKEPVSTKCDHIFCKFCMLKLLNQKKGPSQCPL

SEQ ID NO: 5127 - protein, 63 aa, Homo sapiens; identical to SEQ ID NO: 5126

SEQ ID NO: 5128 - protein, 699 aa, Homo sapiens
MDLSALRVEEVQNVINAMQKILECPICLELIKEPVSTKCDHIFCKFCMLKLLNQKKGPSQCPLCKNDITKRSLQESTRFSQLVEELLKIICAFQLDTGLEYANSYNFAKKENNSPEHLKDEVSIIQSMGYRNRAKRLLQSEPENPSLQETSLSVQLSNLGTVRTLRTKQRIQPQKTSVYIELGSDSSEDTVNKATYCSVGDQELLQITPQGTRDEISLDSAKKAACEFSETDVTNTEHHQPSNNDLNTTEKRAAERHPEKYQGEAASGCESETSVSEDCSGLSSQSDILTTQQRDTMQHNLIKLQQEMAELEAVLEQHGSQPSNSYPSIISDSSALEDLRNPEQSTSEKVLTSQKSSEYPISQNPEGLSADKFEVSADSSTSKNKEPGVERSSPSKCPSLDDRWYMHSCSGSLQNRNYPSQEELIKVVDVEEQQLEESGPHDLTETSYLPRQDLEGTPYLESGISLFSDDPESDPSEDRAPESARVGNIPSSTSALKVPQLKVAESAQSPAAAHTTDTAGYNAMEESVSREKPELTASTERVNKRMSMVVSGLTPEEFMLVYKFARKHHITLTNLITEETTHVVMKTDAEFVCERTLKYFLGIAGGKWVVSYFWVTQSIKERKMLNEHDFEVRGDVVNGRNHQGPKRARESQDRKIFRGLEICCYGPFTNMPTGCPPNCGCAARCLDRGQWLPCNWADV

SEQ ID NO: 5129 - protein, 649 aa, Homo sapiens
MDLSALRVEEVQNVINAMQKILECPICLELIKEPVSTKCDHIFCKFCMLKLLNQKKGPSQCPLCKNDITKRSLQESTRFSQLVEELLKIICAFQLDTGLEYANSYNFAKKENNSPEHLKDEVSIIQSMGYRNRAKRLLQSEPENPSLQETSLSVQLSNLGTVRTLRTKQRIQPQKTSVYIELGSDSSEDTVNKATYCSVGDQELLQITPQGTRDEISLDSAKKAACEFSETDVTNTEHHQPSNNDLNTTEKRAAERHPEKYQGSSVSNLHVEPCGTNTHASSLQHENSSLLLTKDRMNVEKAEFCNKSKQPGLARSQHNRWAGSKETCNDRRTPSTEKKVDLNADPLCERKEWNKQKLPCSENPRDTEDVPWITLNSSIQKVNEWFSRSDELLGSDDSHDGESESNAKVADVLDVLNEVDEYSGSSEKIDLLASDPHEALICKSERVHSKSVESNIEDKIFGKTYRKKASLPNLSHVTENLIIGAFVTEPQIIQERPLTNKLKRKRRPTSGLHPEDFIKKADLAVQKTPEMINQGTNQTEQNGQVMNITNSGHENKTKGDSIQNEKNPNPIESLEKESAFKTKAEPISSSISNMELELNIHNSKAPKKNRLRRKSSTRHIHALELVVSRNLSPPNCTELQIDSCSSSEE

SEQ ID NO: 5130 - protein, 1885 aa, Homo sapiens
MDLSALRVEEVQNVINAMQKILECPICLELIKEPVSTKCDHIFCKFCMLKLLNQKKGPSQCPLCKNDITKRSLQESTRFSQLVEELLKIICAFQLDTGLEYANSYNFAKKENNSPEHLKDEVSIIQSMGYRNRAKRLLQSEPENPSLQETSLSVQLSNLGTVRTLRTKQRIQPQKTSVYIELGSDSSEDTVNKATYCSVGDQELLQITPQGTRDEISLDSAKKAACEFSETDVTNTEHHQPSNNDLNTTEKRAAERHPEKYQGSSVSNLHVEPCGTNTHASSLQHENSSLLLTKDRMNVEKAEFCNKSKQPGLARSQHNRWAGSKETCNDRRTPSTEKKVDLNADPLCERKEWNKQKLPCSENPRDTEDVPWITLNSSIQKVNEWFSRSDELLGSDDSHDGESESNAKVADVLDVLNEVDEYSGSSEKIDLLASDPHEALICKSERVHSKSVESNIEDKIFGKTYRKKASLPNLSHVTENLIIGAFVTEPQIIQERPLTNKLKRKRRPTSGLHPEDFIKKADLAVQKTPEMINQGTNQTEQNGQVMNITNSGHENKTKGDSIQNEKNPNPIESLEKESAFKTKAEPISSSISNMELELNIHNSKAPKKNRLRRKSSTRHIHALELVVSRNLSPPNCTELQIDSCSSSEEIKKKKYNQMPVRHSRNLQLMEGKEPATGAKKSNKPNEQTSKRHDSDTFPELKLTNAPGSFTKCSNTSELKEFVNPSLPREEKEEKLETVKVSNNAEDPKDLMLSGERVLQTERSVESSSISLVPGTDYGTQESISLLEVSTLGKAKTEPNKCVSQCAAFENPKGLIHGCSKDNRNDTEGFKYPLGHEVNHSRETSIEMEESELDAQYLQNTFKVSKRQSFAPFSNPGNAEEECATFSAHSGSLKKQSPKVTFECEQKEENQGKNESNIKPVQTVNITAGFPVVGQKDKPVDNAKCSIKGGSRFCLSSQFRGNETGLITPNKHGLLQNPYRIPPLFPIKSFVKTKCKKNLLEENFEEHSMSPEREMGNENIPSTVSTISRNNIRENVFKEASSSNINEVGSSTNEVGSSINEIGSSDENIQAELGRNRGPKLNAMLRLGVLQPEVYKQSLPGSNCKHPEIKKQEYEEVVQTVNTDFSPYLISDNLEQPMGSSHASQVCSETPDDLLDDGEIKEDTSFAENDIKESSAVFSKSVQKGELSRSPSPFTHTHLAQGYRRGAKKLESSEENLSSEDEELPCFQHLLFGKVNNIPSQSTRHSTVATECLSKNTEENLLSLKNSLNDCSNQVILAKASQEHHLSEETKCSASLFSSQCSELEDLTANTNTQDPFLIGSSKQMRHQSESQGVGLSDKELVSDDEERGTGLEENNQEEQSMDSNLGEAASGCESETSVSEDCSGLSSQSDILTTQQRDTMQHNLIKLQQEMAELEAVLEQHGSQPSNSYPSIISDSSALEDLRNPEQSTSEKDSHIHGQRNNSMFSKRPREHISAVLTSQKSSEYPISQNPEGLSADKFEVSADSSTSKNKEPGVERSSPSKCPSLDDRWYMHSCSGSLQNRNYPSQEELIKVVDVEEQQLEESGPHDLTETSYLPRQDLEGTPYLESGISLFSDDPESDPSEDRAPESARVGNIPSSTSALKVPQLKVAESAQSPAAAHTTDTAGYNAMEESVSREKPELTASTERVNKRMSMVVSGLTPEEFMLVYKFARKHHITLTNLITEETTHVVMKTDAEFVCERTLKYFLGIAGGKWVVSYFWVTQSIKERKMLNEHDFEVRGDVVNGRNHQGPKRARESQDRKIFRGLEICCYGPFTNMPTDQLEWMVQLCGASVVKELSSFTLGTGVHPIVVVQPDAWTEDNGFHAIGQMCEAPVVTREWVLDSVALYQCQELDTYLIPQIPHSHY

SEQ ID NO: 5131 - protein, 222 aa, Homo sapiens
MDLSALRVEEVQNVINAMQKILECPICLELIKEPVSTKCDHIFCKFCMLKLLNQKKGPSQCPLCKNDITKRSLQESTRFSQLVEELLKIICAFQLDTGLEYANSYNFAKKENNSPEHLKDEVSIIQSMGYRNRAKRLLQSEPENPSLETSLSVQLSNLGTVRTLRTKQRIQPQKTSVYIELGSDSSEDTVNKATYCSVGDQELLQITPQGTRDEISLDSAKK

SEQ ID NO: 5132 - protein, 622 aa, Homo sapiens
MDLSALRVEEVQNVINAMQKILECPICLELIKEPVSTKCDHIFCKSLQESTRFSQLVEELLKIICAFQLDTGLEYANSYNFAKKENNSPEHLKDEVSIIQSMGYRNRAKRLLQSEPENPSLQETSLSVQLSNLGTVRTLRTKQRIQPQKTSVYIELGSDSSEDTVNKATYCSVGDQELLQITPQGTRDEISLDSAKKAACEFSETDVTNTEHHQPSNNDLNTTEKRAAERHPEKYQGSSVSNLHVEPCGTNTHASSLQHENSSLLLTKDRMNVEKAEFCNKSKQPGLARSQHNRWAGSKETCNDRRTPSTEKKVDLNADPLCERKEWNKQKLPCSENPRDTEDVPWITLNSSIQKVNEWFSRSDELLGSDDSHDGESESNAKVADVLDVLNEVDEYSGSSEKIDLLASDPHEALICKSERVHSKSVESNIEDKIFGKTYRKKASLPNLSHVTENLIIGAFVTEPQIIQERPLTNKLKRKRRPTSGLHPEDFIKKADLAVQKTPEMINQGTNQTEQNGQVMNITNSGHENKTKGDSIQNEKNPNPIESLEKESAFKTKAEPISSSISNMELELNIHNSKAPKKNRLRRKSSTRHIHALELVVSRNLSPPNCTELQIDSCSSSE

SEQ ID NO: 5133 - protein, 623 aa, Homo sapiens
MDLSALRVEEVQNVINAMQKILECPICLELIKEPVSTKCDHIFCKFCMLKLLNQKKGPSQCPLCKNDITKRSLQESTRFSQLVEELLKIICAFQLDTGLEYANSYNFAKKENNSPEHLKDEVSIIQSMGYRNRAKRLLQSEPENPSLETSLSVQLSNLGTVRTLRTKQRIQPQKTSVYIELGSDSSEDTVNKATYCSVGDQELLQITPQGTRDEISLDSAKKAACEFSETDVTNTEHHQPSNNDLNTTEKRAAERHPEKYQGEAASGCESETSVSEDCSGLSSQSDILTTQQRDTMQHNLIKLQQEMAELEAVLEQHGSQPSNSYPSIISDSSALEDLRNPEQSTSEKAVLTSQKSSEYPISQNPEGLSADKFEVSADSSTSKNKEPGVERSSPSKCPSLDDRWYMHSCSGSLQNRNYPSQEELIKVVDVEEQQLEESGPHDLTETSYLPRQDLEGTPYLESGISLFSDDPESDPSEDRAPESARVGNIPSSTSALKVPQLKVAESAQSPAAAHTTDTAGYNAMEESVSREKPELTASTERVNKRMSMVVSGLTPEEFMLVYKFARKHHITLTNLITEETTHVVMKTDAEFVCERTLKYFLGIAGGKWVVSYFWVTQSIKERK

SEQ ID NO: 5134 - protein, 498 aa, Homo sapiens
ELLKIICAFQLDTGLEYANSYNFAKKENNSPEHLKDEVSIIQSMGYRNRAKRLLQSEPENPSLETSLSVQLSNLGTVRTLRTKQRIQPQKTSVYIELAACEFSETDVTNTEHHQPSNNDLNTTEKRAAERHPEKYQGEAASGCESETSVSEDCSGLSSQSDILTTQQRDTMQHNLIKLQQEMAELEAVLEQHGSQPSNSYPSIISDSSALEDLRNPEQSTSEKAVLTSQKSSEYPISQNPEGLSADKFEVSADSSTSKNKEPGVERSSPSKCPSLDDRWYMHSCSGSLQNRNYPSQEELIKVVDVEEQQLEESGPHDLTETSYLPRQDLEGTPYLESGISLFSDDPESDPSEDRAPESARVGNIPSSTSALKVPQLKVAESAQSPAAAHTTDTAGYNAMEESVSREKPELTASTERVNKRMSMVVSGLTPEEFMLVYKFARKHHITLTNLITEETTHVVMKTDAEFVCERTLKYFLGIAGGKWVVSYFWVTQSIKERK

SEQ ID NO: 5135 - protein, 98 aa, Homo sapiens
MDLSALRVEEVQNVINAMQKILECPICLELIKEPVSTKCDHIFCKSLQESTRFSQLVEELLKIICAFQLDTGLEYANSYNFAKKENNSPEHLKDEVSI

SEQ ID NO: 5136 - protein, 759 aa, Homo sapiens
MDLSALRVEEVQNVINAMQKILECPICLELIKEPVSTKCDHIFCKFCMLKLLNQKKGPSQCPLCKNDITKRSLQESTRFSQLVEELLKIICAFQLDTGLEYANSYNFAKKENNSPEHLKDEVSIIQSMGYRNRAKRLLQSEPENPSLQETSLSVQLSNLGTVRTLRTKQRIQPQKTSVYIELGSDSSEDTVNKATYCSVGDQELLQITPQGTRDEISLDSAKKAACEFSETDVTNTEHHQPSNNDLNTTEKRAAERHPEKYQGEAASGCESETSVSEDCSGLSSQSDILTTQQRDTMQHNLIKLQQEMAELEAVLEQHGSQPSNSYPSIISDSSALEDLRNPEQSTSEKVLTSQKSSEYPISQNPEGLSADKFEVSADSSTSKNKEPGVERSSPSKCPSLDDRWYMHSCSGSLQNRNYPSQEELIKVVDVEEQQLEESGPHDLTETSYLPRQDLEGTPYLESGISLFSDDPESDPSEDRAPESARVGNIPSSTSALKVPQLKVAESAQSPAAAHTTDTAGYNAMEESVSREKPELTASTERVNKRMSMVVSGLTPEEFMLVYKFARKHHITLTNLITEETTHVVMKTDAEFVCERTLKYFLGIAGGKWVVSYFWVTQSIKERKMLNEHDFEVRGDVVNGRNHQGPKRARESQDRKIFRGLEICCYGPFTNMPTDQLEWMVQLCGASVVKELSSFTLGTGVHPIVVVQPDAWTEDNGFHAIGQMCEAPVVTREWVLDSVALYQCQELDTYLIPQIPHSHY

SEQ ID NO: 5137 - protein, 59 aa, Homo sapiens
MDLSALRVEEVQNVINAMQKILECPICLELIKEPVSTKCDHIFCKVLLCCPSWSTVVRS

SEQ ID NO: 5138 - protein, 1816 aa, Homo sapiens
MLKLLNQKKGPSQCPLCKNDITKRSLQESTRFSQLVEELLKIICAFQLDTGLEYANSYNFAKKENNSPEHLKDEVSIIQSMGYRNRAKRLLQSEPENPSLQETSLSVQLSNLGTVRTLRTKQRIQPQKTSVYIELGSDSSEDTVNKATYCSVGDQELLQITPQGTRDEISLDSAKKAACEFSETDVTNTEHHQPSNNDLNTTEKRAAERHPEKYQGSSVSNLHVEPCGTNTHASSLQHENSSLLLTKDRMNVEKAEFCNKSKQPGLARSQHNRWAGSKETCNDRRTPSTEKKVDLNADPLCERKEWNKQKLPCSENPRDTEDVPWITLNSSIQKVNEWFSRSDELLGSDDSHDGESESNAKVADVLDVLNEVDEYSGSSEKIDLLASDPHEALICKSERVHSKSVESNIEDKIFGKTYRKKASLPNLSHVTENLIIGAFVTEPQIIQERPLTNKLKRKRRPTSGLHPEDFIKKADLAVQKTPEMINQGTNQTEQNGQVMNITNSGHENKTKGDSIQNEKNPNPIESLEKESAFKTKAEPISSSISNMELELNIHNSKAPKKNRLRRKSSTRHIHALELVVSRNLSPPNCTELQIDSCSSSEEIKKKKYNQMPVRHSRNLQLMEGKEPATGAKKSNKPNEQTSKRHDSDTFPELKLTNAPGSFTKCSNTSELKEFVNPSLPREEKEEKLETVKVSNNAEDPKDLMLSGERVLQTERSVESSSISLVPGTDYGTQESISLLEVSTLGKAKTEPNKCVSQCAAFENPKGLIHGCSKDNRNDTEGFKYPLGHEVNHSRETSIEMEESELDAQYLQNTFKVSKRQSFAPFSNPGNAEEECATFSAHSGSLKKQSPKVTFECEQKEENQGKNESNIKPVQTVNITAGFPVVGQKDKPVDNAKCSIKGGSRFCLSSQFRGNETGLITPNKHGLLQNPYRIPPLFPIKSFVKTKCKKNLLEENFEEHSMSPEREMGNENIPSTVSTISRNNIRENVFKEASSSNINEVGSSTNEVGSSINEIGSSDENIQAELGRNRGPKLNAMLRLGVLQPEVYKQSLPGSNCKHPEIKKQEYEEVVQTVNTDFSPYLISDNLEQPMGSSHASQVCSETPDDLLDDGEIKEDTSFAENDIKESSAVFSKSVQKGELSRSPSPFTHTHLAQGYRRGAKKLESSEENLSSEDEELPCFQHLLFGKVNNIPSQSTRHSTVATECLSKNTEENLLSLKNSLNDCSNQVILAKASQEHHLSEETKCSASLFSSQCSELEDLTANTNTQDPFLIGSSKQMRHQSESQGVGLSDKELVSDDEERGTGLEENNQEEQSMDSNLGEAASGCESETSVSEDCSGLSSQSDILTTQQRDTMQHNLIKLQQEMAELEAVLEQHGSQPSNSYPSIISDSSALEDLRNPEQSTSEKAVLTSQKSSEYPISQNPEGLSADKFEVSADSSTSKNKEPGVERSSPSKCPSLDDRWYMHSCSGSLQNRNYPSQEELIKVVDVEEQQLEESGPHDLTETSYLPRQDLEGTPYLESGISLFSDDPESDPSEDRAPESARVGNIPSSTSALKVPQLKVAESAQSPAAAHTTDTAGYNAMEESVSREKPELTASTERVNKRMSMVVSGLTPEEFMLVYKFARKHHITLTNLITEETTHVVMKTDAEFVCERTLKYFLGIAGGKWVVSYFWVTQSIKERKMLNEHDFEVRGDVVNGRNHQGPKRARESQDRKIFRGLEICCYGPFTNMPTDQLEWMVQLCGASVVKELSSFTLGTGVHPIVVVQPDAWTEDNGFHAIGQMCEAPVVTREWVLDSVALYQCQELDTYLIPQIPHSHY

SEQ ID NO: 5139 - protein, 572 aa, Homo sapiens
MLKLLNQKKGPSQCPLCKNDITKRSLQESTRFSQLVEELLKIICAFQLDTGLEYANSYNFAKKENNSPEHLKDEVSIIQSMGYRNRAKRLLQSEPENPSLQETSLSVQLSNLGTVRTLRTKQRIQPQKTSVYIELGSDSSEDTVNKATYCSVGDQELLQITPQGTRDEISLDSAKKAACEFSETDVTNTEHHQPSNNDLNTTEKRAAERHPEKYQGEAASGCESETSVSEDCSGLSSQSDILTTQQRDTMQHNLIKLQQEMAELEAVLEQHGSQPSNSYPSIISDSSALEDLRNPEQSTSEKAVLTSQKSSEYPISQNPEGLSADKFEVSADSSTSKNKEPGVERSSPSKCPSLDDRWYMHSCSGSLQNRNYPSQEELIKVVDVEEQQLEESGPHDLTETSYLPRQDLEGTPYLESGISLFSDDPESDPSEDRAPESARVGNIPSSTSALKVPQLKVAESAQSPAAAHTTDTAGYNAMEESVSREKPELTASTERVNKRMSMVVSGLTPEEFMLVYKFARKHHITLTNLITEETTHVVMKTDAEFVCERTLKYFLGIAGGKWVVSYFWVTQS

SEQ ID NO: 5140 - protein, 473 aa, Homo sapiens
MDLSALRVEEVQNVINAMQKILECPICLELIKEPVSTKCDHIFCKFCMLKLLNQKKGPSQCPLCKNDITKRSLQESTRFSQLVEELLKIICAFQLDTGLEYANSYNFAKKENNSPEHLKDEVSIIQSMGYRNRAKRLLQSEPENPSLQETSLSVQLSNLGTVRTLRTKQRIQPQKTSVYIELGSDSSEDTVNKATYCSVGDQELLQITPQGTRDEISLDSAKKAACEFSETDVTNTEHHQPSNNDLNTTEKRAAERHPEKYQGSSVSNLHVEPCGTNTHASSLQHENSSLLLTKDRMNVEKAEFCNKSKQPGLARSQHNRWAGSKETCNDRRTPSTEKKVDLNADPLCERKEWNKQKLPCSENPRDTEDVPWITLNSSIQKVNEWFSRSDELLGSDDSHDGESESNAKVADVLDVLNEVDEYSGSSEKIDLLASDPHEALICKSERVHSKSVESNIEDKIFGKTYRKKASLPN

SEQ ID NO: 5141 - protein, 177 aa, Homo sapiens
MNVEKAEFCNKSKQPGLARSQHNRWAGSKETCNDRRTPSTEKKVDLNADPLCERKEWNKQKLPCSENPRDTEDVPWITLNSSIQKVNEWFSRSDELLGSDDSHDGESESNAKVADVLDVLNEVDEYSGSSEKIDLLASDPHEALICKSERVHSKSVESNIEDKIFGKTYRKKASLPN

SEQ ID NO: 5142 - protein, 3418 aa, Homo sapiens [sequence omitted]

SEQ ID NO: 5143 - protein, 602 aa, Homo sapiens
MPIGSKERPTFFEIFKTRCNKAGPISLNWFEELSSEAPPYNSEPAEESEHKNNNYEPNLFKTPQRKPSYNQLASTPIIFKEQGLTLPLYQSPVKELDKFKLDLGRNVPNSRHKSLRTVKTKMDQADDVSCPLLNSCLSESPVVLQCTHVTPQRDKSVVCGSLFHTPKFVKGRQTPKHISESLGAEVDPDMSWSSSLATPPTLSSTVLIVRNEEASETVFPHDTTANVKSYFSNHDESLKKNDRFIASVTDSENTNQREAASHGFGKTSGNSFKVNSCKDHIGKSMPNVLEDEVYETVVDTSEEDSFSLCFSKCRTKNLQKVRTSKTRKKIFHEANADECEKSKNQVKEKYSFVSEVEPNDTDPLDSNVANQKPFESGSDKISKEVVPSLACEWSQLTLSGLNGAQMEKIPLLHISSCDQNISEKDLLDTENKRKKDFLTSENSLPRISSLPKSEKPLNEETVVNKRDEEQHLESHTDCILAVKQAISGTSPVASSFQGIKKSIFRIRESPKETFNASFSGHMTDPNFKKETEASESGLEIHTVCSQKEDSLCPNLIDNGSWPATTTQNSVALKNAGLISTLKKKTNKFIYAIHDETSYKGKK

SEQ ID NO: 5144 - protein, 3418 aa, Homo sapiens [sequence omitted]

SEQ ID NO: 5145 - protein, 888 aa, Homo sapiens
MHCPGEAPLAAPRPTPKDPCLRNVLAKALYDNVAESPDELSFRKGDIMTVLEQDTQGLDGWWLCSLHGRQGIVPGNRLKILVGMYDKKPAGPGPGPPATPAQPQPGLHAPAPPASQYTPMLPNTYQPQPDSVYLVPTPSKAQQGLYQVPGPSPQFQSPPAKQTSTFSKQTPHHPFPSPATDLYQVPPGPGGPAQDIYQVPPSAGMGHDIYQVPPSMDTRSWEGTKPPAKVVVPTRVGQGYVYEAAQPEQDEYDIPRHLLAPGPQDIYDVPPVRGLLPSQYGQEVYDTPPMAVKGPNGRDPLLEVYDVPPSVEKGLPPSNHHAVYDVPPSVSKDVPDGPLLREETYDVPPAFAKAKPFDPARTPLVLAAPPPDSPPAEDVYDVPPPAPDLYDVPPGLRRPGPGTLYDVPRERVLPPEVADGGVVDSGVYAVPPPAEREAPAEGKRLSASSTGSTRSSQSASSLEVAGPGREPLELEVAVEALARLQQGVSATVAHLLDLAGSAGATGSWRSPSEPQEPLVQDLQAAVAAVQSAVHELLEFARSAVGNAAHTSDRALHAKLSRQLQKMEDVHQTLVAHGQALDAGRGGSGATLEDLDRLVACSRAVPEDAKQLASFLHGNASLLFRRTKATAPGPEGGGTLHPNPTDKTSSIQSRPLPSPPKFTSQDSPDGQYENSEGGWMEDYDYVHLQGKEEFEKTQKELLEKGSITRQGKSQLELQQLKQFERLEQEVSRPIDHDLANWTPAQPLAPGRTGGLGPSDRQLLLFYLEQCEANLTTLTNAVDAFFTAVATNQPPKIFVAHSKFVILSAHKLVFIGDTLSRQAKAADVRSQVTHYSNLLCDLLRGIVATTKAAALQYPSPSAAQDMVERVKELGHSTQQFRRVLGQLAAA

SEQ ID NO: 5146 - protein, 870 aa, Homo sapiens
MNHLNVLAKALYDNVAESPDELSFRKGDIMTVLEQDTQGLDGWWLCSLHGRQGIVPGNRLKILVGMYDKKPAGPGPGPPATPAQPQPGLHAPAPPASQYTPMLPNTYQPQPDSVYLVPTPSKAQQGLYQVPGPSPQFQSPPAKQTSTFSKQTPHHPFPSPATDLYQVPPGPGGPAQDIYQVPPSAGMGHDIYQVPPSMDTRSWEGTKPPAKVVVPTRVGQGYVYEAAQPEQDEYDIPRHLLAPGPQDIYDVPPVRGLLPSQYGQEVYDTPPMAVKGPNGRDPLLEVYDVPPSVEKGLPPSNHHAVYDVPPSVSKDVPDGPLLREETYDVPPAFAKAKPFDPARTPLVLAAPPPDSPPAEDVYDVPPPAPDLYDVPPGLRRPGPGTLYDVPRERVLPPEVADGGVVDSGVYAVPPPAEREAPAEGKRLSASSTGSTRSSQSASSLEVAGPGREPLELEVAVEALARLQQGVSATVAHLLDLAGSAGATGSWRSPSEPQEPLVQDLQAAVAAVQSAVHELLEFARSAVGNAAHTSDRALHAKLSRQLQKMEDVHQTLVAHGQALDAGRGGSGATLEDLDRLVACSRAVPEDAKQLASFLHGNASLLFRRTKATAPGPEGGGTLHPNPTDKTSSIQSRPLPSPPKFTSQDSPDGQYENSEGGWMEDYDYVHLQGKEEFEKTQKELLEKGSITRQGKSQLELQQLKQFERLEQEVSRPIDHDLANWTPAQPLAPGRTGGLGPSDRQLLLFYLEQCEANLTTLTNAVDAFFTAVATNQPPKIFVAHSKFVILSAHKLVFIGDTLSRQAKAADVRSQVTHYSNLLCDLLRGIVATTKAAALQYPSPSAAQDMVERVKELGHSTQQFRRVLGQLAAA

SEQ ID NO: 5147 - protein, 888 aa, Homo sapiens
MNHLNVLAKALYDNVAESPDELSFRKGDIMTVLEQDTQGLDGWWLCSLHGRQGIVPGNRLKILVGMYDKKPAGPGPGPPATPAQPQPGLHAPAPPASQYTPMLPNTYQPQPDSVYLVPTPSKAQQGLYQVPGPSPQFQSPPAKQTSTFSKQTPHHPFPSPATDLYQVPPGPGGPAQDIYQVPPSAGMGHDIYQVPPSMDTRSWEGTKPPAKVVVPTRVGQGYVYEAAQPEQDEYDIPRHLLAPGPQDIYDVPPVRGLLPSQYGQEVYDTPPMAVKGPNGRDPLLEVYDVPPSVEKGLPPSNHHAVSKCQGNARARLRLWGVWVYDVPPSVSKDVPDGPLLREETYDVPPAFAKAKPFDPARTPLVLAAPPPDSPPAEDVYDVPPPAPDLYDVPPGLRRPGPGTLYDVPRERVLPPEVADGGVVDSGVYAVPPPAEREAPAEGKRLSASSTGSTRSSQSASSLEVAGPGREPLELEVAVEALARLQQGVSATVAHLLDLAGSAGATGSWRSPSEPQEPLVQDLQAAVAAVQSAVHELLEFARSAVGNAAHTSDRALHAKLSRQLQKMEDVHQTLVAHGQALDAGRGGSGATLEDLDRLVACSRAVPEDAKQLASFLHGNASLLFRRTKATAPGPEGGGTLHPNPTDKTSSIQSRPLPSPPKFTSQDSPDGQYENSEGGWMEDYDYVHLQGKEEFEKTQKELLEKGSITRQGKSQLELQQLKQFERLEQEVSRPIDHDLANWTPAQPLAPGRTGGLGPSDRQLLLFYLEQCEANLTTLTNAVDAFFTAVATNQPPKIFVAHSKFVILSAHKLVFIGDTLSRQAKAADVRSQVTHYSNLLCDLLRGIVATTKAAALQYPSPSAAQDMVERVKELGHSTQQFRRVLGQLAAA

SEQ ID NO: 5148 - protein, 916 aa, Homo sapiens
MPAKPFLSSVLLSWKVLDFSGPGPQGTGQPCSCGHWAEGQGGPPEPAGGPNVLAKALYDNVAESPDELSFRKGDIMTVLEQDTQGLDGWWLCSLHGRQGIVPGNRLKILVGMYDKKPAGPGPGPPATPAQPQPGLHAPAPPASQYTPMLPNTYQPQPDSVYLVPTPSKAQQGLYQVPGPSPQFQSPPAKQTSTFSKQTPHHPFPSPATDLYQVPPGPGGPAQDIYQVPPSAGMGHDIYQVPPSMDTRSWEGTKPPAKVVVPTRVGQGYVYEAAQPEQDEYDIPRHLLAPGPQDIYDVPPVRGLLPSQYGQEVYDTPPMAVKGPNGRDPLLEVYDVPPSVEKGLPPSNHHAVYDVPPSVSKDVPDGPLLREETYDVPPAFAKAKPFDPARTPLVLAAPPPDSPPAEDVYDVPPPAPDLYDVPPGLRRPGPGTLYDVPRERVLPPEVADGGVVDSGVYAVPPPAEREAPAEGKRLSASSTGSTRSSQSASSLEVAGPGREPLELEVAVEALARLQQGVSATVAHLLDLAGSAGATGSWRSPSEPQEPLVQDLQAAVAAVQSAVHELLEFARSAVGNAAHTSDRALHAKLSRQLQKMEDVHQTLVAHGQALDAGRGGSGATLEDLDRLVACSRAVPEDAKQLASFLHGNASLLFRRTKATAPGPEGGGTLHPNPTDKTSSIQSRPLPSPPKFTSQDSPDGQYENSEGGWMEDYDYVHLQGKEEFEKTQKELLEKGSITRQGKSQLELQQLKQFERLEQEVSRPIDHDLANWTPAQPLAPGRTGGLGPSDRQLLLFYLEQCEANLTTLTNAVDAFFTAVATNQPPKIFVAHSKFVILSAHKLVFIGDTLSRQAKAADVRSQVTHYSNLLCDLLRGIVATTKAAALQYPSPSAAQDMVERVKELGHSTQQFRRVLGQLAAA

SEQ ID NO: 5149 - protein, 888 aa, Homo sapiens
MLTHRPQEAEQRGRTPGPSFEWNVLAKALYDNVAESPDELSFRKGDIMTVLEQDTQGLDGWWLCSLHGRQGIVPGNRLKILVGMYDKKPAGPGPGPPATPAQPQPGLHAPAPPASQYTPMLPNTYQPQPDSVYLVPTPSKAQQGLYQVPGPSPQFQSPPAKQTSTFSKQTPHHPFPSPATDLYQVPPGPGGPAQDIYQVPPSAGMGHDIYQVPPSMDTRSWEGTKPPAKVVVPTRVGQGYVYEAAQPEQDEYDIPRHLLAPGPQDIYDVPPVRGLLPSQYGQEVYDTPPMAVKGPNGRDPLLEVYDVPPSVEKGLPPSNHHAVYDVPPSVSKDVPDGPLLREETYDVPPAFAKAKPFDPARTPLVLAAPPPDSPPAEDVYDVPPPAPDLYDVPPGLRRPGPGTLYDVPRERVLPPEVADGGVVDSGVYAVPPPAEREAPAEGKRLSASSTGSTRSSQSASSLEVAGPGREPLELEVAVEALARLQQGVSATVAHLLDLAGSAGATGSWRSPSEPQEPLVQDLQAAVAAVQSAVHELLEFARSAVGNAAHTSDRALHAKLSRQLQKMEDVHQTLVAHGQALDAGRGGSGATLEDLDRLVACSRAVPEDAKQLASFLHGNASLLFRRTKATAPGPEGGGTLHPNPTDKTSSIQSRPLPSPPKFTSQDSPDGQYENSEGGWMEDYDYVHLQGKEEFEKTQKELLEKGSITRQGKSQLELQQLKQFERLEQEVSRPIDHDLANWTPAQPLAPGRTGGLGPSDRQLLLFYLEQCEANLTTLTNAVDAFFTAVATNQPPKIFVAHSKFVILSAHKLVFIGDTLSRQAKAADVRSQVTHYSNLLCDLLRGIVATTKAAALQYPSPSAAQDMVERVKELGHSTQQFRRVLGQLAAA

SEQ ID NO: 5150 - protein, 722 aa, Homo sapiens
MQGKNVLAKALYDNVAESPDELSFRKGDIMTVLEQDTQGLDGWWLCSLHGRQGIVPGNRLKILVVVPTRVGQGYVYEAAQPEQDEYDIPRHLLAPGPQDIYDVPPVRGLLPSQYGQEVYDTPPMAVKGPNGRDPLLEVYDVPPSVEKGLPPSNHHAVYDVPPSVSKDVPDGPLLREETYDVPPAFAKAKPFDPARTPLVLAAPPPDSPPAEDVYDVPPPAPDLYDVPPGLRRPGPGTLYDVPRERVLPPEVADGGVVDSGVYAVPPPAEREAPAEGKRLSASSTGSTRSSQSASSLEVAGPGREPLELEVAVEALARLQQGVSATVAHLLDLAGSAGATGSWRSPSEPQEPLVQDLQAAVAAVQSAVHELLEFARSAVGNAAHTSDRALHAKLSRQLQKMEDVHQTLVAHGQALDAGRGGSGATLEDLDRLVACSRAVPEDAKQLASFLHGNASLLFRRTKATAPGPEGGGTLHPNPTDKTSSIQSRPLPSPPKFTSQDSPDGQYENSEGGWMEDYDYVHLQGKEEFEKTQKELLEKGSITRQGKSQLELQQLKQFERLEQEVSRPIDHDLANWTPAQPLAPGRTGGLGPSDRQLLLFYLEQCEANLTTLTNAVDAFFTAVATNQPPKIFVAHSKFVILSAHKLVFIGDTLSRQAKAADVRSQVTHYSNLLCDLLRGIVATTKAAALQYPSPSAAQDMVERVKELGHSTQQFRRVLGQLAAA

SEQ ID NO: 5151 - protein, 870 aa, Homo sapiens
MSVPNVLAKALYDNVAESPDELSFRKGDIMTVLEQDTQGLDGWWLCSLHGRQGIVPGNRLKILVGMYDKKPAGPGPGPPATPAQPQPGLHAPAPPASQYTPMLPNTYQPQPDSVYLVPTPSKAQQGLYQVPGPSPQFQSPPAKQTSTFSKQTPHHPFPSPATDLYQVPPGPGGPAQDIYQVPPSAGMGHDIYQVPPSMDTRSWEGTKPPAKVVVPTRVGQGYVYEAAQPEQDEYDIPRHLLAPGPQDIYDVPPVRGLLPSQYGQEVYDTPPMAVKGPNGRDPLLEVYDVPPSVEKGLPPSNHHAVYDVPPSVSKDVPDGPLLREETYDVPPAFAKAKPFDPARTPLVLAAPPPDSPPAEDVYDVPPPAPDLYDVPPGLRRPGPGTLYDVPRERVLPPEVADGGVVDSGVYAVPPPAEREAPAEGKRLSASSTGSTRSSQSASSLEVAGPGREPLELEVAVEALARLQQGVSATVAHLLDLAGSAGATGSWRSPSEPQEPLVQDLQAAVAAVQSAVHELLEFARSAVGNAAHTSDRALHAKLSRQLQKMEDVHQTLVAHGQALDAGRGGSGATLEDLDRLVACSRAVPEDAKQLASFLHGNASLLFRRTKATAPGPEGGGTLHPNPTDKTSSIQSRPLPSPPKFTSQDSPDGQYENSEGGWMEDYDYVHLQGKEEFEKTQKELLEKGSITRQGKSQLELQQLKQFERLEQEVSRPIDHDLANWTPAQPLAPGRTGGLGPSDRQLLLFYLEQCEANLTTLTNAVDAFFTAVATNQPPKIFVAHSKFVILSAHKLVFIGDTLSRQAKAADVRSQVTHYSNLLCDLLRGIVATTKAAALQYPSPSAAQDMVERVKELGHSTQQFRRVLGQLAAA

SEQ ID NO: 5152 - protein, 868 aa, Homo sapiens
MENVLAKALYDNVAESPDELSFRKGDIMTVLEQDTQGLDGWWLCSLHGRQGIVPGNRLKILVGMYDKKPAGPGPGPPATPAQPQPGLHAPAPPASQYTPMLPNTYQPQPDSVYLVPTPSKAQQGLYQVPGPSPQFQSPPAKQTSTFSKQTPHHPFPSPATDLYQVPPGPGGPAQDIYQVPPSAGMGHDIYQVPPSMDTRSWEGTKPPAKVVVPTRVGQGYVYEAAQPEQDEYDIPRHLLAPGPQDIYDVPPVRGLLPSQYGQEVYDTPPMAVKGPNGRDPLLEVYDVPPSVEKGLPPSNHHAVYDVPPSVSKDVPDGPLLREETYDVPPAFAKAKPFDPARTPLVLAAPPPDSPPAEDVYDVPPPAPDLYDVPPGLRRPGPGTLYDVPRERVLPPEVADGGVVDSGVYAVPPPAEREAPAEGKRLSASSTGSTRSSQSASSLEVAGPGREPLELEVAVEALARLQQGVSATVAHLLDLAGSAGATGSWRSPSEPQEPLVQDLQAAVAAVQSAVHELLEFARSAVGNAAHTSDRALHAKLSRQLQKMEDVHQTLVAHGQALDAGRGGSGATLEDLDRLVACSRAVPEDAKQLASFLHGNASLLFRRTKATAPGPEGGGTLHPNPTDKTSSIQSRPLPSPPKFTSQDSPDGQYENSEGGWMEDYDYVHLQGKEEFEKTQKELLEKGSITRQGKSQLELQQLKQFERLEQEVSRPIDHDLANWTPAQPLAPGRTGGLGPSDRQLLLFYLEQCEANLTTLTNAVDAFFTAVATNQPPKIFVAHSKFVILSAHKLVFIGDTLSRQAKAADVRSQVTHYSNLLCDLLRGIVATTKAAALQYPSPSAAQDMVERVKELGHSTQQFRRVLGQLAAA

SEQ ID NO: 5153 - protein, 841 aa, Homo sapiens
MTVLEQDTQGLDGWWLCSLHGRQGIVPGNRLKILVGMYDKKPAGPGPGPPATPAQPQPGLHAPAPPASQYTPMLPNTYQPQPDSVYLVPTPSKAQQGLYQVPGPSPQFQSPPAKQTSTFSKQTPHHPFPSPATDLYQVPPGPGGPAQDIYQVPPSAGMGHDIYQVPPSMDTRSWEGTKPPAKVVVPTRVGQGYVYEAAQPEQDEYDIPRHLLAPGPQDIYDVPPVRGLLPSQYGQEVYDTPPMAVKGPNGRDPLLEVYDVPPSVEKGLPPSNHHAVYDVPPSVSKDVPDGPLLREETYDVPPAFAKAKPFDPARTPLVLAAPPPDSPPAEDVYDVPPPAPDLYDVPPGLRRPGPGTLYDVPRERVLPPEVADGGVVDSGVYAVPPPAEREAPAEGKRLSASSTGSTRSSQSASSLEVAGPGREPLELEVAVEALARLQQGVSATVAHLLDLAGSAGATGSWRSPSEPQEPLVQDLQAAVAAVQSAVHELLEFARSAVGNAAHTSDRALHAKLSRQLQKMEDVHQTLVAHGQALDAGRGGSGATLEDLDRLVACSRAVPEDAKQLASFLHGNASLLFRRTKATAPGPEGGGTLHPNPTDKTSSIQSRPLPSPPKFTSQDSPDGQYENSEGGWMEDYDYVHLQGKEEFEKTQKELLEKGSITRQGKSQLELQQLKQFERLEQEVSRPIDHDLANWTPAQPLAPGRTGGLGPSDRQLLLFYLEQCEANLTTLTNAVDAFFTAVATNQPPKIFVAHSKFVILSAHKLVFIGDTLSRQAKAADVRSQVTHYSNLLCDLLRGIVATTKAAALQYPSPSAAQDMVERVKELGHSTQQFRRVLGQLAAA

SEQ ID NO: 5154 - protein, 246 aa, Homo sapiens
MPVQPPSKDTEEMEAEGDSAAEMNGEEEESEEERSGSQTESEEESSEMDDEDYERRRSECVSEMLDLEKQFSELKEKLFRERLSQLRLRLEEVGAERAPEYTEPLGGLQRSLKIRIQVAGIYKGFCLDVIRNKYECELQGAKQHLESEKLLLYDTLQGELQERIQRLEEDRQSLDLSSEWWDDKLHARGSSRSWDSLPPSKRKKAPLVSGPYIVYMLQEIDILEDWTAIKKARAAVSPQKRKSDGP

SEQ ID NO: 5155 - protein, 290 aa, Homo sapiens
MPVQPPSKDTEEMEAEGDSAAEMNGEEEESEEERSGSQTESEEESSEMDDEDYERRRSECVSEMLDLEKQFSELKEKLFRERLSQLRLRLEEVGAERAPEYTEPLGGLQRSLKIRIQVAGIYKGFCLDVIRNKYECELQGAKQHLESEKLLLYDTLQGELQERIQRLEEDRQSLDLSSEWWDDKLHARGSSRSWDSLPPSKRKKAPLVSGPYIVYMLQEIDILEDWTAIKKARAAVSPQKRKSDDRRTHRPLRVCPARLLWCCWALPLHLALAWTPPLPSSRPAQLWPWS

SEQ ID NO: 5156 - protein, 244 aa, Homo sapiens
MPVQPPSKDTEEMEAEGDSAAEMNGEEEESEEERSGSQTESEEESSEMDDEDYERRRSECVSEMLDLEKQFSELKEKLFRERLSQLRLRLEEVGAERAPEYTEPLGGLQRSLKIRIQVAGIYKGFCLDVIRNKYECELQGAKQHLESEKLLLYDTLQGELQERIQRLEEDRQSLDLSSEWWDDKLHARGSSRSWDSLPPSKRKKAPLVSGPYIVYMLQEIDILEDWTAIKKARAAVSPQKRKSD

SEQ ID NO: 5157 - protein, 497 aa, Homo sapiens
MAEMGSKGVTAGKIASNVQKKLTRAQEKVLQKLGKADETKDEQFEQCVQNFNKQLTEGTRLQKDLRTYLASVKAMHEASKKLNECLQEVYEPDWPGRDEANKIAENNDLLWMDYHQKLVDQALLTMDTYLGQFPDIKSRIAKRGRKLVDYDSARHHYESLQTAKKKDEAKIAKAEEELIKAQKVFEEMNVDLQEELPSLWNSRVGFYVNTFQSIAGLEENFHKEMSKLNQNLNDVLVGLEKQHGSNTFTVKAQPRKKSKLFSRLRRKKNSDNAPAKGNKSPSPPDGSPAATPEIRVNHEPEPAGGATPGATLPKSPSQLRKGPPVPPPPKHTPSKEVKQEQILSLFEDTFVPEISVTTPSQPAEASEVAGGTQPAAGAQEPGETAASEAASSSLPAVVVETFPATVNGTVEGGSGAGRLDLPPGFMFKVQAQHDYTATDTDELQLKAGDVVLVIPFQNPEEQDEGWLMGVKESDWNQHKELEKCRGVFPENFTERVP

SEQ ID NO: 5158 - protein, 593 aa, Homo sapiens
MAEMGSKGVTAGKIASNVQKKLTRAQEKVLQKLGKADETKDEQFEQCVQNFNKQLTEGTRLQKDLRTYLASVKAMHEASKKLNECLQEVYEPDWPGRDEANKIAENNDLLWMDYHQKLVDQALLTMDTYLGQFPDIKSRIAKRGRKLVDYDSARHHYESLQTAKKKDEAKIAKPVSLLEKAAPQWCQGKLQAHLVAQTNLLRNQAEEELIKAQKVFEEMNVDLQEELPSLWNSRVGFYVNTFQSIAGLEENFHKEMSKLNQNLNDVLVGLEKQHGSNTFTVKAQPSDNAPAKGNKSPSPPDGSPAATPEIRVNHEPEPAGGATPGATLPKSPSQLRKGPPVPPPPKHTPSKEVKQEQILSLFEDTFVPEISVTTPSQFEAPGPFSEQASLLDLDFDPLPPVTSPVKAPTPSGQSIPWDLWEPTESPAGSLPSGEPSAAEGTFAVSWPSQTAEPGPAQPAEASEVAGGTQPAAGAQEPGETAASEAASSSLPAVVVETFPATVNGTVEGGSGAGRLDLPPGFMFKVQAQHDYTATDTDELQLKAGDVVLVIPFQNPEEQDEGWLMGVKESDWNQHKELEKCRGVFPENFTERVP

SEQ ID NO: 5159 - protein, 518 aa, Homo sapiens
MAEMGSKGVTAGKIASNVQKKLTRAQEKVLQKLGKADETKDEQFEQCVQNFNKQLTEGTRLQKDLRTYLASVKAMHEASKKLNECLQEVYEPDWPGRDEANKIAENNDLLWMDYHQKLVDQALLTMDTYLGQFPDIKSRIAKRGRKLVDYDSARHHYESLQTAKKKDEAKIAKAEEELIKAQKVFEEMNVDLQEELPSLWNSRVGFYVNTFQSIAGLEENFHKEMSKLNQNLNDVLVGLEKQHGSNTFTVKAQPSDNAPAKGNKSPSPPDGSPAATPEIRVNHEPEPAGGATPGATLPKSPSQLRKGPPVPPPPKHTPSKEVKQEQILSLFEDTFVPEISVTTPSQPTESPAGSLPSGEPSAAEGTFAVSWPSQTAEPGPAQPAEASEVAGGTQPAAGAQEPGETAASEAASSSLPAVVVETFPATVNGTVEGGSGAGRLDLPPGFMFKVQAQHDYTATDTDELQLKAGDVVLVIPFQNPEEQDEGWLMGVKESDWNQHKELEKCRGVFPENFTERVP

SEQ ID NO: 5160 - protein, 409 aa, Homo sapiens
MAEMGSKGVTAGKIASNVQKKLTRAQEKVLQKLGKADETKDEQFEQCVQNFNKQLTEGTRLQKDLRTYLASVKAMHEASKKLNECLQEVYEPDWPGRDEANKIAENNDLLWMDYHQKLVDQALLTMDTYLGQFPDIKSRIAKRGRKLVDYDSARHHYESLQTAKKKDEAKIAKAEEELIKAQKVFEEMNVDLQEELPSLWNSRVGFYVNTFQSIAGLEENFHKEMSKLNQNLNDVLVGLEKQHGSNTFTVKAQPSDNAPAKGNKSPSPPDGSPAATPEIRVNHEPEPAGGATPGATLPKSPSQSSLPAVVVETFPATVNGTVEGGSGAGRLDLPPGFMFKVQAQHDYTATDTDELQLKAGDVVLVIPFQNPEEQDEGWLMGVKESDWNQHKELEKCRGVFPENFTERVP

SEQ ID NO: 5161 - protein, 506 aa, Homo sapiens
MAEMGSKGVTAGKIASNVQKKLTRAQEKVLQKLGKADETKDEQFEQCVQNFNKQLTEGTRLQKDLRTYLASVKAMHEASKKLNECLQEVYEPDWPGRDEANKIAENNDLLWMDYHQKLVDQALLTMDTYLGQFPDIKSRIAKRGRKLVDYDSARHHYESLQTAKKKDEAKIAKPVSLLEKAAPQWCQGKLQAHLVAQTNLLRNQAEEELIKAQKVFEEMNVDLQEELPSLWNSRVGFYVNTFQSIAGLEENFHKEMSKLNQNLNDVLVGLEKQHGSNTFTVKAQPSDNAPAKGNKSPSPPDGSPAATPEIRVNHEPEPAGGATPGATLPKSPSQPTESPAGSLPSGEPSAAEGTFAVSWPSQTAEPGPAQPAEASEVAGGTQPAAGAQEPGETAASEAASSSLPAVVVETFPATVNGTVEGGSGAGRLDLPPGFMFKVQAQHDYTATDTDELQLKAGDVVLVIPFQNPEEQDEGWLMGVKESDWNQHKELEKCRGVFPENFTERVP

SEQ ID NO: 5162 - protein, 454 aa, Homo sapiens
MAEMGSKGVTAGKIASNVQKKLTRAQEKVLQKLGKADETKDEQFEQCVQNFNKQLTEGTRLQKDLRTYLASVKAMHEASKKLNECLQEVYEPDWPGRDEANKIAENNDLLWMDYHQKLVDQALLTMDTYLGQFPDIKSRIAKRGRKLVDYDSARHHYESLQTAKKKDEAKIAKAEEELIKAQKVFEEMNVDLQEELPSLWNSRVGFYVNTFQSIAGLEENFHKEMSKLNQNLNDVLVGLEKQHGSNTFTVKAQPRKKSKLFSRLRRKKNSDNAPAKGNKSPSPPDGSPAATPEIRVNHEPEPAGGATPGATLPKSPSQPAEASEVAGGTQPAAGAQEPGETAASEAASSSLPAVVVETFPATVNGTVEGGSGAGRLDLPPGFMFKVQAQHDYTATDTDELQLKAGDVVLVIPFQNPEEQDEGWLMGVKESDWNQHKELEKCRGVFPENFTERVP

SEQ ID NO: 5163 - protein, 550 aa, Homo sapiens
MAEMGSKGVTAGKIASNVQKKLTRAQEKVLQKLGKADETKDEQFEQCVQNFNKQLTEGTRLQKDLRTYLASVKAMHEASKKLNECLQEVYEPDWPGRDEANKIAENNDLLWMDYHQKLVDQALLTMDTYLGQFPDIKSRIAKRGRKLVDYDSARHHYESLQTAKKKDEAKIAKPVSLLEKAAPQWCQGKLQAHLVAQTNLLRNQAEEELIKAQKVFEEMNVDLQEELPSLWNSRVGFYVNTFQSIAGLEENFHKEMSKLNQNLNDVLVGLEKQHGSNTFTVKAQPSDNAPAKGNKSPSPPDGSPAATPEIRVNHEPEPAGGATPGATLPKSPSQFEAPGPFSEQASLLDLDFDPLPPVTSPVKAPTPSGQSIPWDLWEPTESPAGSLPSGEPSAAEGTFAVSWPSQTAEPGPAQPAEASEVAGGTQPAAGAQEPGETAASEAASSSLPAVVVETFPATVNGTVEGGSGAGRLDLPPGFMFKVQAQHDYTATDTDELQLKAGDVVLVIPFQNPEEQDEGWLMGVKESDWNQHKELEKCRGVFPENFTERVP

SEQ ID NO: 5164 - protein, 482 aa, Homo sapiens
MAEMGSKGVTAGKIASNVQKKLTRAQEKVLQKLGKADETKDEQFEQCVQNFNKQLTEGTRLQKDLRTYLASVKAMHEASKKLNECLQEVYEPDWPGRDEANKIAENNDLLWMDYHQKLVDQALLTMDTYLGQFPDIKSRIAKRGRKLVDYDSARHHYESLQTAKKKDEAKIAKAEEELIKAQKVFEEMNVDLQEELPSLWNSRVGFYVNTFQSIAGLEENFHKEMSKLNQNLNDVLVGLEKQHGSNTFTVKAQPSDNAPAKGNKSPSPPDGSPAATPEIRVNHEPEPAGGATPGATLPKSPSQLRKGPPVPPPPKHTPSKEVKQEQILSLFEDTFVPEISVTTPSQPAEASEVAGGTQPAAGAQEPGETAASEAASSSLPAVVVETFPATVNGTVEGGSGAGRLDLPPGFMFKVQAQHDYTATDTDELQLKAGDVVLVIPFQNPEEQDEGWLMGVKESDWNQHKELEKCRGVFPENFTERVP

SEQ ID NO: 5165 - protein, 475 aa, Homo sapiens
MAEMGSKGVTAGKIASNVQKKLTRAQEKVLQKLGKADETKDEQFEQCVQNFNKQLTEGTRLQKDLRTYLASVKAMHEASKKLNECLQEVYEPDWPGRDEANKIAENNDLLWMDYHQKLVDQALLTMDTYLGQFPDIKSRIAKRGRKLVDYDSARHHYESLQTAKKKDEAKIAKAEEELIKAQKVFEEMNVDLQEELPSLWNSRVGFYVNTFQSIAGLEENFHKEMSKLNQNLNDVLVGLEKQHGSNTFTVKAQPSDNAPAKGNKSPSPPDGSPAATPEIRVNHEPEPAGGATPGATLPKSPSQPTESPAGSLPSGEPSAAEGTFAVSWPSQTAEPGPAQPAEASEVAGGTQPAAGAQEPGETAASEAASSSLPAVVVETFPATVNGTVEGGSGAGRLDLPPGFMFKVQAQHDYTATDTDELQLKAGDVVLVIPFQNPEEQDEGWLMGVKESDWNQHKELEKCRGVFPENFTERVP

SEQ ID NO: 5166 - protein, 439 aa, Homo sapiens
MAEMGSKGVTAGKIASNVQKKLTRAQEKVLQKLGKADETKDEQFEQCVQNFNKQLTEGTRLQKDLRTYLASVKAMHEASKKLNECLQEVYEPDWPGRDEANKIAENNDLLWMDYHQKLVDQALLTMDTYLGQFPDIKSRIAKRGRKLVDYDSARHHYESLQTAKKKDEAKIAKAEEELIKAQKVFEEMNVDLQEELPSLWNSRVGFYVNTFQSIAGLEENFHKEMSKLNQNLNDVLVGLEKQHGSNTFTVKAQPSDNAPAKGNKSPSPPDGSPAATPEIRVNHEPEPAGGATPGATLPKSPSQPAEASEVAGGTQPAAGAQEPGETAASEAASSSLPAVVVETFPATVNGTVEGGSGAGRLDLPPGFMFKVQAQHDYTATDTDELQLKAGDVVLVIPFQNPEEQDEGWLMGVKESDWNQHKELEKCRGVFPENFTERVP

SEQ ID NO: 5167 - protein, 651 aa, Homo sapiens
MGKKHKKHKSDKHLYEEYVEKPLKLVLKVGGNEVTELSTGSSGHDSSLFEDKNDHDKHKDRKRKKRKKGEKQIPGEEKGRKRRRVKEDKKKRDRDRVENEAEKDLQCHAPVRLDLPPEKPLTSSLAKQEEVEQTPLQEALNQLMRQLQRKDPSAFFSFPVTDFIAPGYSMIIKHPMDFSTMKEKIKNNDYQSIEELKDNFKLMCTNAMIYNKPETIYYKAAKKLLHSGMKILSQERIQSLKQSIDFMADLQKTRKQKDGTDTSQSGEDGGCWQREREDSGDAEAHAFKSPSKENKKKDKDMLEDKFKSNNLEREQEQLDRIVKESGGKLTRRLVNSQCEFERRKPDGTTTLGLLHPVDPIVGEPGYCPVRLGMTTGRLQSGVNTLQGFKEDKRNKVTPVLYLNYGPYSSYAPHYDSTFANISKDDSDLIYSTYGEDSDLPSDFSIHEFLATCQDYPYVMADSLLDVLTKGGHSRTLQEMEMSLPEDEGHTRTLDTAKEMEITEVEPPGRLDSSTQDRLIALKAVTNFGVPVEVFDSEEAEIFQKKLDETTRLLRELQEAQNERLSTRPPPNMICLLGPSYREMHLAEQVTNNLKELAQQVTPGDIVSTYGVRKAMGISIPSPVMENNFVDLTEDTEEPKKTDVAECGPGGS

SEQ ID NO: 5168 - protein, 652 aa, Homo sapiens
MGKKHKKHKSDKHLYEEYVEKPLKLVLKVGGNEVTELSTGSSGHDSSLFEDKNDHDKHKDRKRKKRKKGEKQIPGEEKGRKRRRVKEDKKKRDRDRVENEAEKDLQCHAPVRLDLPPEKPLTSSLAKQEEVEQTPLQEALNQLMRQLQRKDPSAFFSFPVTDFIAPGYSMIIKHPMDFSTMKEKIKNNDYQSIEELKDNFKLMCTNAMIYNKPETIYYKAAKKLLHSGMKILSQERIQSLKQSIDFMADLQKTRKQKDGTDTSQSGEDGGCWQREREDSGDAEAHAFKSPSKENKKKDKDMLEDKFKSNNLEREQEQLDRIVKESGGKLTRRLVNSQCEFERRKPDGTTTLGLLHPVDPIVGEPGYCPVRLGMTTGRLQSGVNTLQGFKEDKRNKVTPVLYLNYGPYSSYAPHYDSTFANISKDDSDLIYSTYGEDSDLPSDFSIHEFLATCQDYPYVMADSLLDVLTKGGHSRTLQEMEMSLPEDEGHTRTLDTAKEMEQITEVEPPGRLDSSTQDRLIALKAVTNFGVPVEVFDSEEAEIFQKKLDETTRLLRELQEAQNERLSTRPPPNMICLLGPSYREMHLAEQVTNNLKELAQQVTPGDIVSTYGVRKAMGISIPSPVMENNFVDLTEDTEEPKKTDVAECGPGGS

SEQ ID NO: 5169 - protein, 652 aa, Homo sapiens; identical to SEQ ID NO: 5168

SEQ ID NO: 5170 - protein, 659 aa, Homo sapiens
MAAVILESIFLKRSQQKKKTSPLNFKKRLFLLTVHKLSYYEYDFERGRRGSKKGSIDVEKITCVETVVPEKNPPPERQIPRRGEESSEMEQISIIERFPYPFQVVYDEGPLYVFSPTEELRKRWIHQLKNVIRYNSDLVQKYHPCFWIDGQYLCCSQTAKNAMGCQILENRNGSLKPGSSHRKTKKPLPPTPEEDQILKKPLPPEPAAAPVSTSELKKVVALYDYMPMNANDLQLRKGDEYFILEESNLPWWRARDKNGQEGYIPSNYVTEAEDSIEMYEWYSKHMTRSQAEQLLKQEGKEGGFIVRDSSKAGKYTVSVFAKSTGDPQGVIRHYVVCSTPQSQYYLAEKHLFSTIPELINYHQHNSAGLISRLKYPVSQQNKNAPSTAGLGYGSWEIDPKDLTFLKELGTGQFGVVKYGKWRGQYDVAIKMIKEGSMSEDEFIEEAKVMMNLSHEKLVQLYGVCTKQRPIFIITEYMANGCLLNYLREMRHRFQTQQLLEMCKDVCEAMEYLESKQFLHRDLAARNCLVNDQGVVKVSDFGLSRYVLDDEYTSSVGSKFPVRWSPPEVLMYSKFSSKSDIWAFGVLMWEIYSLGKMPYERFTNSETAEHIAQGLRLYRPHLASEKVYTIMYSCWHEKADERPTFKILLSNILDVMDEES

SEQ ID NO: 5171 - protein, 208 aa, Homo sapiens
VIRHYVVCSTPQSQYYLAEKHLFSTIPELINYHQHNSAGLISRTQQLLEMCKDVCEAMEYLESKQFLHRDLAARNCLVNDQGVVKVSDFGLSRYVLDDEYTSSVGSKFPVRWSPPEVLMYSKFSSKSDIWAFGVLMWEIYSLGKMPYERFTNSETAEHIAQGLRLYRPHLASEKVYTIMYSCWHEKADERPTFKILLSNILDVMDEES

SEQ ID NO: 5172 - protein, 139 aa, Homo sapiens
VIRHYVVCSTPQSQYYLAEKHLFSTIPELINYHQHNSAGLISRLKYPVSQQNKNAPSTAGLGYGVLMWEIYSLGKMPYERFTNSETAEHIAQGLRLYRPHLASEKVYTIMYSCWHEKADERPTFKILLSNILDVMDEES

SEQ ID NO: 5173 - protein, 234 aa, Homo sapiens
RHYVVCSTPQSQYYLAEKHLFSTIPELINYHQHNSAGLISRLKYPVSQQNKNAPSTAGLGYGSWEIDPKDLTFLKELGTGQFGVVKYGKWRGQYDVAIKMIKEGSMSEDEFIEEAKVMMYVLDDEYTSSVGSKFPVRWSPPEVLMYSKFSSKSDIWAFGVLMWEIYSLGKMPYERFTNSETAEHIAQGLRLYRPHLASEKVYTIMYSCWHEKADERPTFKILLSNILDVMDEES

SEQ ID NO: 5174 - protein, 74 aa, Homo sapiens
VIRHYVVCSTPQSQYYLAEKHLFSTIPELINYHQHNSAGLISRLKYPVSQQNKNAPSTAGLGYGMSWMMNTQAQ

SEQ ID NO: 5175 - protein, 483 aa, Homo sapiens
MAAVILESIFLKRSQQKKKTSPLNFKKRLFLLTVHKLSYYEYDFERGRRGSKKGSIDVEKITCVETVVPEKNPPPERQIPRRGEESSEMEQISIIERFPYPFQVVYDEGPLYVFSPTEELRKRWIHQLKNVIRYNSDLVQKYHPCFWIDGQYLCCSQTAKNAMGCQILENRNGSLKPGSSHRKTKKPLPPTPEEDQILKKPLPPEPAAAPVSTSELKKVVALYDYMPMNANDLQLRKGDEYFILEESNLPWWRARDKNGQEGYIPSNYVTEAEDSIEMYEWYSKHMTRSQAEQLLKQEGKEGGFIVRDSSKAGKYTVSVFAKSTGDPQGVIRHYVVCSTPQSQYYLAARNCLVNDQGVVKVSDFGLSRYVLDDEYTSSVGSKFPVRWSPPEVLMYSKFSSKSDIWAFGVLMWEIYSLGKMPYERFTNSETAEHIAQGLRLYRPHLASEKVYTIMYSCWHEKADERPTFKILLSNILDVMDEES

SEQ ID NO: 5176 - protein, 172 aa, Homo sapiens
VIRHYVVCSTPQSQYYLAEKHLFSTIPELINYHQHNSAGLISRLKYPVSQQNKNAPSTAGLGYGSWEIDPKDLTFLKELGTGQFGVVKYGKWRGQYDVAIKMIKEGSMSEDEFIEEAKVMMNLSHEKLVQLYGVCTKQRPIFIITEYMANGCLPCTVAGMRKQMSVPLSKFF

SEQ ID NO: 5177 - protein, 197 aa, Homo sapiens
VIRHYVVCSTPQSQYYLAEKHLFSTIPELINYHQHNSAGLISRLKYPVSQQNKNAPSTAGLGYGSWEIDPKDLTFLKELGTGQFGVVKYGKWRGQYDVAIKMIKEGSMSEDEFIEEAKVMMNLSHEKLVQLYGVCTKQRPIFIITEYMANGCLLNYLREMRHRFQTQQLLEMCKDVCEAMEYLESKQFLHRDLVCPG

SEQ ID NO: 5178 - protein, 51 aa, Homo sapiens
IRHYVVCSTPQSQYYLAEKHLFSTIPELINYHQHNSAGEDSAAARDVQGCL

SEQ ID NO: 5179 - protein, 296 aa, Homo sapiens
MKNEIAAVVFFFTRLVRKHDKLKKEAVERFAEKLTLILQEKYKNHWYPEKPSKGQAYRCIRVNKFQRVDPDVLKACENSCILYSDLGLPKELTLWVDPCEVCCRRDGVSPCWPDCSQTPDLVIRPPWPPKALDYRREPLRPASSFLIMYGEKNNAFIVASFENKDENKDEISRKVTRALDKVTSDYHSGSSSSDEETSKEMEVKPSSVTAAASPVYQISELIFPPLPMWHPLPRKKPGMYRGNGHQNHYPPPVPFGYPNQGRKNKPYRPIPVTWVPPPGMHCDRNHWINPHMLAPH

SEQ ID NO: 5180 - protein, 252 aa, Homo sapiens
MKNEIAAVVFFFTRLVRKHDKLKKEAVERFAEKLTLILQEKYKNHWYPEKPSKGQAYRCIRVNKFQRVDPDVLKACENSCILYSDLGLPKELTLWVDPCEVCCRYGEKNNAFIVASFENKDENKDEISRKVTRALDKVTSDYHSGSSSSDEETSKEMEVKPSSVTAAASPVYQISELIFPPLPMWHPLPRKKPGMYRGNGHQNHYPPPVPFGYPNQGRKNKPYRPIPVTWVPPPGMHCDRNHWINPHMLAPH

SEQ ID NO: 5181 - protein, 46 aa, Homo sapiens
MKNEIAAVVFFFTRLVRKHDKLKKEAVERFAEKLTLILQEKYKNHW

SEQ ID NO: 5182 - protein, 519 aa, Homo sapiens
MMSEHDLADVVQIAVEDLSPDHPVVLENHVVTDEDEPALKRQRLEINCQDPSIKTICLRLDSIEAKLQALEATCKSLEEKLDLVTNKQHSPIQVPMVAGSPLGATQTCNKVRCVVPQTTVILNNDRQNAIVAKMEDPLSNRAPDSLENVISNAVPGRRQNTIVVKVPGQEDSHHEDGESGSEASDSVSSCGQAGSQSIGSNVTLITLNSEEDYPNGTWLGDENNPEMRVRCAIIPSDMLHISTNCRTAEKMALTLLDYLFHREVQAVSNLSGQGKHGKKQLDPLTIYGIRCHLFYKFGITESDWYRIKQSIDSKCRTAWRRKQRGQSLAVKSFSRRTPNSSSYCPSEPMMSTPPPASELPQPQPQPQALHYALANAQQVQIHQIGEDGQVQVGHLHIAQVPQGEQVQITQDSEGNLQIHHVGQDGQLLEATRIPCLLAPSVFKASSGQVLQGAQLIAVASSDPAAAGVDGSPLQGSDIQVQYVQLAPVSDHTAGAQTAEALQPTLQPEMQLEHGAIQIQ

SEQ ID NO: 5183 - protein, 465 aa, Homo sapiens
MMSEHDLADVVQIAVEDLSPDHPVVLENHVVTDEDEPALKRQRLEINCQDPSIKSFLYSINQTICLRLDSIEAKLQALEATCKSLEEKLDLVTNKQHSPIQVPMVAGSPLGATQTCNAVPGRRQNTIVVKVPGQEDSHHEDGESGSEASDSVSSCGQAGSQSIGSNVTLITLNSEEDYPNGTWLGDENNPEMRVRCAIIPSDMLHISTNCRTAEKMALTLLDYLFHREVQAVSNLSGQGKHGKKQLDPLTIYGIRCHLFYKFGITESDWYRIKQSIDSKCRTAWRRKQRGQSLAVKSFSRRTPNSSSYCPSEPMMSTPPPASELPQPQPQPQALHYALANAQQVQIHQIGEDGQVQVIPQGHLHIAQVPQGEQVQITQDSEGNLQIHHVGQDGQVLQGAQLIAVASSDPAAAGVDGSPLQGSDIQVQYVQLAPVSDHTAGAQTAEALQPTLQPEMQLEHGAIQIQ

SEQ ID NO: 5184 - protein, 469 aa, Homo sapiens
MMSEHDLADVVQIAVEDLSPDHPVVLENHVVTDEDEPALKRQRLEINCQDPSIKSFLYSINQTICLRLDSIEAKLQALEATCKSLEEKLDLVTNKQHSPIQVPMVAGSPLGATQTCNKVRCAVPGRRQNTIVVKVPGQEDSHHEDGESGSEASDSVSSCGQAGSQSIGSNVTLITLNSEEDYPNGTWLGDENNPEMRVRCAIIPSDMLHISTNCRTAEKMALTLLDYLFHREVQAVSNLSGQGKHGKKQLDPLTIYGIRCHLFYKFGITESDWYRIKQSIDSKCRTAWRRKQRGQSLAVKSFSRRTPNSSSYCPSEPMMSTPPPASELPQPQPQPQALHYALANAQQVQIHQIGEDGQVQVIPQGHLHIAQVPQGEQVQITQDSEGNLQIHHVGQDGQVLQGAQLIAVASSDPAAAGVDGSPLQGSDIQVQYVQLAPVSDHTAGAQTAEALQPTLQPEMQLEHGAIQIQ

SEQ ID NO: 5185 - protein, 497 aa, Homo sapiens
MMSEHDLADVVQIAVEDLSPDHPGTELWDIVLENHVVTDEDEPALKRQRLEINCQDPSIKSFLYSINQTICLRLDSIEAKLQALEATCKSLEEKLDLVTNKQHSPIQVPMVAGSPLGATQTCNKVRCAVPGRRQNTIVVKVPGQEDSHHEDGESGSEASDSVSSCGQAGSQSIGSNVTLITLNSEEDYPNGTWLGDENNPEMRVRCAIIPSDMLHISTNCRTAEKMALTLLDYLFHREVQAVSNLSGQGKHGKKQLDPLTIYGIRCHLFYKFGITESDWYRIKQSIDSKCRTAWRRKQRGQSLAVKSFSRRTPNSSSYCPSEPMMSTPPPASELPQPQPQPQALHYALANAQQVQIHQIGEDGQVQVIPQGHLHIAQVPQGEQVQITQDSEGNLQIHHVGQDGQLLEATRIPCLLAPSVFKASSGQVLQGAQLIAVASSDPAAAGVDGSPLQGSDIQVQYVQLAPVSDHTAGAQTAEALQPTLQPEMQLEHGAIQIQ

SEQ ID NO: 5186 - protein, 519 aa, Homo sapiens; identical to SEQ ID NO: 5182

SEQ ID NO: 5187 - protein, 491 aa, Homo sapiens
MMSEHDLADVVQIAVEDLSPDHPVVLENHVVTDEDEPALKRQRLEINCQDPSIKSFLYSINQTICLRLDSIEAKLQALEATCKSLEEKLDLVTNKQHSPIQVPMVAGSPLGATQTCNKVRCAVPGRRQNTIVVKVPGQEDSHHEDGESGSEASDSVSSCGQAGSQSIGSNVTLITLNSEEDYPNGTWLGDENNPEMRVRCAIIPSDMLHISTNCRTAEKMALTLLDYLFHREVQAVSNLSGQGKHGKKQLDPLTIYGIRCHLFYKFGITESDWYRIKQSIDSKCRTAWRRKQRGQSLAVKSFSRRTPNSSSYCPSEPMMSTPPPASELPQPQPQPQALHYALANAQQVQIHQIGEDGQVQVIPQGHLHIAQVPQGEQVQITQDSEGNLQIHHVGQDGQLLEATRIPCLLAPSVFKASSGQVLQGAQLIAVASSDPAAAGVDGSPLQGSDIQVQYVQLAPVSDHTAGAQTAEALQPTLQPEMQLEHGAIQIQ

SEQ ID NO: 5188 - protein, 118 aa, Homo sapiens
MMSEHDLADVVQIAVEDLSPDHPVVLENHVVTDEDEPALKRQRLEINCQDPSIKSFLYSINQTICLRLDSIEAKLQALEATCKSLEEKLDLVTNKQHSPIQVPMVAGSPLGATQTCNK

SEQ ID NO: 5189 - protein, 28 aa, Homo sapiens
MMSEHDLADVVQIAVEDLSPDHPVVLEN

SEQ ID NO: 5190 - protein, 95 aa, Homo sapiens
MMSEHDLADVVQIAVEDLSPDHPVVLENHVVTDEDEPALKRQRLEINCQDPSIKSFLYSINQTICLRLDSIEAKLQALEATCKSLEEKLDLVTNK

SEQ ID NO: 5191 - protein, 123 aa, Homo sapiens
MMSEHDLADVVQIAVEDLSPDHPVVLENHVVTDEDEPALKRQRLEINCQDPSIKSFLYSINQTICLRLDSIEAKLQALEATCKSLEEKLDLVTNKQHSPIQVPMVAGSPLGATQTCNKVRCVV

SEQ ID NO: 5192 - protein, 195 aa, Homo sapiens
MMSEHDLADVVQIAVEDLSPDHPGTELWDIVLENHVVTDEDEPALKRQRLEINCQDPSIKSFLYSINQTICLRLDSIEAKLQALEATCKSLEEKLDLVTNKQHSPIQVPMVAGSPLGATQTCNKVRCAVPGRRQNTIVVKVPGQEDSHHEDGESGSEASDSVSSCGQAGSQSIGSNVTLITLNSEEDYPNGTWLG

SEQ ID NO: 5193 - protein, 119 aa, Homo sapiens
MMSEHDLADVVQIAVEDLSPDHPVVLENHVVTDEDEPALKRQRLEINCQDPSIKSFLYSINQTICLRLDSIEAKLQALEATCKSLEEKLDLVTNKQHSPIQVPMVAGSPLGATQTCNKV

SEQ ID NO: 5194 - protein, 466 aa, Homo sapiens
MMSEHDLADVVQIAVEDLSPDHPVVLENHVVTDEDEPALKRQRLEINCQDPSIKSFLYSINQTICLRLDSIEAKLQALEATCKSLEEKLDLVTNKQHSPIQVPMVAGSPLGATQTCNKVRCAVPGRRQNTIVVKVPGQEDSHHEDGESGSEASDSVSSCGQAGSQSIGSNVTLITLNSEEDYPNGTWLGDENNPEMRVRCAIIPSDMLHISTNCRTAEKMALTLLDYLFHREVQAVSNLSGQGKHGKKQLDPLTIYGIRCHLFYKFGITESDWYRIKQSIDSKCRTAWRRKQRGQSLAVKSFSRRTPNSSSYCPSEPMMSTPPPASELPQPQPQPQALHYALANAQQVQIHQIGEDGQVQVGHLHIAQVPQGEQVQITQDSEGNLQIHHVGQDGQVLQGAQLIAVASSDPAAAGVDGSPLQGSDIQVQYVQLAPVSDHTAGAQTAEALQPTLQPEMQLEHGAIQIQ

SEQ ID NO: 5195 - protein, 250 aa, Homo sapiens
MGSPEPTQGPRLSPILIPYSGRRYKVGRASGALCHQDSLPPILELGLTFLRASAGFSVPTSSSFALPEPLRSLCLGNGEGLGLSLTLTVLAWILGLSGTLGALVLFMVATGIFQEALWHLLLLSFSVEALPCFFFFPFFLLCRCLRAELQIQQRLDGTLSLDLMRLESDGETGCAAESSVLQGAQLIAVASSDPAAAGVDGSPLQGSDIQVQYVQLAPVSDHTAGAQTAEALQPTLQPEMQLEHGAIQIQ

SEQ ID NO: 5196 - protein, 508 aa, Homo sapiens
MMSEHDLADVVQIAVEDLSPDHPVVLENHVVTDEDEPALKRQRLEINCQDPSIKSFLYSINQTICLRLDSIEAKLQALEATCKSLEEKLDLVTNKQHSPIQVPMVAGSPLGATQTCNKVRCVVPQTTVILNNDRQNAIVAKMEDPLSNRAPDSLENVISNAVPGRRQNTIVVKVPGQEDSHHEDGESGSEASDSVSSCGQAGSQSIGSNVTLITLNSEEDYPNGTWLGDENNPEMRVRCAIIPSDMLHISTNCRTAEKMALTLLDYLFHREVQAVSNLSGQGKHGKKQLDPLTIYGIRCHLFYKFGITESDWYRIKQSIDSKCRTAWRRKQRGQSLAVKSFSRRTPNSSSYCPSEPMMSTPPPASELPQPQPQPQALHYALANAQQVQIHQIGEDGQVQVIPQGHLHIAQVPQGEQVQITQDSEGNLQIHHVGQDGQVLQGAQLIAVASSDPAAAGVDGSPLQGSDIQVQYVQLAPVSDHTAGAQTAEALQPTLQPEMQLEHGAIQIQ

SEQ ID NO: 5197 - protein, 491 aa, Homo sapiens; identical to SEQ ID NO: 5187

SEQ ID NO: 5198 - protein, 1050 aa, Homo sapiens
MAAVKKEGGALSEAMSLEGDEWELSKENVQPLRQGRIMSTLQGALAQESACNNTLQQQKRAFEYEIRFYTGNDPLDVWDRYISWTEQNYPQGGKESNMSTLLERAVEALQGEKRYYSDPRFLNLWLKLGRLCNEPLDMYSYLHNQGIGVSLAQFYISWAEEYEARENFRKADAIFQEGIQQKAEPLERLQSQHRQFQARVSRQTLLALEKEEEEEVFESSVPQRSTLAELKSKGKKTARAPIIRVGGALKAPSQNRGLQNPFPQQMQNNSRITVFDENADEASTAELSKPTVQPWIAPPMPRAKENELQAGPWNTGRSLEHRPRGNTASLIAVPAVLPSFTPYVEETARQPVMTPCKIEPSINHILSTRKPGKEEGDPLQRVQSHQQASEEKKEKMMYCKEKIYAGVGEFSFEEIRAEVFRKKLKEQREAELLTSAEKRAEMQKQIEEMEKKLKEIQTTQQERTGDQQEETMPTKETTKLQIASESQKIPGMTLSSSVCQVNCCARETSLAENIWQEQPHSKGPSVPFSIFDEFLLSEKKNKSPPADPPRVLAQRRPLAVLKTSESITSNEDVSPDVCDEFTGIEPLSEDAIITGFRNVTICPNPEDTCDFARAARFVSTPFHEIMSLKDLPSDPERLLPEEDLDVKTSEDQQTACGTIYSQTLSIKKLSPIIEDSREATHSSGFSGSSASVASTSSIKCLQIPEKLELTNETSENPTQSPWCSQYRRQLLKSLPELSASAELCIEDRPMPKLEIEKEIELGNEDYCIKREYLICEDYKLFWVAPRNSAELTVIKVSSQPVPWDFYINLKLKERLNEDFDHFCSCYQYQDGCIVWHQYINCFTLQDLLQHSEYITHEITVLIIYNLLTIVEMLHKAEIVHGDLSPRCLILRNRIHDPYDCNKNNQALKIVDFSYSVDLRVQLDVFTLSGFRTVQILEGQKILANCSSPYQVDLFGIADLAHLLLFKEHLQVFWDGSFWKLSQNISELKDGELWNKFFVRILNANDEATVSVLGELAAEMNGVFDTTFQSHLNKALWKVGKLTSPGALLFQ

SEQ ID NO: 5199 - protein, 1064 aa, Homo sapiens
MAAVKKEGGALSEAMSLEGDEWELSKENVQPLRQGRIMSTLQGALAQESACNNTLQQQKRAFEYEIRFYTGNDPLDVWDRWVFLFHKDNRNINRYISWTEQNYPQGGKESNMSTLLERAVEALQGEKRYYSDPRFLNLWLKLGRLCNEPLDMYSYLHNQGIGVSLAQFYISWAEEYEARENFRKADAIFQEGIQQKAEPLERLQSQHRQFQARVSRQTLLALEKEEEEEVFESSVPQRSTLAELKSKGKKTARAPIIRVGGALKAPSQNRGLQNPFPQQMQNNSRITVFDENADEASTAELSKPTVQPWIAPPMPRAKENELQAGPWNTGRSLEHRPRGNTASLIAVPAVLPSFTPYVEETARQPVMTPCKIEPSINHILSTRKPGKEEGDPLQRVQSHQQASEEKKEKMMYCKEKIYAGVGEFSFEEIRAEVFRKKLKEQREAELLTSAEKRAEMQKQIEEMEKKLKEIQTTQQERTGDQQEETMPTKETTKLQIASESQKIPGMTLSSSVCQVNCCARETSLAENIWQEQPHSKGPSVPFSIFDEFLLSEKKNKSPPADPPRVLAQRRPLAVLKTSESITSNEDVSPDVCDEFTGIEPLSEDAIITGFRNVTICPNPEDTCDFARAARFVSTPFHEIMSLKDLPSDPERLLPEEDLDVKTSEDQQTACGTIYSQTLSIKKLSPIIEDSREATHSSGFSGSSASVASTSSIKCLQIPEKLELTNETSENPTQSPWCSQYRRQLLKSLPELSASAELCIEDRPMPKLEIEKEIELGNEDYCIKREYLICEDYKLFWVAPRNSAELTVIKVSSQPVPWDFYINLKLKERLNEDFDHFCSCYQYQDGCIVWHQYINCFTLQDLLQHSEYITHEITVLIIYNLLTIVEMLHKAEIVHGDLSPRCLILRNRIHDPYDCNKNNQALKIVDFSYSVDLRVQLDVFTLSGFRTVQILEGQKILANCSSPYQVDLFGIADLAHLLLFKEHLQVFWDGSFWKLSQNISELKDGELWNKFFVRILNANDEATVSVLGELAAEMNGVFDTTFQSHLNKALWKVGKLTSPGALLFQ

SEQ ID NO: 5200 - protein, 933 aa, Homo sapiens
MAAVKKEGGALSEAMSLEGDEWELSKENVQPLRQGRIMSTLQGALAQESACNNTLQQQKRAFEYEIRFYTGNDPLDVWDRYISWTEQNYPQGGKESNMSTLLERAVEALQGENFWKADAIFQEGIQQKAEPLERLQSQHRQFQARVSRQTLLALEKEEEEEVFESSVPQRSTLAELKSKGKKTARAPIIRVGGALKAPSQNRGLQNPFPQQMQNNSRITVFDENADEASTAELSKPTVQPWIAPPMPRAKENELQAGPWNTGRSLEHRPRGNTASLIAVPAVLPSFTPYVEETARQPVMTPCKIEPSINHILSTRKPGKEEGDPLQRVQSHQQASEEKKEKMMYCKEKIYAGVGEFSFEEIRAEVFRKKLKEQREAELLTSAEKRAEMQKQIEEMEKKLKEIQTTQQERTGDQQEETMPTKETTKLQIASESQKIPGMTLSSSVCQVNCCARETSLAENIWQEQPHSKVSLSLGPSVPFSIFDEFLLSEKKNKSPPADPPRVLAQRRPLAVLKTSESITSNEDVSPDVCDEFTGIEPLSEDAIITGFRNVTICPNPEDTREATHSSGFSGSSASVASTSSIKCLQIPEKLELTNETSENPTQSPWCSQYRRQLLKSLPELSASAELCIEDRPMPKLEIEKEIELGNEDYCIKREYLICEDYKLFWVAPRNSAELTVIKVSSQPVPWDFYINLKLKERLNEDFDHFCSCYQYQDGCIVWHQYINCFTLQDLLQHSEYITHEITVLIIYNLLTIVEMLHKAEIVHGDLSPRCLILRNRIHDPYDCNKNNQALKIVDFSYSVDLRVQLDVFTLSGFRTVQILEGQKILANCSSPYQVDLFGIADLAHLLLFKEHLQVFWDGSFWKLSQNISELKDGELWNKFFVRILNANDEATVSVLGELAAEMNGVFDTTFQSHLNKALWKVGKLTSPGALLFQ

SEQ ID NO: 5201 - protein, 1130 aa, Homo sapiens
MLEICLKLVGCKSKKGLSSSSSCYLEEALQRPVASDFEPQGLSEAARWNSKENLLAGPSENDPNLFVALYDFVASGDNTLSITKGEKLRVLGYNHNGEWCEAQTKNGQGWVPSNYITPVNSLEKHSWYHGPVSRNAAEYLLSSGINGSFLVRESESSPGQRSISLRYEGRVYHYRINTASDGKLYVSSESRFNTLAELVHHHSTVADGLITTLHYPAPKRNKPTVYGVSPNYDKWEMERTDITMKHKLGGGQYGEVYEGVWKKYSLTVAVKTLKEDTMEVEEFLKEAAVMKEIKHPNLVQLLGVCTREPPFYIITEFMTYGNLLDYLRECNRQEVNAVVLLYMATQISSAMEYLEKKNFIHRDLAARNCLVGENHLVKVADFGLSRLMTGDTYTAHAGAKFPIKWTAPESLAYNKFSIKSDVWAFGVLLWEIATYGMSPYPGIDLSQVYELLEKDYRMERPEGCPEKVYELMRACWQWNPSDRPSFAEIHQAFETMFQESSISDEVEKELGKQGVRGAVSTLLQAPELPTKTRTSRRAAEHRDTTDVPEMPHSKGQGESDPLDHEPAVSPLLPRKERGPPEGGLNEDERLLPKDKKTNLFSALIKKKKKTAPTPPKRSSSFREMDGQPERRGAGEEEGRDISNGALAFTPLDTADPAKSPKPSNGAGVPNGALRESGGSGFRSPHLWKKSSTLTSSRLATGEEEGGGSSSKRFLRSCSASCVPHGAKDTEWRSVTLPRDLQSTGRQFDSSTFGGHKSEKPALPRKRAGENRSDQVTRGTVTPPPRLVKKNEEAADEVFKDIMESSPGSSPPNLTPKPLRRQVTVAPASGLPHKEEAGKGSALGTPAAAEPVTPTSKAGSGAPGGTSKGPAEESRVRRHKHSSESPGRDKGKLSRLKPAPPPPPAASAGKAGGKPSQSPSQEAAGEAVLGAKTKATSLVDAVNSDAAKPSQPGEGLKKPVLPATPKPQSAKPSGTPISPAPVPSTLPSASSALAGDQPSSTAFIPLISTRVSLRKTRQPPERIASGAITKGVVLDSTEALCLAISRNSEQMASHSAVLEAGKNLYTFCVSYVDSIQQMRNKFAFREAINKLENNLRELQICPATAGSGPAATQDFSKLLSSVKEISDIVQR

SEQ ID NO: 5202 - protein, 1149 aa, Homo sapiens
MGQQPGKVLGDQRRPSLPALHFIKGAGKKESSRHGGPHCNVFVEHEALQRPVASDFEPQGLSEAARWNSKENLLAGPSENDPNLFVALYDFVASGDNTLSITKGEKLRVLGYNHNGEWCEAQTKNGQGWVPSNYITPVNSLEKHSWYHGPVSRNAAEYLLSSGINGSFLVRESESSPGQRSISLRYEGRVYHYRINTASDGKLYVSSESRFNTLAELVHHHSTVADGLITTLHYPAPKRNKPTVYGVSPNYDKWEMERTDITMKHKLGGGQYGEVYEGVWKKYSLTVAVKTLKEDTMEVEEFLKEAAVMKEIKHPNLVQLLGVCTREPPFYIITEFMTYGNLLDYLRECNRQEVNAVVLLYMATQISSAMEYLEKKNFIHRDLAARNCLVGENHLVKVADFGLSRLMTGDTYTAHAGAKFPIKWTAPESLAYNKFSIKSDVWAFGVLLWEIATYGMSPYPGIDLSQVYELLEKDYRMERPEGCPEKVYELMRACWQWNPSDRPSFAEIHQAFETMFQESSISDEVEKELGKQGVRGAVSTLLQAPELPTKTRTSRRAAEHRDTTDVPEMPHSKGQGESDPLDHEPAVSPLLPRKERGPPEGGLNEDERLLPKDKKTNLFSALIKKKKKTAPTPPKRSSSFREMDGQPERRGAGEEEGRDISNGALAFTPLDTADPAKSPKPSNGAGVPNGALRESGGSGFRSPHLWKKSSTLTSSRLATGEEEGGGSSSKRFLRSCSASCVPHGAKDTEWRSVTLPRDLQSTGRQFDSSTFGGHKSEKPALPRKRAGENRSDQVTRGTVTPPPRLVKKNEEAADEVFKDIMESSPGSSPPNLTPKPLRRQVTVAPASGLPHKEEAGKGSALGTPAAAEPVTPTSKAGSGAPGGTSKGPAEESRVRRHKHSSESPGRDKGKLSRLKPAPPPPPAASAGKAGGKPSQSPSQEAAGEAVLGAKTKATSLVDAVNSDAAKPSQPGEGLKKPVLPATPKPQSAKPSGTPISPAPVPSTLPSASSALAGDQPSSTAFIPLISTRVSLRKTRQPPERIASGAITKGVVLDSTEALCLAISRNSEQMASHSAVLEAGKNLYTFCVSYVDSIQQMRNKFAFREAINKLENNLRELQICPATAGSGPAATQDFSKLLSSVKEISDIVQR

SEQ ID NO: 5203 - protein, 64 aa, Homo sapiens
MGQQPGKVLGDQRRPSLPALHFIKGAGKKESSRHGGPHCNVFVEQALQRPVASDFEPQGLSEAA

SEQ ID NO: 5204 - protein, 161 aa, Homo sapiens
GRPGRSRARGGGEGGWRGGGRAGRAGPEPGPRAGRGVPAPDCWRGKMLEICLKLVGCKSKKGLSSSSSCYLEEALQRPVASDFEPQGLSEAARWNSKENLLAGPSENDPNLFVALYDFVASGDNTLSITKGEKLRVLGYNHNGEWCEAQTKNGQGWVPSNY

SEQ ID NO: 5205 - protein, 945 aa, Homo sapiens
LRLLREPLQHPGRVGSSSFNGGRRAHHHAPLSSPKAQQAHCLWCVPQLRQVGDGTHGHHHEAQGGGQYGEVYEGVWKKYSLTVAVKTLKEDTMEVEEFLKEAAVMKEIKHPNLVQLLGVCTREPPFYIITEFMTYGNLLDYLRECNRQEVNAVVLLYMATQISSAMEYLEKKNFIHRDLAARNCLVGENHLVKVADFGLSRLMTGDTYTAHAGAKFPIKWTAPESLAYNKFSIKSDVWAFGVLLWEIATYGMSPYPGIDLSQVYELLEKDYRMERPEGCPEKVYELMRACWQWNPSDRPSFAEIHQAFETMFQESSISDEVEKELGKQGVRGAVSTLLQAPELPTKTRTSRRAAEHRDTTDVPEMPHSKGQGESDPLDHEPAVSPLLPRKERGPPEGGLNEDERLLPKDKKTNLFSALIKKKKKTAPTPPKRSSSFREMDGQPERRGAGEEEGRDISNGALAFTPLDTADPAKSPKPSNGAGVPNGALRESGGSGFRSPHLWKKSSTLTSSRLATGEEEGGGSSSKRFLRSCSASCVPHGAKDTEWRSVTLPRDLQSTGRQFDSSTFGGHKSEKPALPRKRAGENRSDQVTRGTVTPPPRLVKKNEEAADEVFKDIMESSPGSSPPNLTPKPLRRQVTVAPASGLPHKEEAGKGSALGTPAAAEPVTPTSKAGSGAPGGTSKGPAEESRVRRHKHSSESPGRDKGKLSRLKPAPPPPPAASAGKAGGKPSQSPSQEAAGEAVLGAKTKATSLVDAVNSDAAKPSQPGEGLKKPVLPATPKPQSAKPSGTPISPAPVPSTLPSASSALAGDQPSSTAFIPLISTRVSLRKTRQPPERIASGAITKGVVLDSTEALCLAISRNSEQMASHSAVLEAGKNLYTFCVSYVDSIQQMRNKFAFREAINKLENNLRELQICPATAGSGPAATQDFSKLLSSVKEISDIVQR

SEQ ID NO: 5206 - protein, 882 aa, Homo sapiens
MGPWSRSLSALLLLLQVSSWLCQEPEPCHPGFDAESYTFTVPRRHLERGRVLGRVNFEDCTGRQRTAYFSLDTRFKVGTDGVITVKRPLRFHNPQIHFLVYAWDSTYRKFSTKVTLNTVGHHHRPPPHQASVSGIQAELLTFPNSSPGLRRQKRDWVIPPISCPENEKGPFPKNLVQIKSNKDKEGKVFYSITGQGADTPPVGVFIIERETGWLKVTEPLDRERIATYTLFSHAVSSNGNAVEDPMEILITVTDQNDNKPEFTQEVFKGSVMEGALPGTSVMEVTATDADDDVNTYNAAIAYTILSQDPELPDKNMFTINRNTGVISVVTTGLDRESFPTYTLVVQAADLQGEGLSTTATAVITVTDTNDNPPIFNPTTYKGQVPENEANVVITTLKVTDADAPNTPAWEAVYTILNDDGGQFVVTTNPVNNDGILKTAKGLDFEAKQQYILHVAVTNVVPFEVSLTTSTATVTVDVLDVNEAPIFVPPEKRVEVSEDFGVGQEITSYTAQEPDTFMEQKITYRIWRDTANWLEINPDTGAISTRAELDREDFEHVKNSTYTALIIATDNGSPVATGTGTLLLILSDVNDNAPIPEPRTIFFCERNPKPQVINIIDADLPPNTSPFTAELTHGASANWTIQYNDPTQESIILKPKMALEVGDYKINLKLMDNQNKDQVTTLEVSVCDCEGAAGVCRKAQPVEAGLQIPAILGILGGILALLILILLLLLFLRRRAVVKEPLLPPEDDTRDNVYYYDEEGGGEEDQDFDLSQLHRGLDARPEVTRNDVAPTLMSVPRYLPRPANPDEIGNFIDENLKAADTDPTAPPYDSLLVFDYEGSGSEAASLSSLNSSESDKDQDYDYLNEWGNRFKKLADMYGGGEDD

SEQ ID NO: 5207 - protein, 647 aa, Homo sapiens
MGPWSRSLSALLLLLQVSSWLCQEPEPCHPGFDAESYTFTVPRRHLERGRVLGRVNFEDCTGRQRTAYFSLDTRFKVGTDGVITVKRPLRFHNPQIHFLVYAWDSTYRKFSTKVTLNTVGHHHRPPPHQASVSGIQAELLTFPNSSPGLRRQKRDWVIPPISCPENEKGPFPKNLVQIKSNKDKEGKVFYSITGQGADTPPVGVFIIERETGWLKVTEPLDRERIATYTLFSHAVSSNGNAVEDPMEILITVTDQNDNKPEFTQEVFKGSVMEGALPGTSVMEVTATDADDDVNTYNAAIAYTILSQDPELPDKNMFTINRNTGVISVVTTGLDRESFPTYTLVVQAADLQGEGLSTTATAVITVTDTNDNPPIFNPTTYKGQVPENEANVVITTLKVTDADAPNTPAWEAVYTILNDDGGQFVVTTNPVNNDGILKTAKGLDFEAKQQYILHVAVTNVVPFEVSLTTSTATVTVDVLDVNEAPIFVPPEKRVEVSEDFGVGQEITSYTAQEPDTFMEQKITYRIWRDTANWLEINPDTGAISTRAELDREDFEHVKNSTYTALIIATDNGSPVATGTGTLLLILSDVNDNAPIPEPRTIFFCERNPKPQVINIIDADLPPNLASQSIGITDMSHCTCPAPQLPAIF

SEQ ID NO: 5208 - protein, 900 aa, Homo sapiens
MGPWSRSLSALLLLLQVSSWLCQEPEPCHPGFDAESYTFTVPRRHLERGRVLGRVNFEDCTGRQRTAYFSLDTRFKVGTDGVITVKRPLRFHNPQIHFLVYAWDSTYRKFSTKVTLNTVGHHHRPPPHQASVSGIQAELLTFPNSSPGLRRQKRDWVIPPISCPENEKGPFPKNLVQIKSNKDKEGKVFYSITGQGADTPPVGVFIIERETGWLKVTEPLDRERIATYTLFSHAVSSNGNAVEDPMEILITVTDQNDNKPEFTQEVFKGSVMEGALPGTSVMEVTATDADDDVNTYNAAIAYTILSQDPELPDKNMFTINRNTGVISVVTTGLDRESFPTYTLVVQAADLQGEGLSTTATAVITVTDTNDNPPIFNPTTYKGQVPENEANVVITTLKVTDADAPNTPAWEAVYTILNDDGGQFVVTTNPVNNDGILKTAKLARCRNWHPHSCSYPCPLGLDFEAKQQYILHVAVTNVVPFEVSLTTSTATVTVDVLDVNEAPIFVPPEKRVEVSEDFGVGQEITSYTAQEPDTFMEQKITYRIWRDTANWLEINPDTGAISTRAELDREDFEHVKNSTYTALIIATDNGSPVATGTGTLLLILSDVNDNAPIPEPRTIFFCERNPKPQVINIIDADLPPNTSPFTAELTHGASANWTIQYNDPTQESIILKPKMALEVGDYKINLKLMDNQNKDQVTTLEVSVCDCEGAAGVCRKAQPVEAGLQIPAILGILGGILALLILILLLLLFLRRRAVVKEPLLPPEDDTRDNVYYYDEEGGGEEDQDFDLSQLHRGLDARPEVTRNDVAPTLMSVPRYLPRPANPDEIGNFIDENLKAADTDPTAPPYDSLLVFDYEGSGSEAASLSSLNSSESDKDQDYDYLNEWGNRFKKLADMYGGGEDD

SEQ ID NO: 5209 - protein, 821 aa, Homo sapiens
MGPWSRSLSALLLLLQVSSWLCQEPEPCHPGFDAESYTFTVPRRHLERGRVLGRVNFEDCTGRQRTAYFSLDTRFKVGTDGVITVKRPLRFHNPQIHFLVYAWDSTYRKFSTKVTLNTVGHHHRPPPHQASVSGIQAELLTFPNSSPGLRRQKRDWVIPPISCPENEKGPFPKNLVQIKSNKDKEGKVFYSITGQGADTPPVGVFIIERETGWLKVTEPLDRERIATYTLFSHAVSSNGNAVEDPMEILITVTDQNDNKPEFTQEVFKGSVMEGALPGTSVMEVTATDADDDVNTYNAAIAYTILSQDPELPDKNMFTINRNTGVISVVTTGLDRESFPTYTLVVQAADLQGEGLSTTATAVITVTDTNDNPPIFNPTTGLDFEAKQQYILHVAVTNVVPFEVSLTTSTATVTVDVLDVNEAPIFVPPEKRVEVSEDFGVGQEITSYTAQEPDTFMEQKITYRIWRDTANWLEINPDTGAISTRAELDREDFEHVKNSTYTALIIATDNGSPVATGTGTLLLILSDVNDNAPIPEPRTIFFCERNPKPQVINIIDADLPPNTSPFTAELTHGASANWTIQYNDPTQESIILKPKMALEVGDYKINLKLMDNQNKDQVTTLEVSVCDCEGAAGVCRKAQPVEAGLQIPAILGILGGILALLILILLLLLFLRRRAVVKEPLLPPEDDTRDNVYYYDEEGGGEEDQDFDLSQLHRGLDARPEVTRNDVAPTLMSVPRYLPRPANPDEIGNFIDENLKAADTDPTAPPYDSLLVFDYEGSGSEAASLSSLNSSESDKDQDYDYLNEWGNRFKKLADMYGGGEDD

SEQ ID NO: 5210 - protein, 796 aa, Homo sapiens
MKENYCLQAALVCLGMLCHSHAFAPERRGHLRPSFHGHHEKGKEGQVLQRSKRGWVWNQFFVIEEYTGPDPVLVGRLHSDIDSGDGNIKYILSGEGAGTIFVIDDKSGNIHATKTLDREERAQYTLMAQAVDRDTNRPLEPPSEFIVKVQDINDNPPEFLHETYHANVPERSNVGTSVIQVTASDADDPTYGNSAKLVYSILEGQPYFSVEAQTGIIRTALPNMDREAKEEYHVVIQAKDMGGHMGGLSGTTKVTITLTDVNDNPPKFPQSVYQMSVSEAAVPGEEVGRVKAKDPDIGENGLVTYNIVDGDGMESFEITTDYETQEGVIKLKKPVDFETKRAYSLKVEAANVHIDPKFISNGPFKDTVTVKISVEDADEPPMFLAPSYIHEVQENAAAGTVVGRVHAKDPDAANSPIRYSIDRHTDLDRFFTINPEDGFIKTTKPLDREETAWLNITVFAAEIHNRHQEAKVPVAIRVLDVNDNAPKFAAPYEGFICESDQTKPLSNQPIVTISADDKDDTANGPRFIFSLPPEIIHNPNFTVRDNRDNTAGVYARRGGFSRQKQDLYLLPIVISDGGIPPMSSTNTLTIKVCGCDVNGALLSCNAEAYILNAGLSTGALIAILACIVILLVIVVLFVTLRRQKKEPLIVFEEEDVRENIITYDDEGGGEEDTEAFDIATLQNPDGINGFIPRKDIKPEYQYMPRPGLRPAPNSVDVDDFINTRIQEADNDPTAPPYDSIQIYGYEGRGSVAGSLSSLESATTDSDLDYDYLQNWGPRFKKLADLYGSKDTFDDDS

SEQ ID NO: 5211 - protein, 693 aa, Homo sapiens
MKENYCLQAALVCLGMLCHSHAFAPERRGHLRPSFHGHHEKGKEGQVLQRSKRGWVWNQFFVIEEYTGPDPVLVGRLHSDIDSGDGNIKYILSGEGAGTIFVIDDKSGNIHATKTLDREERAQYTLMAQAVDRDTNRPLEPPSEFIVKVQDINDNPPEFLHETYHANVPERSNVGTSVIQVTASDADDPTYGNSAKLVYSILEGQPYFSVEAQTGIIRTALPNMDREAKEEYHVVIQAKDMGGHMGGLSGTTKVTITLTDVNDNPPKFPQSVYQMSVSEAAVPGEEVGRVKAKDPDIGENGLVTYNIVDGDGMESFEITTDYETQEGVIKLKKPVDFETKRAYSLKVEAANVHIDPKFISNGPFKDTVTVKISVEDADEPPMFLAPSYIHEVQENAAAGTVVGRVHAKDPDAANSPIRYSIDRHTDLDRFFTINPEDGFIKTTKPLDREETAWLNITVFAAEIHNRHQEAKVPVAIRVLDVNDNAPKFAAPYEGFICESDQTKPLSNQPIVTISADDKDDTANGPRFIFSLPPEIIHNPNFTVRDNRDNTAGVYARRGGFSRQKQDLYLLPIVISDGGIPPMSSTNTLTIKVCGCDVNGALLSCNAEAYILNAGLSTGALIAILACIVILLGCPSLMEPPSPREDMRLLYLGFQLMLFSYVKVNRRFCLLGVFIKLPFLYVVATESPTTLTSL

SEQ ID NO: 5212 - protein, 171 aa, Homo sapiens
MKENYCLQAALVCLGMLCHSHAFAPERRGHLRPSFHGHHEKGKEGQVLQRSKRGWVWNQFFVIEEYTGPDPVLVGRLHSDIDSGDGNIKYILSGEGAGTIFVIDDKSGNIHATKTLDREERAQYTLMAQAVDRDTNRNSLSRSRTLMTTLRSSCTRPIMPTCLRGPMWVRT

SEQ ID NO: 5213 - protein, 779 aa, Homo sapiens
MGPGLAARRLRPPSRAPEITVFSAQRPCDIPSCCHLLSDQSDGWSVLQKLAASIQWVKKLHSDIDSGDGNIKYILSGEGAGTIFVIDDKSGNIHATKTLDREERAQYTLMAQAVDRDTNRPLEPPSEFIVKVQDINDNPPEFLHETYHANVPERSNVGTSVIQVTASDADDPTYGNSAKLVYSILEGQPYFSVEAQTGIIRTALPNMDREAKEEYHVVIQAKDMGGHMGGLSGTTKVTITLTDVNDNPPKFPQSVYQMSVSEAAVPGEEVGRVKAKDPDIGENGLVTYNIVDGDGMESFEITTDYETQEGVIKLKKPVDFETKRAYSLKVEAANVHIDPKFISNGPFKDTVTVKISVEDADEPPMFLAPSYIHEVQENAAAGTVVGRVHAKDPDAANSPIRYSIDRHTDLDRFFTINPEDGFIKTTKPLDREETAWLNITVFAAEIHNRHQEAKVPVAIRVLDVNDNAPKFAAPYEGFICESDQTKPLSNQPIVTISADDKDDTANGPRFIFSLPPEIIHNPNFTVRDNRDNTAGVYARRGGFSRQKQDLYLLPIVISDGGIPPMSSTNTLTIKVCGCDVNGALLSCNAEAYILNAGLSTGALIAILACIVILLVIVVLFVTLRRQKKEPLIVFEEEDVRENIITYDDEGGGEEDTEAFDIATLQNPDGINGFIPRKDIKPEYQYMPRPGLRPAPNSVDVDDFINTRIQEADNDPTAPPYDSIQIYGYEGRGSVAGSLSSLESATTDSDLDYDYLQNWGPRFKKLADLYGSKDTFDDDS

SEQ ID NO: 5214 - protein, 175 aa, Homo sapiens
MQPRTPLVLCVLLSQVLLLTSAEDLDCTPGFQQKVFHINQPAEFIEDQSILNLTFSDCKGNDKLRYEVSSPYFKVNSDGGLVALRNITAVGKTLFVHARTPHAEDMAELVIVGGKDIQGSLQDIFKFARTSPVPRQKRSIVVSPILIPENQRQPFPRDVGKMKIWQVLCLARWLT

SEQ ID NO: 5215 - protein, 713 aa, Homo sapiens
MQPRTPLVLCVLLSQVLLLTSAEDLDCTPGFQQKVFHINQPAEFIEDQSILNLTFSDCKGNDKLRYEVSSPYFKVNSDGGLVALRNITAVGKTLFVHARTPHAEDMAELVIVGGKDIQGSLQDIFKFARTSPVPRQKRSIVVSPILIPENQRQPFPRDVGKVVDSDRPERSKFRLTGKGVDQEPKGIFRINENTGSVSVTRTLDREVIAVYQLFVETTDVNGKTLEGPVPLEVIVIDQNDNRPIFREGPYIGHVMEGSPTGTTVMRMTAFDADDPATDNALLRYNIRQQTPDKPSPNMFYIDPEKGDIVTVVSPALLDRETLENPKYELIIEAQDMAGLDVGLTGTATATIMIDDKNDHSPKFTKKEFQATVEEGAVGVIVNLTVEDKDDPTTGAWRAAYTIINGNPGQSFEIHTNPQTNEGMLSVVKPLDYEISAFHTLLIKVENEDPLVPDVSYGPSSTATVHITVLDVNEGPVFYPDPMMVTRQEDLSVGSVLLTVNATDPDSLQHQTIRYSVYKDPAGWLNINPINGTVDTTAVLDRESPFVDNSVYTALFLAIDSGNPPATGTGTLLITLEDVNDNAPFIYPTVAEVCDDAKNLSVVILGASDKDLHPNTDPFKFEIHKQAVPDKVWKISKINNTHALVSLLQNLNKANYNLPIMVTDSGKPPMTNITDLRVQVCSCRNSKVDCNAAGALRFSLPSVLLLSLFSLACL

SEQ ID NO: 5216 - protein, 760 aa, Homo sapiens
MKTPPGASSRTKCSRELRSFCAFSCPRAKQPTCTAWFPQQEHPSENGPQMPGRDPPAASTMQVLLLTSAEDLDCTPGFQQKVFHINQPAEFIEDQSILNLTFSDCKGNDKLRYEVSSPYFKVNSDGGLVALRNITAVGKTLFVHARTPHAEDMAELVIVGGKDIQGSLQDIFKFARTSPVPRQKRSIVVSPILIPENQRQPFPRDVGKVVDSDRPERSKFRLTGKGVDQEPKGIFRINENTGSVSVTRTLDREVIAVYQLFVETTDVNGKTLEGPVPLEVIVIDQNDNRPIFREGPYIGHVMEGSPTGTTVMRMTAFDADDPATDNALLRYNIRQQTPDKPSPNMFYIDPEKGDIVTVVSPALLDRETLENPKYELIIEAQDMAGLDVGLTGTATATIMIDDKNDHSPKFTKKEFQATVEEGAVGVIVNLTVEDKDDPTTGAWRAAYTIINGNPGQSFEIHTNPQTNEGMLSVVKPLDYEISAFHTLLIKVENEDPLVPDVSYGPSSTATVHITVLDVNEGPVFYPDPMMVTRQEDLSVGSVLLTVNATDPDSLQHQTIRYSVYKDPAGWLNINPINGTVDTTAVLDRESPFVDNSVYTALFLAIDSGNPPATGTGTLLITLEDVNDNAPFIYPTVAEVCDDAKNLSVVILGASDKDLHPNTDPFKFEIHKQAVPDKVWKISKINNTHALVSLLQNLNKANYNLPIMVTDSGKPPMTNITDLRVQVCSCRNSKVDCNAAGALRFSLPSVLLLSLFSLACK

SEQ ID NO: 5217 - protein, 713 aa, Homo sapiens
MQPRTPLVLCVLLSQVLLLTSAEDLDCTPGFQQKVFHINQPAEFIEDQSILNLTFSDCKGNDKLRYEVSSPYFKVNSDGGLVALRNITAVGKTLFVHARTPHAEDMAELVIVGGKDIQGSLQDIFKFARTSPVPRQKRSIVVSPILIPENQRQPFPRDVGKVVDSDRPERSKFRLTGKGVDQEPKGIFRINENTGSVSVTRTLDREVIAVYQLFVETTDVNGKTLEGPVPLEVIVIDQNDNRPIFREGPYIGHVMEGSPTGTTVMRMTAFDADDPATDNALLRYNIRQQTPDKPSPNMFYIDPEKGDIVTVVSPALLDRETLENPKYELIIEAQDMAGLDVGLTGTATATIMIDDKNDHSPKFTKKEFQATVEEGAVGVIVNLTVEDKDDPTTGAWRAAYTIINGNPGQSFEIHTNPQTNEGMLSVVKPLDYEISAFHTLLIKVENEDPLVPDVSYGPSSTATVHITVLDVNEGPVFYPDPMMVTRQEDLSVGSVLLTVNATDPDSLQHQTIRYSVYKDPAGWLNINPINGTVDTTAVLDRESPFVDNSVYTALFLAIDSGNPPATGTGTLLITLEDVNDNAPFIYPTVAEVCDDAKNLSVVILGASDKDLHPNTDPFKFEIHKQAVPDKVWKISKINNTHALVSLLQNLNKANYNLPIMVTDSGKPPMTNITDLRVQVCSCRNSKVDCNAAGALRFSLPSVLLLSLFSLACK

SEQ ID NO: 5218 - protein, 190 aa, Homo sapiens
MQPRTPLVLCVLLSQVLLLTSAEDLDCTPGFQQKVFHINQPAEFIEDQSILNLTFSDCKGNDKLRYEVSSPYFKVNSDGGLVALRNITAVGKTLFVHARTPHAEDMAELVIVGGKDIQGSLQDIFKFARTSPVPRQKRSIVVSPILIPENQRQPFPRDVGKRTHNPINSELLLNEGITADLNPCITILAI

SEQ ID NO: 5219 - protein, 175 aa, Homo sapiens; identical to SEQ ID NO: 5214

SEQ ID NO: 5220 - protein, 674 aa, Homo sapiens
MQPRTPLVLCVLLSQVLLLTSAEDLDCTPGFQQKVFHINQPAEFIEDQSILNLTFSDCKGNDKLRYEVSSPYFKVNSDGGLVALRNITAVGKTLFVHARTPHAEDMAELVIVGGKDIQGSLQVVDSDRPERSKFRLTGKGVDQEPKGIFRINENTGSVSVTRTLDREVIAVYQLFVETTDVNGKTLEGPVPLEVIVIDQNDNRPIFREGPYIGHVMEGSPTGTTVMRMTAFDADDPATDNALLRYNIRQQTPDKPSPNMFYIDPEKGDIVTVVSPALLDRETLENPKYELIIEAQDMAGLDVGLTGTATATIMIDDKNDHSPKFTKKEFQATVEEGAVGVIVNLTVEDKDDPTTGAWRAAYTIINGNPGQSFEIHTNPQTNEGMLSVVKPLDYEISAFHTLLIKVENEDPLVPDVSYGPSSTATVHITVLDVNEGPVFYPDPMMVTRQEDLSVGSVLLTVNATDPDSLQHQTIRYSVYKDPAGWLNINPINGTVDTTAVLDRESPFVDNSVYTALFLAIDSGNPPATGTGTLLITLEDVNDNAPFIYPTVAEVCDDAKNLSVVILGASDKDLHPNTDPFKFEIHKQAVPDKVWKISKINNTHALVSLLQNLNKANYNLPIMVTDSGKPPMTNITDLRVQVCSCRNSKVDCNAAGALRFSLPSVLLLSLFSLACK

SEQ ID NO: 5221 - protein, 415 aa, Homo sapiens
MQPRTPLVLCVLLSQVALLDRETLENPKYELIIEAQDMAGLDVGLTGTATATIMIDDKNDHSPKFTKKEFQATVEEGAVGVIVNLTVEDKDDPTTGAWRAAYTIINGNPGQSFEIHTNPQTNEGMLSVVKPLDYEISAFHTLLIKVENEDPLVPDVSYGPSSTATVHITVLDVNEGPVFYPDPMMVTRQEDLSVGSVLLTVNATDPDSLQHQTIRYSVYKDPAGWLNINPINGTVDTTAVLDRESPFVDNSVYTALFLAIDSGNPPATGTGTLLITLEDVNDNAPFIYPTVAEVCDDAKNLSVVILGASDKDLHPNTDPFKFEIHKQAVPDKVWKISKINNTHALVSLLQNLNKANYNLPIMVTDSGKPPMTNITDLRVQVCSCRNSKVDCNAAGALRFSLPSVLLLSLFSLACK

SEQ ID NO: 5222 - protein, 272 aa, Homo sapiens
MQPRTPLVLCVLLSQVLLLTSAEDLDCTPGFQQKVFHINQPAEFIEEDLSVGSVLLTVNATDPDSLQHQTIRYSVYKDPAGWLNINPINGTVDTTAVLDRESPFVDNSVYTALFLAIDSGNPPATGTGTLLITLEDVNDNAPFIYPTVAEVCDDAKNLSVVILGASDKDLHPNTDPFKFEIHKQAVPDKVWKISKINNTHALVSLLQNLNKANYNLPIMVTDSGKPPMTNITDLRVQVCSCRNSKVDCNAAGALRFSLPSVLLLSLFSLACK

SEQ ID NO: 5223 - protein, 403 aa, Homo sapiens
VVSPALLDRETLENPKYELIIEAQDMAGLDVGLTGTATATIMIDDKNDHSPKFTKKEFQATVEEGAVGVIVNLTVEDKDDPTTGAWRAAYTIINGNPGQSFEIHTNPQTNEGMLSVVKPLDYEISAFHTLLIKVENEDPLVPDVSYGPSSTATVHITVLDVNEGPVFYPDPMMVTRQEDLSVGSVLLTVNATDPDSLQHQTIRYSVYKDPAGWLNINPINGTVDTTAVLDRESPFVDNSVYTALFLAIDSGNPPATGTGTLLITLEDVNDNAPFIYPTVAEVCDDAKNLSVVILGASDKDLHPNTDPFKFEIHKQAVPDKVWKISKINNTHALVSLLQNLNKANYNLPIMVTDSGKPPMTNITDLRVQVCSCRNSKVDCNAAGALRFSLPSVLLLSLFSLACL

SEQ ID NO: 5224 - protein, 906 aa, Homo sapiens
MCRIAGALRTLLPLLAALLQASVEASGEIALCKTGFPEDVYSAVLSKDVHEGQPLLNVKFSNCNGKRKVQYESSEPADFKVDEDGMVYAVRSFPLSSEHAKFLIYAQDKETQEKWQVAVKLSLKPTLTEESVKESAEVEEIVFPRQFSKHSGHLQRQKRDWVIPPINLPENSRGPFPQELVRIRSDRDKNLSLRYSVTGPGADQPPTGIFIINPISGQLSVTKPLDREQIARFHLRAHAVDINGNQVENPIDIVINVIDMNDNRPEFLHQVWNGTVPEGSKPGTYVMTVTAIDADDPNALNGMLRYRIVSQAPSTPSPNMFTINNETGDIITVAAGLDREKVQQYTLIIQATDMEGNPTYGLSNTATAVITVTDVNDNPPEFTAMTFYGEVPENRVDIIVANLTVTDKDQPHTPAWNAVYRISGGDPTGRFAIQTDPNSNDGLVTVVKPIDFETNRMFVLTVAAENQVPLAKGIQHPPQSTATVSVTVIDVNENPYFAPNPKIIRQEEGLHAGTMLTTFTAQDPDRYMQQNIRYTKLSDPANWLKIDPVNGQITTIAVLDRESPNVKNNIYNATFLASDNGIPPMSGTGTLQIYLLDINDNAPQVLPQEAETCETPDPNSINITALDYDIDPNAGPFAFDLPLSPVTIKRNWTITRLNGDFAQLNLKIKFLEAGIYEVPIIITDSGNPPKSNISILRVKVCQCDSNGDCTDVDRIVGAGLGTGAIIAILLCIIILLILVLMFVVWMKRRDKERQAKQLLIDPEDDVRDNILKYDEEGGGEEDQDYDLSQLQQPDTVEPDAIKPVGIRRMDERPIHAEPQYPVRSAAPHPGDIGDFINEGLKAADNDPTAPPYDSLLVFDYEGSGSTAGSLSSLNSSSSGGEQDYDYLNDWGPRFKKLADMYGGGDD

SEQ ID NO: 5225 - protein, 875 aa, Homo sapiens
MFLLRRYVCIFTEKLKNQAELYVFLSVKFSNCNGKRKVQYESSEPADFKVDEDGMVYAVRSFPLSSEHAKFLIYAQDKETQEKWQVAVKLSLKPTLTEESVKESAEVEEIVFPRQFSKHSGHLQRQKRDWVIPPINLPENSRGPFPQELVRIRSDRDKNLSLRYSVTGPGADQPPTGIFIINPISGQLSVTKPLDREQIARFHLRAHAVDINGNQVENPIDIVINVIDMNDNRPEFLHQVWNGTVPEGSKPGTYVMTVTAIDADDPNALNGMLRYRIVSQAPSTPSPNMFTINNETGDIITVAAGLDREKVQQYTLIIQATDMEGNPTYGLSNTATAVITVTDVNDNPPEFTAMTFYGEVPENRVDIIVANLTVTDKDQPHTPAWNAVYRISGGDPTGRFAIQTDPNSNDGLVTVVKPIDFETNRMFVLTVAAENQVPLAKGIQHPPQSTATVSVTVIDVNENPYFAPNPKIIRQEEGLHAGTMLTTFTAQDPDRYMQQNIRYTKLSDPANWLKIDPVNGQITTIAVLDRESPNVKNNIYNATFLASDNGIPPMSGTGTLQIYLLDINDNAPQVLPQEAETCETPDPNSINITALDYDIDPNAGPFAFDLPLSPVTIKRNWTITRLNGDFAQLNLKIKFLEAGIYEVPIIITDSGNPPKSNISILRVKVCQCDSNGDCTDVDRIVGAGLGTGAIIAILLCIIILLILVLMFVVWMKRRDKERQAKQLLIDPEDDVRDNILKYDEEGGGEEDQDYDLSQLQQPDTVEPDAIKPVGIRRMDERPIHAEPQYPVRSAAPHPGDIGDFINEGLKAADNDPTAPPYDSLLVFDYEGSGSTAGSLSSLNSSSSGGEQDYDYLNDWGPRFKKLADMYGGGDD

SEQ ID NO: 5226 - protein, 784 aa, Homo sapiens
MQRLMMLLATSGACLGLLAVAAVAAAGANPAQRDTHSLLPTHRRQKRDWIWNQMHIDEEKNTSLPHHVGKIKSSVSRKNAKYLLKGEYVGKVFRVDAETGDVFAIERLDRENISEYHLTAVIVDKDTGENLETPSSFTIKVHDVNDNWPVFTHRLFNASVPESSAVGTSVISVTAVDADDPTVGDHASVMYQILKGKEYFAIDNSGRIITITKSLDREKQARYEIVVEARDAQGLRGDSGTATVLVTLQDINDNFPFFTQTKYTFVVPEDTRVGTSVGSLFVEDPDEPQNRMTKYSILRGDYQDAFTIETNPAHNEGIIKPMKPLDYEYIQQYSFIVEATDPTIDLRYMSPPAGNRAQVIINITDVDEPPIFQQPFYHFQLKENQKKPLIGTVLAMDPDAARHSIGYSIRRTSDKGQFFRVTKKGDIYNEKELDREVYPWYNLTVEAKELDSTGTPTGKESIVQVHIEVLDENDNAPEFAKPYQPKVCENAVHGQLVLQISAIDKDITPRNVKFKFILNTENNFTLTDNHDNTANITVKYGQFDREHTKVHFLPVVISDNGMPSRTGTSTLTVAVCKCNEQGEFTFCEDMAAQVGVSIQAVVAILLCILTITVITLLIFLRRRLRKQARAHGKSVPEIHEQLVTYDEEGGGEMDTTSYDVSVLNSVRRGGAKPPRPALDARPSLYAQVQKPPRHAPGAHGGPGEMAAMIEVKKDEADHDGDGPPYDTLHIYGYEGSESIAESLSSLGTDSSDSDVDYDFLNDWGPRFKMLAELYGSDPREELLY

SEQ ID NO: 5227 - protein, 669 aa, Homo sapiens
MQRLMMLLATSGACLGLLAVAAVAAAGANPAQRDTHSLLPTHRRQKRDWIWNQMHIDEEKNTSLPHHVGKIKSSVSRKNAKYLLKGEYVGKVFRVDAETGDVFAIERLDRENISEYHLTAVIVDKDTGENLETPSSFTIKVHDVNDNWPVFTHRLFNASVPESSAVGTSVISVTAVDADDPTVGDHASVMYQILKGKEYFAIDNSGRIITITKSLDREKQARYEIVVEARDAQGLRGDSGTATVLVTLQDINDNFPFFTQTKYTFVVPEDTRVGTSVGSLFVEDPDEPQNRMTKYSILRGDYQDAFTIETNPAHNEGIIKPMKPLDYEYIQQYSFIVEATDPTIDLRYMSPPAGNRAQVIINITDVDEPPIFQQPFYHFQLVLQISAIDKDITPRNVKFKFILNTENNFTLTDNHDNTANITVKYGQFDREHTKVHFLPVVISDNGMPSRTGTSTLTVAVCKCNEQGEFTFCEDMAAQVGVSIQAVVAILLCILTITVITLLIFLRRRLRKQARAHGKSVPEIHEQLVTYDEEGGGEMDTTSYDVSVLNSVRRGGAKPPRPALDARPSLYAQVQKPPRHAPGAHGGPGEMAAMIEVKKDEADHDGDGPPYDTLHIYGYEGSESIAESLSSLGTDSSDSDVDYDFLNDWGPRFKMLAELYGSDPREELLY

SEQ ID NO: 5228 - protein, 223 aa, Homo sapiens
MPSRTGTSTLTVAVCKCNEQGEFTFCEDMAAQVGVSIQAVVAILLCILTITVITLLIFLRRRLRKQARAHGKSVPEIHEQLVTYDEEGGGEMDTTSYDVSVLNSVRRGGAKPPRPALDARPSLYAQVQKPPRHAPGAHGGPGEMAAMIEVKKDEADHDGDGPPYDTLHIYGYEGSESIAESLSSLGTDSSDSDVDYDFLNDWGPRFKMLAELYGSDPREELLY

SEQ ID NO: 5229 - protein, 525 aa, Homo sapiens
MPSTCSKENMWARSSGSMQRQETCSPLRAQNRMTKYSILRGDYQDAFTIETNPAHNEGIIKPMKPLDYEYIQQYSFIVEATDPTIDLRYMSPPAGNRAQVIINITDVDEPPIFQQPFYHFQLKENQKKPLIGTVLAMDPDAARHSIGYSIRRTSDKGQFFRVTKKGDIYNEKELDREVYPWYNLTVEAKELDSTGTPTGKESIVQVHIEVLDENDNAPEFAKPYQPKVCENAVHGQLVLQISAIDKDITPRNVKFKFILNTENNFTLTDNHDNTANITVKYGQFDREHTKVHFLPVVISDNGMPSRTGTSTLTVAVCKCNEQGEFTFCEDMAAQVGVSIQAVVAILLCILTITVITLLIFLRRRLRKQARAHGKSVPEIHEQLVTYDEEGGGEMDTTSYDVSVLNSVRRGGAKPPRPALDARPSLYAQVQKPPRHAPGAHGGPGEMAAMIEVKKDEADHDGDGPPYDTLHIYGYEGSESIAESLSSLGTDSSDSDVDYDFLNDWGPRFKMLAELYGSDPREELLY

SEQ ID NO: 5230 - protein, 790 aa, Homo sapiens
MRTYRYFLLLFWVGQPYPTLSTPLSKRTSGFPAKKRALELSGNSKNELNRSKRSWMWNQFFLLEEYTGSDYQYVGKLHSDQDRGDGSLKYILSGDGAGDLFIINENTGDIQATKRLDREEKPVYILRAQAINRRTGRPVEPESEFIIKIHDINDNEPIFTKEVYTATVPEMSDVGTFVVQVTATDADDPTYGNSAKVVYSILQGQPYFSVESETGIIKTALLNMDRENREQYQVVIQAKDMGGQMGGLSGTTTVNITLTDVNDNPPRFPQSTYQFKTPESSPPGTPIGRIKASDADVGENAEIEYSITDGEGLDMFDVITDQETQEGIITVKKLLDFEKKKVYTLKVEASNPYVEPRFLYLGPFKDSATVRIVVEDVDEPPVFSKLAYILQIREDAQINTTIGSVTAQDPDAARNPVKYSVDRHTDMDRIFNIDSGNGSIFTSKLLDRETLLWHNITVIATEINNPKQSSRVPLYIKVLDVNDNAPEFAEFYETFVCEKAKADQLIQTLHAVDKDDPYSGHQFSFSLAPEAASGSNFTIQDNKDNTAGILTRKNGYNRHEMSTYLLPVVISDNDYPVQSSTGTVTVRVCACDHHGNMQSCHAEALIHPTGLSTGALVAILLCIVILLVTVVLFAALRRQRKKEPLIISKEDIRDNIVSYNDEGGGEEDTQAFDIGTLRNPEAIEDNKLRRDIVPEALFLPRRTPTARDNTDVRDFINQRLKENDTDPTAPPYDSLATYAYEGTGSVADSLSSLESVTTDADQDYDYLSDWGPRFKKLADMYGGVDSDKDS

SEQ ID NO: 5231 - protein, 191 aa, Homo sapiens
MGGSGSRLSKELLAEYQDLTFLTKQEILLAHRRFCELLPQEQRSVESSLRAQVPFEQILSLPELKANPFKERICRVFSTSPAKDSLSFEDFLDLLSVFSDTATPDIKSHYAFRIFDFDDDGTLNREDLSRLVNCLTGEGEDTRLSASEMKQLIDNILEESDIDRDGTINLSEFQHVISRSPDFASSFKIVL

SEQ ID NO: 5232 - protein, 78 aa, Homo sapiens
MSEVLPYGDEKLSPYGDGGDVGQIFSCRLQDTNNFFGAGQNKRPPKLGQIGRSKRVVIEDDRIDDVLKNMTDKAPPGV

SEQ ID NO: 5233 - protein, 520 aa, Homo sapiens
MEGGPAVCCQDPRAELVERVAAIDVTHLEEADGGPEPTRNGVDPPPRARAASVIPGSTSRLLPARPSLSARKLSLQERPAGSYLEAQAGPYATGPASHISPRAWRRPTIESHHVAISDAEDCVQLNQYKLQSEIGKGAYGVVRLAYNESEDRHYAMKVLSKKKLLKQYGFPRRPPPRGSQAAQGGPAKQLLPLERVYQEIAILKKLDHVNVVKLIEVLDDPAEDNLYLALQNQAQNIQLDSTNIAKPHSLLPSEQQDSGSTWAARSVFDLLRKGPVMEVPCDKPFSEEQARLYLRDVILGLEYLHCQKIVHRDIKPSNLLLGDDGHVKIADFGVSNQFEGNDAQLSSTAGTPAFMAPEAISDSGQSFSGKALDVWATGVTLYCFVYGKCPFIDDFILALHRKIKNEPVVFPEEPEISEELKDLILKMLDKNPETRIGVPDIKLHPWVTKNGEEPLPSEEEHCSVVEVTEEEVKNSVRLIPSWTTVILVKSMLRKRSFGNPFEPQARREERSMSAPGNLLV

SEQ ID NO: 5234 - protein, 505 aa, Homo sapiens
MEGGPAVCCQDPRAELVERVAAIDVTHLEEADGGPEPTRNGVDPPPRARAASVIPGSTSRLLPARPSLSARKLSLQERPAGSYLEAQAGPYATGPASHISPRAWRRPTIESHHVAISDAEDCVQLNQYKLQSEIGKGAYGVVRLAYNESEDRHYAMKVLSKKKLLKQYGFPRRPPPRGSQAAQGGPAKQLLPLERVYQEIAILKKLDHVNVVKLIEVLDDPAEDNLYLVFDLLRKGPVMEVPCDKPFSEEQARLYLRDVILGLEYLHCQKIVHRDIKPSNLLLGDDGHVKIADFGVSNQFEGNDAQLSSTAGTPAFMAPEAISDSGQSFSGKALDVWATGVTLYCFVYGKCPFIDDFILALHRKIKNEPVVFPEEPEISEELKDLILKMLDKNPETRIGVPDIKLHPWVTKNGEEPLPSEEEHCSVVEVTEEEVKNSVRLIPSWTTVILVKSMLRKRSFGNPFEPQARREERSMSAPGNLLVKEGFGEGGKSPELPGVQEDEAAS

SEQ ID NO: 5235 - protein, 532 aa, Homo sapiens
MQFGKLWCGCSGEFPTRLRRRTPLTEAMEGGPAVCCQDPRAELVERVAAIDVTHLEEADGGPEPTRNGVDPPPRARAASVIPGSTSRLLPARPSLSARKLSLQERPAGSYLEAQAGPYATGPASHISPRAWRRPTIESHHVAISDAEDCVQLNQYKLQSEIGKGAYGVVRLAYNESEDRHYAMKVLSKKKLLKQYGFPRRPPPRGSQAAQGGPAKQLLPLERVYQEIAILKKLDHVNVVKLIEVLDDPAEDNLYLVFDLLRKGPVMEVPCDKPFSEEQARLYLRDVILGLEYLHCQKIVHRDIKPSNLLLGDDGHVKIADFGVSNQFEGNDAQLSSTAGTPAFMAPEAISDSGQSFSGKALDVWATGVTLYCFVYGKCPFIDDFILALHRKIKNEPVVFPEEPEISEELKDLILKMLDKNPETRIGVPDIKLHPWVTKNGEEPLPSEEEHCSVVEVTEEEVKNSVRLIPSWTTVILVKSMLRKRSFGNPFEPQARREERSMSAPGNLLVKEGFGEGGKSPELPGVQEDEAAS

SEQ ID NO: 5236 - protein, 543 aa, Homo sapiens
MEGGPAVCCQDPRAELVERVAAIDVTHLEEADGGPEPTRNGVDPPPRARAASVIPGSTSRLLPARPSLSARKLSLQERPAGSYLEAQAGPYATGPASHISPRAWRRPTIESHHVAISDAEDCVQLNQYKLQSEIGKGAYGVVRLAYNESEDRHYAMKVLSKKKLLKQYGFPRRPPPRGSQAAQGGPAKQLLPLERVYQEIAILKKLDHVNVVKLIEVLDDPAEDNLYLALQNQAQNIQLDSTNIAKPHSLLPSEQQDSGSTWAARSVFDLLRKGPVMEVPCDKPFSEEQARLYLRDVILGLEYLHCQKIVHRDIKPSNLLLGDDGHVKIADFGVSNQFEGNDAQLSSTAGTPAFMAPEAISDSGQSFSGKALDVWATGVTLYCFVYGKCPFIDDFILALHRKIKNEPVVFPEEPEISEELKDLILKMLDKNPETRIGVPDIKLHPWVTKNGEEPLPSEEEHCSVVEVTEEEVKNSVRLIPSWTTVILVKSMLRKRSFGNPFEPQARREERSMSAPGNLLVKEGFGEGGKSPELPGVQEDEAAS

SEQ ID NO: 5237 - protein, 564 aa, Homo sapiens
MDDFERRRELRRQKREEMRLEAERIAYQRNDDDEEEAARERRRRARQERLRQKQEEESLGQVTDQVEVNAQNSVPDEEAKTTTTNTQVEGDDEAAFLERLARREERRQKRLQEALERQKEFDPTITDASLSLPSRRMQNDTAENETTEKEEKSESRQERYEIEETETVTKSYQKNDWRDAEENKKEDKEKEEEEEEKPKRGSIGENQGEEKGTKVQAKREKLQEDKPTFKKEEIKDEKIKKDKEPKEEVKSFMDRKKGFTEVKSQNGEFMTHKLKHTENTFSRPGGRASVDTKEAEGAPQVEAGKRLEELRRRRGETESEEFEKLKQKQQEAALELEELKKKREERRKVLEEEEQRRKQEEADRKLREEEEKRRLKEEIERRRAEAAEKRQKMPEDGLSDDKKPFKCFTPKGSSLKIEERAEFLNKSVQKSSGVKSTHQAAIVSKIDSRLEQYTSAIEGTKSAKPTKPAASDLPVPAEGVRNIKSMWEKGNVFSSPTAAGTPNKETAGLKVGVSSRINEWLTKTPDGNKSPAPKPSDLRPGDVSSKRNLWEKQSVDKVTSPTKV

SEQ ID NO: 5238 - protein, 793 aa, Homo sapiens
MDDFERRRELRRQKREEMRLEAERIAYQRNDDDEEEAARERRRRARQERLRQKQEEESLGQVTDQVEVNAQNSVPDEEAKTTTTNTQVEGDDEAAFLERLARREERRQKRLQEALERQKEFDPTITDASLSLPSRRMQNDTAENETTEKEEKSESRQERYEIEETETVTKSYQKNDWRDAEENKKEDKEKEEEEEEKPKRGSIGENQVEVMVEEKTTESQEETVVMSLKNGQISSEEPKQEEEREQGSDEISHHEKMEEEDKERAEAERARLEAEERERIKAEQDKKIADERARIEAEEKAAAQERERREAEERERMREEEKRAAEERQRIKEEEKRAAEERQRIKEEEKRAAEERQRIKEEEKRAAEERQRARAEEEEKAKVEEQKRNKQLEEKKHAMQETKIKGEKVEQKIEGKWVNEKKAQEDKLQTAVLKKQGEEKGTKVQAKREKLQEDKPTFKKEEIKDEKIKKDKEPKEEVKSFMDRKKGFTEVKSQNGEFMTHKLKHTENTFSRPGGRASVDTKEAEGAPQVEAGKRLEELRRRRGETESEEFEKLKQKQQEAALELEELKKKREERRKVLEEEEQRRKQEEADRKLREEEEKRRLKEEIERRRAEAAEKRQKMPEDGLSDDKKPFKCFTPKGSSLKIEERAEFLNKSVQKSSGVKSTHQAAIVSKIDSRLEQYTSAIEGTKSAKPTKPAASDLPVPAEGVRNIKSMWEKGNVFSSPTAAGTPNKETAGLKVGVSSRINEWLTKTPDGNKSPAPKPSDLRPGDVSSKRNLWEKQSVDKVTSPTKV

SEQ ID NO: 5239 - protein, 538 aa, Homo sapiens
MDDFERRRELRRQKREEMRLEAERIAYQRNDDDEEEAARERRRRARQERLRQKQEEESLGQVTDQVEVNAQNSVPDEEAKTTTTNTQVEGDDEAAFLERLARREERRQKRLQEALERQKEFDPTITDASLSLPSRRMQNDTAENETTEKEEKSESRQERYEIEETETVTKSYQKNDWRDAEENKKEDKEKEEEEEEKPKRGSIGENQIKDEKIKKDKEPKEEVKSFMDRKKGFTEVKSQNGEFMTHKLKHTENTFSRPGGRASVDTKEAEGAPQVEAGKRLEELRRRRGETESEEFEKLKQKQQEAALELEELKKKREERRKVLEEEEQRRKQEEADRKLREEEEKRRLKEEIERRRAEAAEKRQKMPEDGLSDDKKPFKCFTPKGSSLKIEERAEFLNKSVQKSSGVKSTHQAAIVSKIDSRLEQYTSAIEGTKSAKPTKPAASDLPVPAEGVRNIKSMWEKGNVFSSPTAAGTPNKETAGLKVGVSSRINEWLTKTPDGNKSPAPKPSDLRPGDVSSKRNLWEKQSVDKVTSPTKV

SEQ ID NO: 5240 - protein, 558 aa, Homo sapiens
MLGGSGSHGRRSLAALSQIAYQRNDDDEEEAARERRRRARQERLRQKQEEESLGQVTDQVEVNAQNSVPDEEAKTTTTNTQVEGDDEAAFLERLARREERRQKRLQEALERQKEFDPTITDASLSLPSRRMQNDTAENETTEKEEKSESRQERYEIEETETVTKSYQKNDWRDAEENKKEDKEKEEEEEEKPKRGSIGENQGEEKGTKVQAKREKLQEDKPTFKKEEIKDEKIKKDKEPKEEVKSFMDRKKGFTEVKSQNGEFMTHKLKHTENTFSRPGGRASVDTKEAEGAPQVEAGKRLEELRRRRGETESEEFEKLKQKQQEAALELEELKKKREERRKVLEEEEQRRKQEEADRKLREEEEKRRLKEEIERRRAEAAEKRQKMPEDGLSDDKKPFKCFTPKGSSLKIEERAEFLNKSVQKSSGVKSTHQAAIVSKIDSRLEQYTSAIEGTKSAKPTKPAASDLPVPAEGVRNIKSMWEKGNVFSSPTAAGTPNKETAGLKVGVSSRINEWLTKTPDGNKSPAPKPSDLRPGDVSSKRNLWEKQSVDKVTSPTKV

SEQ ID NO: 5241 - protein, 538 aa, Homo sapiens; identical to SEQ ID NO: 5239

SEQ ID NO: 5242 - protein, 563 aa, Homo sapiens
MDDFERRRELRRQKREEMRLEAERIAYQRNDDDEEEAARERRRRARQERLRQKQEEESLGQVTDQVEVNAQNSVPDEEAKTTTTNTQVEGDDEAAFLERLARREERRQKRLQEALERQKEFDPTITDASLSLPSRRMQNDTAENETTEKEEKSESRQERYEIEETETVTKSYQKNDWRDAEENKKEDKEKEEEEEEKPKRGSIGENQGEEKGTKVQAKREKLQEDKPTFKKEEIKDEKIKKDKEPKEEVKSFMDRKKGFTEVKSQNGEFMTHKLKHTENTFSRPGGRASVDTKEAEGAPQVEAGKRLEELRRRRGETESEEFEKLKQKQQEAALELEELKKKREERRKVLEEEEQRRKQEEADRKLREEEEKRRLKEEIERRRAEAAEKRQKMPEDGLSDDKKPFKCFTPKGSSLKIEERAEFLNKSVQKSGVKSTHQAAIVSKIDSRLEQYTSAIEGTKSAKPTKPAASDLPVPAEGVRNIKSMWEKGNVFSSPTAAGTPNKETAGLKVGVSSRINEWLTKTPDGNKSPAPKPSDLRPGDVSSKRNLWEKQSVDKVTSPTKV

SEQ ID NO: 5243 - protein, 532 aa, Homo sapiens
MLGGSGSHGRRSLAALSQIAYQRNDDDEEEAARERRRRARQERLRQKQEEESLGQVTDQVEVNAQNSVPDEEAKTTTTNTQVEGDDEAAFLERLARREERRQKRLQEALERQKEFDPTITDASLSLPSRRMQNDTAENETTEKEEKSESRQERYEIEETETVTKSYQKNDWRDAEENKKEDKEKEEEEEEKPKRGSIGENQIKDEKIKKDKEPKEEVKSFMDRKKGFTEVKSQNGEFMTHKLKHTENTFSRPGGRASVDTKEAEGAPQVEAGKRLEELRRRRGETESEEFEKLKQKQQEAALELEELKKKREERRKVLEEEEQRRKQEEADRKLREEEEKRRLKEEIERRRAEAAEKRQKMPEDGLSDDKKPFKCFTPKGSSLKIEERAEFLNKSVQKSSGVKSTHQAAIVSKIDSRLEQYTSAIEGTKSAKPTKPAASDLPVPAEGVRNIKSMWEKGNVFSSPTAAGTPNKETAGLKVGVSSRINEWLTKTPDGNKSPAPKPSDLRPGDVSSKRNLWEKQSVDKVTSPTKV

SEQ ID NO: 5244 - protein, 175 aa, Homo sapiens
MPEDGLSDDKKPFKCFTPKGSSLKIEERAEFLNKSVQKSGVKSTHQAAIVSKIDSRLEQYTSAIEGTKSAKPTKPAASDLPVPAEGVRNIKSMWEKGNVFSSPTAAGTPNKETAGLKVGVSSRINEWLTKTPDGNKSPAPKPSLTFCSSLFGLWLIGNLLLLPSFLPLLPEWVFL

SEQ ID NO: 5245 - protein, 72 aa, Homo sapiens
MDDFERRRELRRQKREEMRLEAERIAYQRNDDDEEEAARERRRRARQERLRQKQEEESLGQVTDQVEVNAQN

SEQ ID NO: 5246 - protein, 459 aa, Homo sapiens
MDDFERRRELRRQKREEMRLEAERIAYQRNDDDEEEAARERRRRARQERLRQKQEEESLGQVTDQVEVNAQNSVPDEEAKTTTTNTQVEGDDEAAFLERLARREERRQKRLQEALERQKEFDPTITDASLSLPSRRMQNDTAENETTEKEEKSESRQERYEIEETETVTKSYQKNDWRDAEENKKEDKEKEEEEEEKPKRGSIGENQIKDEKIKKDKEPKEEVKSFMDRKKGFTEVKSQNGEFMTHKLKHTENTFSRPGGRASVDTKEAEGAPQVEAGKRLEELRRRRGETESEEFEKLKQKQQEAALELEELKKKREERRKVLEEEEQRRKQEEADRKLREEEEKRRLKEEIERRRAEAAEKRQKMPEDGLSDDKKPFKCFTPKGSSLKIEERAEFLNKSVQKSSGVKSTHQAAIVSKIDSRLEQYTSAIEGTKSAKPTKPAASDLPVPAEGVRNIKS

SEQ ID NO: 5247 - protein, 72 aa, Homo sapiens; identical to SEQ ID NO: 5245

SEQ ID NO: 5248 - protein, 543 aa, Homo sapiens
MTSYMKVDRQWNAEILELILGTGQLSTGQIAYQRNDDDEEEAARERRRRARQERLRQKQEEESLGQVTDQVEVNAQNSVPDEEAKTTTTNTQVEGDDEAAFLERLARREERRQKRLQEALERQKEFDPTITDASLSLPSRRMQNDTAENETTEKEEKSESRQERYEIEETETVTKSYQKNDWRDAEENKKEDKEKEEEEEEKPKRGSIGENQIKDEKIKKDKEPKEEVKSFMDRKKGFTEVKSQNGEFMTHKLKHTENTFSRPGGRASVDTKEAEGAPQVEAGKRLEELRRRRGETESEEFEKLKQKQQEAALELEELKKKREERRKVLEEEEQRRKQEEADRKLREEEEKRRLKEEIERRRAEAAEKRQKMPEDGLSDDKKPFKCFTPKGSSLKIEERAEFLNKSVQKSSGVKSTHQAAIVSKIDSRLEQYTSAIEGTKSAKPTKPAASDLPVPAEGVRNIKSMWEKGNVFSSPTAAGTPNKETAGLKVGVSSRINEWLTKTPDGNKSPAPKPSDLRPGDVSSKRNLWEKQSVDKVTSPTKV

SEQ ID NO: 5249 - protein, 1324 aa, Homo sapiens
MADSLYNIRLLREFSNEYLNKCFYLTLEDMLYAPLVLKPNVMVFIAELFWWFENVKPDFVQPRDVQELKDAKTVLHQKSSRPPVPISNATKRSFLGSPAAGTLAELQPPVQLPAEGCHRHYLHPEEPEYLGKGTAAFSPSHPLLPLRQKQQKSIQGEDIPDQRHRSNSLTRVDGQPRGAAIAWPEKKTRPASQPTPFALHHAASCEVDPSSGDSISLARSISKDSLASNIVNLTPQNQPHPTATKSHGKSLLSNVSIEDEEEELVAIVRADVVPQQADPEFPRASPRALGLTANARSPQGQLDTSESKPDSFFLEPLMPAVLKPAKEKQVITKEDERGEGRPRSIVSRRPSEGPQPLVRRKMTGSRDLNRTFTPIPCSEFPMGIDPTETGPLSVETAGEVCGGPLALGGFDPFPQGPSTDGFFLHVGRADEDTEGRLYVSCSKSPNSHDSEPWTLLRQDSDSDVVDIEEAEHDFMGEAHPVVFSRYIGEEESAKLQEDMKVKEHEDKDDASGRSSPCLSTASQMSSVSMASGSVKMTSFAERKLQRLNSCETKSSTSSSQKTTPDASESCPAPLTTWRQKREQSPSQHGKDPASLLASELVQLHMQLEEKRRAIEAQKKKMEALSARQRLKLGKAAFLHVVKKGKAEAAPPLRPEHFAKEYSQHNGEDCGDAVSKTEDFLVKEEQREELLHEPQDVDKESLAFAQQHKAKDPVALHELERNKVISAALLEDTVGEVVDVNECDLSIEKLNETISTLQQAILKISQQQEQLLMKSPTVPVPGSKNNSQDHKVKAPVHFVEPLSPTGVAGHRKAPRLGQGRNSRSGRPAELKVPKDRPQGSSRSKTPTPSVETLPHLRPFPASSHPRTPTDPGLDSALEPSGDPHGKCLFDSYRLHDESNQRTLTLSSSKDANILSEQMSLKEVLDASVKEVGSSSSDVSGKESVPVEEPLRSRASLIEVDLSDLKAPDEDGELVSLDGSADLVSEGDQKPGVGFFFKDEQKAEDELAKKRAAFLLKQQRKAEEARVRKQQLEAEVELKRDEARRKAEEDRVRKEEEKARRELIKQEYLRRKQQQILEEQGLGKPKSKPKKPRPKSVHREESCSDSGTKCSSTPDNLSRTQSGSSLSLASAATTEPESVHSGGTPSQRVESMEALPILSRNPSRSTDRDWETASAASSLASVAEYTGPKLFKEPSSKSNKPIIHNAISHCCLAGKVNEPHKNSILEELEKCDANHYIILFRDAGCQFRALYCYYPDTEEIYKLTGTGPKNITKKMIDKLYKYSSDRKQFNLIPAKTMSVSVDALTIHNHLWQPKRPAVPKKAQTRK

SEQ ID NO: 5250 - protein, 1602 aa, Homo sapiens
MVDASGRAAAEGWRKMEAPPDGAADLVPLDRYDAARAKIAANLQWICAKAYGRDNIPEDLRDPFYVDQYEQEHIKPPVIKLLLSSELYCRVCSLILKGDQVAALQGHQSVIQALSRKGIYVMESDDTPVTESDLSRAPIKMSAHMAMVDALMMAYTVEMISIEKVVASVKRFSTFSASKELPYDLEDAMVFWINKVNLKMREITEKEVKLKQQLLESPAHQKVRYRREHLSARQSPYFPLLEDLMRDGSDGAALLAVIHYYCPEQMKLDDICLKEVTSMADSLYNIRLLREFSNEYLNKCFYLTLEDMLYAPLVLKPNVMVFIAELFWWFENVKPDFVQPRDVQELKDAKTVLHQKSSRPPVPISNATKRSFLGSPAAGTLAELQPPVQLPAEGCHRHYLHPEEPEYLGKGTAAFSPSHPLLPLRQKQQKSIQGEDIPDQRHRSNSLTRVDGQPRGAAIAWPEKKTRPASQPTPFALHHAASCEVDPSSGDSISLARSISKDSLASNIVNLTPQNQPHPTATKSHGKSLLSNVSIEDEEEELVAIVRADVVPQQADPEFPRASPRALGLTANARSPQGQLDTSESKPDSFFLEPLMPAVLKPAKEKQVITKEDERGEGRPRSIVSRRPSEGPQPLVRRKMTGSRDLNRTFTPIPCSEFPMGIDPTETGPLSVETAGEVCGGPLALGGFDPFPQGPSTDGFFLHVGRADEDTEGRLYVSCSKSPNSHDSEPWTLLRQDSDSDVVDIEEAEHDFMGEAHPVVFSRYIGEEESAKLQEDMKVKEHEDKDDASGRSSPCLSTASQMSSVSMASGSVKMTSFAERKLQRLNSCETKSSTSSSQKTTPDASESCPAPLTTWRQKREQSPSQHGKDPASLLASELVQLHMQLEEKRRAIEAQKKKMEALSARQRLKLGKAAFLHVVKKGKAEAAPPLRPEHFAKEYSQHNGEDCGDAVSKTEDFLVKEEQREELLHEPQDVDKESLAFAQQHKAKDPVALHELERNKVISAALLEDTVGEVVDVNECDLSIEKLNETISTLQQAILKISQQQEQLLMKSPTVPVPGSKNNSQDHKVKAPVHFVEPLSPTGVAGHRKAPRLGQGRNSRSGRPAELKVPKDRPQGSSRSKTPTPSVETLPHLRPFPASSHPRTPTDPGLDSALEPSGDPHGKCLFDSYRLHDESNQRTLTLSSSKDANILSEQMSLKEVLDASVKEVGSSSSDVSGKESVPVEEPLRSRASLIEVDLSDLKAPDEDGELVSLDGSADLVSEGDQKPGVGFFFKDEQKAEDELAKKRAAFLLKQQRKAEEARVRKQQLEAEVELKRDEARRKAEEDRVRKEEEKARRELIKQEYLRRKQQQILEEQGLGKPKSKPKKPRPKSVHREESCSDSGTKCSSTPDNLSRTQSGSSLSLASAATTEPESVHSGGTPSQRVESMEALPILSRNPSRSTDRDWETASAASSLASVAEYTGPKLFKEPSSKSNKPIIHNAISHCCLAGKVNEPHKNSILEELEKCDANHYIILFRDAGCQFRALYCYYPDTEEIYKLTGTGPKNITKKMIDKLYKYSSDRKQFNLIPAKTMSVSVDALTIHNHLWQPKRPAVPKKAQTRK

SEQ ID NO: 5251 - protein, 1613 aa, Homo sapiens
MVDASGRAAAEGWRKMEAPPDGAADLVPLDRYDAARAKIAANLQWICAKAYGRDNIPEDLRDPFYVDQYEQEHIKPPVIKLLLSSELYCRVCSLILKGDQVAALQGHQSVIQALSRKGIYVMESDDTPVTESDLSRAPIKMSAHMAMVDALMMAYTVEMISIEKVVASVKRFSTFSASKELPYDLEDAMVFWINKVNLKMREITEKEVKLKQQLLESPAHQKSPSKWYWKLVPVRYRREHLSARQSPYFPLLEDLMRDGSDGAALLAVIHYYCPEQMKLDDICLKEVTSMADSLYNIRLLREFSNEYLNKCFYLTLEDMLYAPLVLKPNVMVFIAELFWWFENVKPDFVQPRDVQELKDAKTVLHQKSSRPPVPISNATKRSFLGSPAAGTLAELQPPVQLPAEGCHRHYLHPEEPEYLGKGTAAFSPSHPLLPLRQKQQKSIQGEDIPDQRHRSNSLTRVDGQPRGAAIAWPEKKTRPASQPTPFALHHAASCEVDPSSGDSISLARSISKDSLASNIVNLTPQNQPHPTATKSHGKSLLSNVSIEDEEEELVAIVRADVVPQQADPEFPRASPRALGLTANARSPQGQLDTSESKPDSFFLEPLMPAVLKPAKEKQVITKEDERGEGRPRSIVSRRPSEGPQPLVRRKMTGSRDLNRTFTPIPCSEFPMGIDPTETGPLSVETAGEVCGGPLALGGFDPFPQGPSTDGFFLHVGRADEDTEGRLYVSCSKSPNSHDSEPWTLLRQDSDSDVVDIEEAEHDFMGEAHPVVFSRYIGEEESAKLQEDMKVKEHEDKDDASGRSSPCLSTASQMSSVSMASGSVKMTSFAERKLQRLNSCETKSSTSSSQKTTPDASESCPAPLTTWRQKREQSPSQHGKDPASLLASELVQLHMQLEEKRRAIEAQKKKMEALSARQRLKLGKAAFLHVVKKGKAEAAPPLRPEHFAKEYSQHNGEDCGDAVSKTEDFLVKEEQREELLHEPQDVDKESLAFAQQHKAKDPVALHELERNKVISAALLEDTVGEVVDVNECDLSIEKLNETISTLQQAILKISQQQEQLLMKSPTVPVPGSKNNSQDHKVKAPVHFVEPLSPTGVAGHRKAPRLGQGRNSRSGRPAELKVPKDRPQGSSRSKTPTPSVETLPHLRPFPASSHPRTPTDPGLDSALEPSGDPHGKCLFDSYRLHDESNQRTLTLSSSKDANILSEQMSLKEVLDASVKEVGSSSSDVSGKESVPVEEPLRSRASLIEVDLSDLKAPDEDGELVSLDGSADLVSEGDQKPGVGFFFKDEQKAEDELAKKRAAFLLKQQRKAEEARVRKQQLEAEVELKRDEARRKAEEDRVRKEEEKARRELIKQEYLRRKQQQILEEQGLGKPKSKPKKPRPKSVHREESCSDSGTKCSSTPDNLSRTQSGSSLSLASAATTEPESVHSGGTPSQRVESMEALPILSRNPSRSTDRDWETASAASSLASVAEYTGPKLFKEPSSKSNKPIIHNAISHCCLAGKVNEPHKNSILEELEKCDANHYIILFRDAGCQFRALYCYYPDTEEIYKLTGTGPKNITKKMIDKLYKYSSDRKQFNLIPAKTMSVSVDALTIHNHLWQPKRPAVPKKAQTRK

SEQ ID NO: 5252 - protein, 660 aa, Homo sapiens
MRMPSSTWARIMSSCGCDACRVGPSSVMRPSPRYPRAWVTRTWVPIPPRPMASSGSVPRDCWLLAAIASLTLNDTLLHRVVPHGQSFQNGYAGIFHFQLWQFGEWVDVVVDDLLPIKDGKLVFVHSAEGNEFWSALLEKAYAKVNGSYEALSGGSTSEGFEDFTGGVTEWYELRKAPSDLYQIILKALERGSLLGCSIDISSVLDMEAITFKKLVKGHAYSVTGAKQVNYRGQVVSLIRMRNPWGEVEWTGAWSDSSSEWNNVDPYERDQLRVKMEDGEFWMSFRDFMREFTRLEICNLTPDALKSRTIRKWNTTLYEGTWRRGSTAGGCRNYPATFWVNPQFKIRLDETDDPDDYGDRESGCSFVLALMQKHRRRERRFGRDMETIGFAVYEVPPELVGQPAVHLKRDFFLANASRARSEQFINLREVSTRFRLPPGEYVVVPSTFEPNKEGDFVLRFFSEKSAGTVELDDQIQANLPDEQVLSEEEIDENFKALFRQLAGEDMEISVKELRTILNRIISKHKDLRTKGFSLESCRSMVNLMDRDGNGKLGLVEFNILWNRIRNYLSIFRKFDLDKSGSMSAYEMRMAIESAGFKLNKKLYELIITRYSEPDLAVDFDNFVCCLVRLETMFRFFKTLDTDLDGVVTFDLFKWLQLTMFA

SEQ ID NO: 5253 - protein, 714 aa, Homo sapiens
MSEEIITPVYCTGVSAQVQKQRARELGLGRHENAIKYLGQDYEQLRVRCLQSGTLFRDEAFPPVPQSLGYKDLGPNSSKTYGIKWKRPTELLSNPQFIVDGATRTDICQGALGDCWLLAAIASLTLNDTLLHRVVPHGQSFQNGYAGIFHFQLWQFGEWVDVVVDDLLPIKDGKLVFVHSAEGNEFWSALLEKAYAKVNGSYEALSGGSTSEGFEDFTGGVTEWYELRKAPSDLYQIILKALERGSLLGCSIDISSVLDMEAITFKKLVKGHAYSVTGAKQVNYRGQVVSLIRMRNPWGEVEWTGAWSDSSSEWNNVDPYERDQLRVKMEDGEFWMSFRDFMREFTRLEICNLTPDALKSRTIRKWNTTLYEGTWRRGSTAGGCRNYPATFWVNPQFKIRLDETDDPDDYGDRESGCSFVLALMQKHRRRERRFGRDMETIGFAVYEVPPELVGQPAVHLKRDFFLANASRARSEQFINLREVSTRFRLPPGEYVVVPSTFEPNKEGDFVLRFFSEKSAGTVELDDQIQANLPDEQVLSEEEIDENFKALFRQLAGEDMEISVKELRTILNRIISKHKDLRTKGFSLESCRSMVNLMDRDGNGKLGLVEFNILWNRIRNYLSIFRKFDLDKSGSMSAYEMRMAIESAGFKLNKKLYELIITRYSEPDLAVDFDNFVCCLVRLETMFRFFKTLDTDLDGVVTFDLFKWLQLTMFA

SEQ ID NO: 5254 - protein, 714 aa, Homo sapiens; identical to SEQ ID NO: 5253

SEQ ID NO: 5255 - protein, 162 aa, Homo sapiens
MSEEIITPVYCTGVSAQVQKQRARELGLGRHENAIKYLGQDYEQLRVRCLQSGTLFRDEAFPPVPQSLGYKDLGPNSSKTYGIKWKRPTELLSNPQFIVDGATRTDICQGALGDCWLLAAIASLTLNDTLLHRVVPHGQSFQNGYAGIFHFQLWQFGEWVDV

SEQ ID NO: 5256 - protein, 714 aa, Homo sapiens; identical to SEQ ID NO: 5253

SEQ ID NO: 5257 - protein, 152 aa, Homo sapiens
MSEEIITPVYCTGVSAQVQKQRARELGLGRHENAIKYLGQDYEQLRVRCLQSGTLFRDEAFPPVPQSLGYKDLGPNSSKTYGIKWKRPTELLSNPQFIVDGATRTDICQGALGDCWLLAAIASLTLNDTLLHRVVPHGQSFQNGYAGIFHFQ

SEQ ID NO: 5258 - protein, 162 aa, Homo sapiens; identical to SEQ ID NO: 5255

SEQ ID NO: 5259 - protein, 163 aa, Homo sapiens
MSEEIITPVYCTGVSAQVQKQRARELGLGRHENAIKYLGQDYEQLRVRCLQSGTLFRDEAFPPVPQSLGYKDLGPNSSKTYGIKWKRPTELLSNPQFIVDGATRTDICQGALGDCWLLAAIASLTLNDTLLHRVVPHGQSFQNGYAGIFHFQLWQFGEWVDVV

SEQ ID NO: 5260 - protein, 191 aa, Homo sapiens
MSEEIITPVYCTGVSAQVQKQRARELGLGRHENAIKYLGQDYEQLRVRCLQSGTLFRDEAFPPVPQSLGYKDLGPNSSKTYGIKWKRPTELLSNPQFIVDGATRTDICQGALGDCWLLAAIASLTLNDTLLHRVVPHGQSFQNGYAGIFHFQLWQFGEWVDVVVDDLLPIKDGKLVFVHSAEGNEFWSALL

SEQ ID NO: 5261 - protein, 170 aa, Homo sapiens
MSEEIITPVYCTGVSAQVQKQRARELGLGRHENAIKYLGQDYEQLRVRCLQSGTLFRDEAFPPVPQSLGYKDLGPNSSKTYGIKWKRPTELLSNPQFIVDGATRTDICQGALGDCWLLAAIASLTLNDTLLHRVVPHGQSFQNGYAGIFHFQLWQFGEWVDVVVDDLLPI

SEQ ID NO: 5262 - protein, 122 aa, Homo sapiens
MSEEIITPVYCTGVSAQVQKQRARELGLGRHENAIKYLGQDYEQLRVRCLQSGTLFRDEAFPPVPQSLGYKDLGPNSSKTYGIKWKRPTELLSNPQFIVDGATRTDICQGALGDCWLLAAIA

SEQ ID NO: 5263 - protein, 63 aa, Homo sapiens
MSEEIITPVYCTGVSAQVQKQRARELGLGRHENAIKYLGQDYEQLRVRCLQSGTLFRDEAFPP

SEQ ID NO: 5264 - protein, 714 aa, Homo sapiens; identical to SEQ ID NO: 5253

SEQ ID NO: 5265 - protein, 714 aa, Homo sapiens; identical to SEQ ID NO: 5253

SEQ ID NO: 5266 - protein, 148 aa, Homo sapiens
MSEEIITPVYCTGVSAQVQKQRARELGLGRHENAIKYLGQDYEQLRVRCLQSGTLFRDEAFPPVPQSLGYKDLGPNSSKTYGIKWKRPTELLSNPQFIVDGATRTDICQGALGDCWLLAAIASLTLNDTLLHRVVPHGQSFQNGYAGI

SEQ ID NO: 5267 - protein, 136 aa, Homo sapiens
MSEEIITPVYCTGVSAQVQKQRARELGLGRHENAIKYLGQDYEQLRVRCLQSGTLFRDEAFPPVPQSLGYKDLGPNSSKTYGIKWKRPTELLSNPQFIVDGATRTDICQGALGDCWLLAAIASLTLNDTLLHRVVP

SEQ ID NO: 5268 - protein, 700 aa, Homo sapiens
MAGIAAKLAKDREAAEGLGSHDRAIKYLNQDYEALRNECLEAGTLFQDPSFPAIPSALGFKELGPYSSKTRGIEWKRPTEICADPQFIIGGATRTDICQGALGDCWLLAAIASLTLNEEILARVVPLNQSFQENYAGIFHFQFWQYGEWVEVVVDDRLPTKDGELLFVHSAEGSEFWSALLEKAYAKINGCYEALSGGATTEGFEDFTGGIAEWYELKKPPPNLFKIIQKALQKGSLLGCSIDITSAADSEAITFQKLVKGHAYSVTGAEEVESNGSLQKLIRIRNPWGEVEWTGRWNDNCPSWNTIDPEERERLTRRHEDGEFWMSFSDFLRHYSRLEICNLTPDTLTSDTYKKWKLTKMDGNWRRGSTAGGCRNYPNTFWMNPQYLIKLEEEDEDEEDGESGCTFLVGLIQKHRRRQRKMGEDMHTIGFGIYEVPEELSGQTNIHLSKNFFLTNRARERSDTFINLREVLNRFKLPPGEYILVPSTFEPNKDGDFCIRVFSEKKADYQAVDDEIEANLEEFDISEDDIDDGFRRLFAQLAGEDAEISAFELQTILRRVLAKRQDIKSDGFSIETCKIMVDMLDSDGSGKLGLKEFYILWTKIQKYQKIYREIDVDRSGTMNSYEMRKALEEAGFKMPCQLHQVIVARFADDQLIIDFDNFVRCLVRLETLFKIFKQLDPENTGTIELDLISWLCFSVL

SEQ ID NO: 5269 - protein, 729 aa, Homo sapiens
APGPGRAPAERSAESPRPFSAQYGRRDRSMAGIAAKLAKDREAAEGLGSHDRAIKYLNQDYEALRNECLEAGTLFQDPSFPAIPSALGFKELGPYSSKTRGIEWKRPTEICADPQFIIGGATRTDICQGALGDCWLLAAIASLTLNEEILARVVPLNQSFQENYAGIFHFQFWQYGEWVEVVVDDRLPTKDGELLFVHSAEGSEFWSALLEKAYAKINGCYEALSGGATTEGFEDFTGGIAEWYELKKPPPNLFKIIQKALQKGSLLGCSIDITSAADSEAITFQKLVKGHAYSVTGAEEVESNGSLQKLIRIRNPWGEVEWTGRWNDNCPSWNTIDPEERERLTRRHEDGEFWMSFSDFLRHYSRLEICNLTPDTLTSDTYKKWKLTKMDGNWRRGSTAGGCRNYPNTFWMNPQYLIKLEEEDEDEEDGESGCTFLVGLIQKHRRRQRKMGEDMHTIGFGIYEVHPQLSGQTNIHLSKNFFLTNRARERSDTFINLREVLNRFKLPPGEYILVPSTFEPNKDGDFCIRVFSEKKADYQAVDDEIEANLEEFDISEDDIDDGFRRLFAQLAGEDAEISAFELQTILRRVLAKRQDIKSDGFSIETCKIMVDMLDSDGSGKLGLKEFYILWTKIQKYQKIYREIDVDRSGTMNSYEMRKALEEAGFKMPCQLHQVIVARFADDQLIIDFDNFVRCLVRLETLFKIFKQLDPENTGTIELDLISWLCFSVL

SEQ ID NO: 5270 - protein, 622 aa, Homo sapiens
MEICADPQFIIGGATRTDICQGALGDCWLLAAIASLTLNEEILARVVPLNQSFQENYAGIFHFQFWQYGEWVEVVVDDRLPTKDGELLFVHSAEGSEFWSALLEKAYAKINGCYEALSGGATTEGFEDFTGGIAEWYELKKPPPNLFKIIQKALQKGSLLGCSIDITSAADSEAITFQKLVKGHAYSVTGAEEVESNGSLQKLIRIRNPWGEVEWTGRWNDNCPSWNTIDPEERERLTRRHEDGEFWMSFSDFLRHYSRLEICNLTPDTLTSDTYKKWKLTKMDGNWRRGSTAGGCRNYPNTFWMNPQYLIKLEEEDEDEEDGESGCTFLVGLIQKHRRRQRKMGEDMHTIGFGIYEVPEELSGQTNIHLSKNFFLTNRARERSDTFINLREVLNRFKLPPGEYILVPSTFEPNKDGDFCIRVFSEKKADYQAVDDEIEANLEEFDISEDDIDDGFRRLFAQLAGEDAEISAFELQTILRRVLAKRQDIKSDGFSIETCKIMVDMLDSDGSGKLGLKEFYILWTKIQKYQKIYREIDVDRSGTMNSYEMRKALEEAGFKMPCQLHQVIVARFADDQLIIDFDNFVRCLVRLETLFKIFKQLDPENTGTIELDLISWLCFSVL

SEQ ID NO: 5271 - protein, 131 aa, Homo sapiens
MEICADPQFIIGGATRTDICQGALGDCWLLAAIASLTLNEEILARVVPLNQSFQENYAGIFHFQFWQYGEWVEVVVDDRLPTKDGELLFVHSAEGSEFWSALLEKAYAKINGCYEALSGGATTEGFEDFTG

SEQ ID NO: 5272 - protein, 51 aa, Homo sapiens
MKNREAARECRRKKKEYVKCLENRVAVLENQNKTLIEELKALKDLYCHKSD

SEQ ID NO: 5273 - protein, 327 aa, Homo sapiens
MTMESGAENQQSGDAAVTEAENQQMTVQAQPQIATLAQVSMPAAHATSSAPTVTLVQLPNGQTVQVHGVIQAAQPSVIQSPQVQTVQISTIAESEDSQESVDSVTDSQKRREILSRRPSYRKILNDLSSDAPGVPRIEEEKSEEETSAPAITTVTVPTPIYQTSSGQYIAITQGGAIQLANNGTDGVQGLQTLTMTNAAATQPGTTILQYAQTTDGQQILVPSNQVVVQAASGDVQTYQIRTAPTSTIAPGVVMASSPALPTQPAEEAARKREVRLMKNREAARECRRKKKEYVKCLENRVAVLENQNKTLIEELKALKDLYCHKSD

SEQ ID NO: 5274 - protein, 230 aa, Homo sapiens
MTMESGAENQQSGDAAVTEAENQQMTVQAQPQIATLAQVSMPAAHATSSAPTVTLVQLPNGQTVQVHGVIQAAQPSVIQSPQVQTVQSSCKDLKRLFSGTQISTIAESEDSQESVDSVTDSQKRREILSRRPSYRKILNDLSSDAPGVPRIEEEKSEEETSALPTQPAEEAARKREVRLMKNREAARECRRKKKEYVKCLENRVAVLENQNKTLIEELKALKDLYCHKSD

SEQ ID NO: 5275 - protein, 79 aa, Homo sapiens
MTMESGAENQQSGDAAVTEAENQQMTVQAQPQIATLAQVSMPAAHATSSAPTVTLVQLPNGQTVQVHGVIQAAQPSVIQ

SEQ ID NO: 5276 - protein, 327 aa, Homo sapiens; identical to SEQ ID NO: 5273

SEQ ID NO: 5277 - protein, 341 aa, Homo sapiens
MTMESGAENQQSGDAAVTEAENQQMTVQAQPQIATLAQVSMPAAHATSSAPTVTLVQLPNGQTVQVHGVIQAAQPSVIQSPQVQTVQSSCKDLKRLFSGTQISTIAESEDSQESVDSVTDSQKRREILSRRPSYRKILNDLSSDAPGVPRIEEEKSEEETSAPAITTVTVPTPIYQTSSGQYIAITQGGAIQLANNGTDGVQGLQTLTMTNAAATQPGTTILQYAQTTDGQQILVPSNQVVVQAASGDVQTYQIRTAPTSTIAPGVVMASSPALPTQPAEEAARKREVRLMKNREAARECRRKKKEYVKCLENRVAVLENQNKTLIEELKALKDLYCHKSD

SEQ ID NO: 5278 - protein, 182 aa, Homo sapiens
MTMESGAENQQSGDAAVTEAENQQMTVQAQPQIATLAQVSMPAAHATSSAPTVTLVQLPNGQTVQVHGVIQAAQPSVIQSPQVQTVQSSCKDLKRLFSGTQISTIAESEDSQESVDSVTDSQKRREILSRRPSYRKILNDLSSDAPGVPRIEEEKSEEETSAPAITTVTVPTPIYQTSSGQY

SEQ ID NO: 5279 - protein, 132 aa, Homo sapiens
MTMESGAENQQSGDAAVTEAENQQMTVQAQPQIATLAQVSMPAAHATSSAPTVTLVQLPNGQTVQVHGVIQAAQPSVIQSPQVQTVQSSCKDLKRLFSGTQISTIAESEDSQESVDSVTDSQKRREILSRRP

SEQ ID NO: 5280 - protein, 234 aa, Homo sapiens
MTMESGAENQQSGDAAVTEAENQQMTVQAQPQIATLAQVSMPAAHATSSAPTVTLVQLPNGQTVQVHGVIQAAQPSVIQSPQVQTVQISTIAESEDSQESVDSVTDSQKRREILSRRPSYRKILNDLSSDAPGVPRIEEEKSEEETSAPAITTVTVPTPIYQTSSGQYIAITQGGAIQLANNGTDGVQGLQTLTMTNAAATQPGTTILQYAQTTDGQQILVPSNQVVVQGTQKL

SEQ ID NO: 5281 - protein, 153 aa, Homo sapiens
MPAAHATSSAPTVTLVQLPNGQTVQVHGVIQAAQPSVIQSPQVQTVQSSCKDLKRLFSGTQISTIAESEDSQESVDSVTDSQKRREILSRRPSYRKILNDLSSDAPGVPRIEEEKSEEETSAPAITTVTVPTPIYQTSSGQYTYLRDTTYSCQ

SEQ ID NO: 5282 - protein, 120 aa, Homo sapiens
MDDSKVVGGKVKKPGKRGRKPAKIDLKAKLERSRQSARECRARKKLRYQYLEELVSSRERAICALREELEMYKQWCMAMDQGKIPSEIKALLTGEEQNKSQQNSSRHTKAGKTDANSNSW

SEQ ID NO: 5283 - protein, 312 aa, Homo sapiens
MRMLLALLALSAARPSASAESHWCYEVQAESSNYPCLVPVKWGGNCQKDRQSPINIVTTKAKVDKKLGRFFFSGYDKKQTWTVQNNGHSVMMLLENKASISGGGLPAPYQAKQLHLHWSDLPYKGSEHSLDGEHFAMEMHIVHEKEKGTSRNVKEAQDPEDEIAVLAFLVEAGTQVNEGFQPLVEALSNIPKPEMSTTMAESSLLDLLPKEEKLRHYFRYLGSLTTPTCDEKVVWTVFREPIQLHREQILAFSQKLYYDKEQTVSMKDNVRPLQQLGQRTVIKSGAPGRPLPWALPALLGPMLACLLAGFLR

SEQ ID NO: 5284 - protein, 459 aa, Homo sapiens
MAPLCPSPWLPLLIPAPAPGLTVQLLLSLLLLVPVHPQRLPRMQEDSPLGGGSSGEDDPLGEEDLPSEEDSPREEDPPGEEDLPGEEDLPGEEDLPEVKPKSEEEGSLKLEDLPTVEAPGDPQEPQNNAHRDKEGDDQSHWRYGGDPPWPRVSPACAGRFQSPVDIRPQLAAFCPALRPLELLGFQLPPLPELRLRNNGHSVQLTLPPGLEMALGPGREYRALQLHLHWGAAGRPGSEHTVEGHRFPAEIHVVHLSTAFARVDEALGRPGGLAVLAAFLEEGPEENSAYEQLLSRLEEIAEEGSETQVPGLDISALLPSDFSRYFQYEGSLTTPPCAQGVIWTVFNQTVMLSAKQLHTLSDTLWGPGDSRLQLNFRATQPLNGRVIEASFPAGVDSSPRAAEPVQLNSCLAAGDILALVFGLLFAVTSVAFLVQMRRQHRRGTKGGVSYRPAEVAETGA

SEQ ID NO: 5285 - protein, 356 aa, Homo sapiens [sequence omitted]

SEQ ID NO: 5286 - protein, 702 aa, Homo sapiens
MESPSAPPHRWCIPWQRLLLTASLLTFWNPPTTAKLTIESTPFNVAEGKEVLLLVHNLPQHLFGYSWYKGERVDGNRQIIGYVIGTQQATPGPAYSGREIIYPNASLLIQNIIQNDTGFYTLHVIKSDLVNEEATGQFRVYPELPKPSISSNNSKPVEDKDAVAFTCEPETQDATYLWWVNNQSLPVSPRLQLSNGNRTLTLFNVTRNDTASYKCETQNPVSARRSDSVILNVLYGPDAPTISPLNTSYRSGENLNLSCHAASNPPAQYSWFVNGTFQQSTQELFIPNITVNNSGSYTCQAHNSDTGLNRTTVTTITVYAEPPKPFITSNNSNPVEDEDAVALTCEPEIQNTTYLWWVNNQSLPVSPRLQLSNDNRTLTLLSVTRNDVGPYECGIQNKLSVDHSDPVILNVLYGPDDPTISPSYTYYRPGVNLSLSCHAASNPPAQYSWLIDGNIQQHTQELFISNITEKNSGLYTCQANNSASGHSRTTVKTITVSAELPKPSISSNNSKPVEDKDAVAFTCEPEAQNTTYLWWVNGQSLPVSPRLQLSNGNRTLTLFNVTRNDARAYVCGIQNSVSANRSDPVTLDVLYGPDTPIISPPDSSYLSGANLNLSCHSASNPSPQYSWRINGIPQQHTQVLFIAKITPNNNGTYACFVSNLATGRNNSIVKSITVSASGTSPGLSAGATVGIMIGVLVGVALI

SEQ ID NO: 5287 - protein, 420 aa, Homo sapiens
MESPSAPPHRWCIPWQRLLLTASLLTFWNPPTTAKLTIESTPFNVAEGKEVLLLVHNLPQHLFGYSWYKGERVDGNRQIIGYVIGTQQATPGPAYSGREIIYPNASLLIQNIIQNKLSVDHSDPVILNVLYGPDDPTISPSYTYYRPGVNLSLSCHAASNPPAQYSWLIDGNIQQHTQELFISNITEKNSGLYTCQANNSASGHSRTTVKTITVSAELPKPSISSNNSKPVEDKDAVAFTCEPEAQNTTYLWWVNGQSLPVSPRLQLSNGNRTLTLFNVTRNDARAYVCGIQNSVSANRSDPVTLDVLYGPDTPIISPPDSSYLSGANLNLSCHSASNPSPQYSWRINGIPQQHTQVLFIAKITPNNNGTYACFVSNLATGRNNSIVKSITVSASGTSPGLSAGATVGIMIGVLVGVALI

SEQ ID NO: 5288 - protein, 702 aa, Homo sapiens; identical to SEQ ID NO: 5286

SEQ ID NO: 5289 - protein, 344 aa, Homo sapiens
MGPPSAPPCRLHVPWKEVLLTASLLTFWNPPTTAKLTIESTPFNVAEGKEVLLLAHNLPQNRIGYSWYKGERVDGNSLIVGYVIGTQQATPGPAYSGRETIYPNASLLIQNVTQNDTGFYTLQVIKSDLVNEEATGQFHVYPELPKPSISSNNSNPVEDKDAVAFTCEPEVQNTTYLWWVNGQSLPVSPRLQLSNGNMTLTLLSVKRNDAGSYECEIQNPASANRSDPVTLNVLYGPDGPTISPSKANYRPGENLNLSCHAASNPPAQYSWFINGTFQQSTQELFIPNITVNNSGSYMCQAHNSATGLNRTTVTMITVSGSAPVLSAVATVGITIGVLARVALI

SEQ ID NO: 5290 - protein, 658 aa, Homo sapiens
MVPRLLLRAWPRGPAVGPGAPSRPLSAGSGPGQYLQRSIVPTMHYQDSLPRLPIPKLEDTIRRYLSAQKPLLNDGQFRKTEQFCKSFENGIGKELHEQLVALDKQNKHTSYISGPWFDMYLSARDSVVLNFNPFMAFNPDPKSEYNDQLTRATNMTVSAIRFLKTLRAGLLEPEVFHLNPAKSDTITFKRLIRFVPSSLSWYGAYLVNAYPLDMSQYFRLFNSTRLPKPSRDELFTDDKARHLLVLRKGNFYIFDVLDQDGNIVSPSEIQAHLKYILSDSSPAPEFPLAYLTSENRDIWAELRQKLMSSGNEESLRKVDSAVFCLCLDDFPIKDLVHLSHNMLHGDGTNRWFDKSFNLIIAKDGSTAVHFEHSWGDGVAVLRFFNEVFKDSTQTPAVTPQSQPATTDSTVTVQKLNFELTDALKTGITAAKEKFDATMKTLTIDCVQFQRGGKEFLKKQKLSPDAVAQLAFQMAFLRQYGQTVATYESCSTAAFKHGRTETIRPASVYTKRCSEAFVREPSRHSAGELQQMMVECSKYHGQLTKEAAMGQGFDRHLFALRHLAAAKGIILPELYLDPAYGQINHNVLSTSTLSSPAVNLGGFAPVVSDGFGVGYAVHDNWIGCNVSSYPGRNAREFLQCVEKALEDMFDALEGKSIKS

SEQ ID NO: 5291 - protein, 391 aa, Homo sapiens
MSGPVPSRARVYTDVNTHRPREYWDYESHVVEWGNQDDYQLVRKLGRGKYSEVFEAINITNNEKVVVKILKPVKKKKIKREIKILENLRGGPNIITLADIVKDPVSRTPALVFEHVNNTDFKQLYQTLTDYDIRFYMYEILKALDYCHSMGIMHRDVKPHNVMIDHEHRKLRLIDWGLAEFYHPGQEYNVRVASRYFKGPELLVDYQMYDYSLDMWSLGCMLASMIFRKEPFFHGHDNYDQLVRIAKVLGTEDLYDYIDKYNIELDPRFNDILGRHSRKRWERFVHSENQHLVSPEALDFLDKLLRYDHQSRLTAREAMEHPYFYTVVKDQARMGSSSMPGGSTPVSSANMMSGISSVPTPSPLGPLAGSPVIAAANPLGMPVPAAAGAQQ

SEQ ID NO: 5292 - protein, 391 aa, Homo sapiens; identical to SEQ ID NO: 5291

SEQ ID NO: 5293 - protein, 397 aa, Homo sapiens
MSGPVPSRARVYTDVNTHRPREYWDYESHVVEWGNQDDYQLVRKLGRGKYSEVFEAINITNNEKVVVKILKPVKKKKIKREIKILENLRGGPNIITLADIVKDPVSRTPALVFEHVNNTDFKQLYQTLTDYDIRFYMYEILKALDYCHSMGIMHRDVKPHNVMIDHEHRKLRLIDWGLAEFYHPGQEYNVRVASRYFKGPELLVDYQMYDYSLDMWSLGCMLASMIFRKEPFFHGHDNYDQLVRIAKVLGTEDLYDYIDKYNIELDPRFNDILGRHSRKRWERFVHSENQHLVSPEALDFLDKLLRYDHQSRLTAREAMEHPYFYTVVKDQARMGSSSMPGGSTPVSSANMMSGISSVPTPSPLGPLAGSPVIAAANPLGCLFQLPLRSAVTALSVS

SEQ ID NO: 5294 - protein, 255 aa, Homo sapiens
MYEILKALDYCHSMGIMHRDVKPHNVMIDHEHRKLRLIDWGLAEFYHPGQEYNVRVASRYFKGPELLVDYQMYDYSLDMWSLGCMLASMIFRKEPFFHGHDNYDQLVRIAKVLGTEDLYDYIDKYNIELDPRFNDILGRHSRKRWERFVHSENQHLVSPEALDFLDKLLRYDHQSRLTAREAMEHPYFYTVVKDQARMGSSSMPGGSTPVSSANMMSGISSVPTPSPLGPLAGSPVIAAANPLGMPVPAAAGAQQ

SEQ ID NO: 5295 - protein, 385 aa, Homo sapiens
MSGPVPSRARVYTDVNTHRPREYWDYESHVVEWGNQDDYQLVRKLGRGKYSEVFEAINITNNEKVVVKILKPVKKKKIKREIKILENLRGGPNIITLADIVKDPVSRTPALVFEHVNNTDFKQLYQTLTDYDIRFYMYEILKALDYCHSMGIMHRDVKPHNVMIDHEHRKLRLIDWGLAEFYHPGQEYNVRVASRYFKGPELLVDYQMYDYSLDMWSLGCMLASMIFRKEPFFHGHDNYDQLVRIAKVLGTEDLYDYIDKYNIELDPRFNDILGRHSRKRWERFVHSENQHLVSPEALDFLDKLLRYDHQSRLTAREAMEHPYFYTVVKDQARMGSSSMPGGSTPVSSANMMSEMKFCRVAQAGLELLSSTVYPPWPPKVLRLEA

SEQ ID NO: 5296 - protein, 350 aa, Homo sapiens
MPGPAAGSRARVYAEVNSLRSREYWDYEAHVPSWGNQDDYQLVRKLGRGKYSEVFEAINITNNERVVVKILKPVKKKKIKREVKILENLRGGTNIIKLIDTVKDPVSKTPALVFEYINNTDFKQLYQILTDFDIRFYMYELLKALDYCHSKGIMHRDVKPHNVMIDHQQKKLRLIDWGLAEFYHPAQEYNVRVASRYFKGPELLVDYQMYDYSLDMWSLGCMLASMIFRREPFFHGQDNYDQLVRIAKVLGTEELYGYLKKYHIDLDPHFNDILGQHSRKRWENFIHSENRHLVSPEALDLLDKLLRYDHQQRLTAKEAMEHPYFYPVVKEQSQPCADNAVLSSGLTAAR

SEQ ID NO: 5297 - protein, 199 aa, Homo sapiens
MEARDKQVLRSLRLELGAEVLVEGLVLQYLYQEGILTENHIQEINAQTTGLRKTMLLLDILPSRGPKAFDTFLDSLQEFPWVREKLKKAREEAMTDLPAGDRLTGIPSHILNSSPSDRQINQLAQRLGPEWEPMVLSLGLSQTDIYRCKANHPHNVQSQVVEAFIRWRQRFGKQATFQSLHNGLRAVEVDPSLLLHMLE

SEQ ID NO: 5298 - protein, 121 aa, Homo sapiens
MEARDKQVLRSLRLELGAEVLVEGLVLQYLYQEGILTENHIQEINAQTTGLRKTMLLLDILPSRGPKAFDTFLDSLQEFPWVREKLKKAREEAMTDLPAEMRKLRPKDSVTCLASQLTWRF

SEQ ID NO: 5299 - protein, 199 aa, Homo sapiens; identical to SEQ ID NO: 5297

SEQ ID NO: 5300 - protein, 103 aa, Homo sapiens
MEARDKQVLRSLRLELGAEVLVEGLVLQYLYQEGILTENHIQEINAQTTGLRKTMLLLDILPSRGPKAFDTFLDSLQEFPWVREKLKKAREEAMTDLPAGCWP

SEQ ID NO: 5301 - protein, 480 aa, Homo sapiens
MSAEVIHQVEEALDTDEKEMLLFLCRDVAIDVVPPNVRDLLDILRERGKLSVGDLAELLYRVRRFDLLKRILKMDRKAVETHLLRNPHLVSDYRVLMAEIGEDLDKSDVSSLIFLMKDYMGRGKISKEKSFLDLVVELEKLNLVAPDQLDLLEKCLKNIHRIDLKTKIQKYKQSVQGAGTSYRNVLQAAIQKSLKDPSNNFRLHNGRSKEQRLKEQLGAQQEPVKKSIQESEAFLPQSIPEERYKMKSKPLGICLIIDCIGNETELLRDTFTSLGYEVQKFLHLSMHGISQILGQFACMPEHRDYDSFVCVLVSRGGSQSVYGVDQTHSGLPLHHIRRMFMGDSCPYLAGKPKMFFIQNYVVSEGQLEDSSLLEVDGPAMKNVEFKAQKRGLCTVHREADFFWSLCTADMSLLEQSHSSPSLYLQCLSQKLRQERKRPLLDLHIELNGYMYDWNSRVSAKEKYYVWLQHTLRKKLILSYT

SEQ ID NO: 5302 - protein, 462 aa, Homo sapiens
MSAEVIHQVEEALDTDEKEMLLFLCRDVAIDVVPPNVRDLLDILRERGKLSVGDLAELLYRVRRFDLLKRILKMDRKAVETHLLRNPHLVSDYRVLMAEIGEDLDKSDVSSLIFLMKDYMGRGKISKEKSFLDLVVELEKLNLVAPDQLDLLEKCLKNIHRIDLKTKIQKYKQSVQGAGTSYRNVLQAAIQKSLKDPSNNFRLHNGRSKEQRLKEQLGAQQEPVKKSIQESEAFLPQSIPEERYKMKSKPLGICLIIDCIGNETELLRDTFTSLGYEVQKFLHLSMHGISQILGQFACMPEHRDYDSFVCVLVSRGGSQSVYGVDQTHSGLPLHHIRRMFMGDSCPYLAGKPKMFFIQNYVVSEGQLEDSSLLEVDGPAMKNVEFKAQKRGLCTVHREADFFWSLCTADMSLLEQSHSSPSLYLQCLSQKLRQERGTIPGSGITESKDMHFSSLGCILLDVL

SEQ ID NO: 5303 - protein, 348 aa, Homo sapiens
MAEIGEDLDKSDVSSLIFLMKDYMGRGKISKEKSFLDLVVELEKLNLVAPDQLDLLEKCLKNIHRIDLKTKIQKYKQSVQGAGTSYRNVLQAAIQKSLKDPSNNFREEPVKKSIQESEAFLPQSIPEERYKMKSKPLGICLIIDCIGNETELLRDTFTSLGYEVQKFLHLSMHGISQILGQFACMPEHRDYDSFVCVLVSRGGSQSVYGVDQTHSGLPLHHIRRMFMGDSCPYLAGKPKMFFIQNYVVSEGQLEDSSLLEVDGPAMKNVEFKAQKRGLCTVHREADFFWSLCTADMSLLEQSHSSPSLYLQCLSQKLRQERGTIPGSGITESKDMHFSSLGCILLDVL

SEQ ID NO: 5304 - protein, 300 aa, Homo sapiens
MSAEVIHQVEEALDTDEKEMLLFLCRDVAIDVVPPNVRDLLDILRERGKLSVGDLAELLYRVRRFDLLKRILKMDRKAVETHLLRNPHLVSDYRVLMAEIGEDLDKSDVSSLIFLMKDYMGRGKISKEKSFLDLVVELEKLNLVAPDQLDLLEKCLKNIHRIDLKTKIQKYKQSVQGAGTSYRNVLQAAIQKSLKDPSNNFRLHNGRSKEQRLKEQLGAQQEPVKKSIQESEAFLPQSIPEERYKMKSKPLGICLIIDCIGNETENAHSWIFTLNSMATCMIGTAEFLPRRNIMSGCSTL

SEQ ID NO: 5305 - protein, 250 aa, Homo sapiens
MSAEVIHQVEEALDTDEKEMLLFLCRDVAIDVVPPNVRDLLDILRERGKLSVGDLAELLYRVRRFDLLKRILKMDRKAVETHLLRNPHLVSDYRVLMAEIGEDLDKSDVSSLIFLMKDYMGRGKISKEKSFLDLVVELEKLNLVAPDQLDLLEKCLKNIHRIDLKTKIQKYKQSGGWNGTWMTKASFSLWLEIASLYILHIPDLPTPLPCIFMISAKCCQAVLNISVFKKESGICTGWQSYGHSGVLHVC

SEQ ID NO: 5306 - protein, 118 aa, Homo sapiens
MSAEVIHQVEEALDTDEKEMLLFLCRDVAIDVVPPNVRDLLDILRERGKLSVGDLAELLYRVRRFDLLKRILKMDRKAVETHLLRNPHLVSDYRVLMAEIGEDLDKSDVSSLIFLMKD

SEQ ID NO: 5307 - protein, 480 aa, Homo sapiens; identical to SEQ ID NO: 5301

SEQ ID NO: 5308 - protein, 62 aa, Homo sapiens
MSAEVIHQVEEALDTDEKEMLLFLCRDVAIDVVPPNVRDLLDILRERGKLSVGDLAELLYRV

SEQ ID NO: 5309 - protein, 64 aa, Homo sapiens
MSAEVIHQVEEALDTDEKEMLLFLCRDVAIDVVPPNVRDLLDILRERGKLSVGDLAELLYRVRR

SEQ ID NO: 5310 - protein, 129 aa, Homo sapiens
MSAEVIHQVEEALDTDEKEMLLFLCRDVAIDVVPPNVRDLLDILRERGKLSVGDLAELLYRVRRFDLLKRILKMDRKAVETHLLRNPHLVSDYRVLMAEIGEDLDKSDVSSLIFLMKDYMGRGKISKEK

SEQ ID NO: 5311 - protein, 384 aa, Homo sapiens
MAEIGEDLDKSDVSSLIFLMKDYMGRGKISKEKSFLDLVVELEKLNLVAPDQLDLLEKCLKNIHRIDLKTKIQKYKQSVQGAGTSYRNVLQAAIQKSLKDPSNNFRLHNGRSKEQRLKEQLGAQQEPVKKSIQESEAFLPQSIPEERYKMKSKPLGICLIIDCIGNETELLRDTFTSLGYEVQKFLHLSMHGISQILGQFACMPEHRDYDSFVCVLVSRGGSQSVYGVDQTHSGLPLHHIRRMFMGDSCPYLAGKPKMFFIQNYVVSEGQLEDSSLLEVDGPAMKNVEFKAQKRGLCTVHREADFFWSLCTADMSLLEQSHSSPSLYLQCLSQKLRQERKRPLLDLHIELNGYMYDWNSRVSAKEKYYVWLQHTLRKKLILSYT

SEQ ID NO: 5312 - protein, 221 aa, Homo sapiens
MSAEVIHQVEEALDTDEKEMLLFLCRDVAIDVVPPNVRDLLDILRERGKLSVGDLAELLYRVRRFDLLKRILKMDRKAVETHLLRNPHLVSDYRVLMAEIGEDLDKSDVSSLIFLMKDYMGRGKISKEKSFLDLVVELEKLNLVAPDQLDLLEKCLKNIHRIDLKTKIQKYKQSVQGAGTSYRNVLQAAIQKSLKDPSNNFRMITPYAHCPDLKILGNCSM

SEQ ID NO: 5313 - protein, 445 aa, Homo sapiens
MSAEVIHQVEEALDTDEKEMLLFLCRDVAIDVVPPNVRDLLDILRERGKLSVGDLAELLYRVRRFDLLKRILKMDRKAVETHLLRNPHLVSDYRVLMAEIGEDLDKSDVSSLIFLMKDYMGRGKISKEKSFLDLVVELEKLNLVAPDQLDLLEKCLKNIHRIDLKTKIQKYKQSVQGAGTSYRNVLQAAIQKSLKDPSNNFRSIPEERYKMKSKPLGICLIIDCIGNETELLRDTFTSLGYEVQKFLHLSMHGISQILGQFACMPEHRDYDSFVCVLVSRGGSQSVYGVDQTHSGLPLHHIRRMFMGDSCPYLAGKPKMFFIQNYVVSEGQLEDSSLLEVDGPAMKNVEFKAQKRGLCTVHREADFFWSLCTADMSLLEQSHSSPSLYLQCLSQKLRQERKRPLLDLHIELNGYMYDWNSRVSAKEKYYVWLQHTLRKKLILSYT

SEQ ID NO: 5314 - protein, 383 aa, Homo sapiens
MADKVLKEKRKLFIRSMGEGTINGLLDELLQTRVLNKEEMEKVKRENATVMDKTRALIDSVIPKGAQACQICITYICEEDSYLAGTLGLSAAPQAVQDNPAMPTSSGSEGNVKLCSLEEAQRIWKQKSAEIYPIMDKSSRTRLALIICNEEFDSIPRRTGAEVDITGMTMLLQNLGYSVDVKKNLTASDMTTELEAFAHRPEHKTSDSTFLVFMSHGIREGICGKKHSEQVPDILQLNAIFNMLNTKNCPSLKDKPKVIIIQACRGDSPGVVWFKDSVGVSGNLSLPTTEEFEDDAIKKAHIEKDFIAFCSSTPDNVSWRHPTMGSVFIGRLIEHMQEYACSCDVEEIFRKVRFSFEQPDGRAQMPTTERVTLTRCFYLFPGH

SEQ ID NO: 5315 - protein, 263 aa, Homo sapiens
MADKVLKEKRKLFIRSMGEAPQAVQDNPAMPTSSGSEGNVKLCSLEEAQRIWKQKSAEIYPIMDKSSRTRLALIICNEEFDSIPRRTGAEVDITGMTMLLQNLGYSVDVKKNLTASDMTTELEAFAHRPEHKTSDSTFLVFMSHGIREGICGKKHSEQVPDILQLNAIFNMLNTKNCPSLKDKPKVIIIQACRGDNVSWRHPTMGSVFIGRLIEHMQEYACSCDVEEIFRKVRFSFEQPDGRAQMPTTERVTLTRCFYLFPGH

SEQ ID NO: 5316 - protein, 88 aa, Homo sapiens
MADKVLKEKRKLFIRSMGEDNVSWRHPTMGSVFIGRLIEHMQEYACSCDVEEIFRKVRFSFEQPDGRAQMPTTERVTLTRCFYLFPGH

SEQ ID NO: 5317 - protein, 383 aa, Homo sapiens; identical to SEQ ID NO: 5314

SEQ ID NO: 5318 - protein, 88 aa, Homo sapiens; identical to SEQ ID NO: 5316

SEQ ID NO: 5319 - protein, 404 aa, Homo sapiens
MADKVLKEKRKLFIRSMGEGTINGLLDELLQTRVLNKEEMEKVKRENATVMDKTRALIDSVIPKGAQACQICITYICEEDSYLAGTLGLSADQTSGNYLNMQDSQGVLSSFPAPQAVQDNPAMPTSSGSEGNVKLCSLEEAQRIWKQKSAEIYPIMDKSSRTRLALIICNEEFDSIPRRTGAEVDITGMTMLLQNLGYSVDVKKNLTASDMTTELEAFAHRPEHKTSDSTFLVFMSHGIREGICGKKHSEQVPDILQLNAIFNMLNTKNCPSLKDKPKVIIIQACRGDSPGVVWFKDSVGVSGNLSLPTTEEFEDDAIKKAHIEKDFIAFCSSTPDNVSWRHPTMGSVFIGRLIEHMQEYACSCDVEEIFRKVRFSFEQPDGRAQMPTTERVTLTRCFYLFPGH

SEQ ID NO: 5320 - protein, 263 aa, Homo sapiens; identical to SEQ ID NO: 5315

SEQ ID NO: 5321 - protein, 383 aa, Homo sapiens; identical to SEQ ID NO: 5314

SEQ ID NO: 5322 - protein, 311 aa, Homo sapiens
MADKVLKEKRKLFIRSMGEAPQAVQDNPAMPTSSGSEGNVKLCSLEEAQRIWKQKSAEIYPIMDKSSRTRLALIICNEEFDSIPRRTGAEVDITGMTMLLQNLGYSVDVKKNLTASDMTTELEAFAHRPEHKTSDSTFLVFMSHGIREGICGKKHSEQVPDILQLNAIFNMLNTKNCPSLKDKPKVIIIQACRGDSPGVVWFKDSVGVSGNLSLPTTEEFEDDAIKKAHIEKDFIAFCSSTPDNVSWRHPTMGSVFIGRLIEHMQEYACSCDVEEIFRKVRFSFEQPDGRAQMPTTERVTLTRCFYLFPGH

SEQ ID NO: 5323 - protein, 301 aa, Homo sapiens
MEKVKRENATVMDKTRALIDSVIPKGAQACQICITYICEEDSYLAGTLGLSADQTSGNYLNMQDSQGVLSSFPAPQAVQDNPAMPTSSGSEGNVKLCSLEEAQRIWKQKSAEIYPIMDKSSRTRLALIICNEEFDSIPRRTGAEVDITGMTMLLQNLGYSVDVKKNLTASDMTTELEAFAHRPEHKTSDSTFLVFMSHGIREGICGKKHSEQVPDILQLNAIFNMLNTKNCPSLKDKPKVIIIQACRGDSPGVVWFKDSVGVSGNLSLPTTEEFEDDAIKKAHIEKDFIAFCSSTPGKSQS

SEQ ID NO: 5324 - protein, 110 aa, Homo sapiens
MADKVLKEKRKLFIRSMGEGTINGLLDELLQTRVLNKEEMEKVKRENATVMDKTRALIDSVIPKGAQACQICITYICEEDSYLAGTLGLSADLSNNGQVKPHTSCSHYLQ

SEQ ID NO: 5325 - protein, 88 aa, Homo sapiens; identical to SEQ ID NO: 5316

SEQ ID NO: 5326 - protein, 404 aa, Homo sapiens; identical to SEQ ID NO: 5319

SEQ ID NO: 5327 - protein, 263 aa, Homo sapiens; identical to SEQ ID NO: 5315

SEQ ID NO: 5328 - protein, 455 aa, Homo sapiens
MKSQGQHWYSSSDKNCKVSFREKLLIIDSNLGVQDVENLKFLCIGLVPNKKLEKSSSASDVFEHLLAEDLLSEEDPFFLAELLYIIRQKKLLQHLNCTKEEVERLLPTRQRVSLFRNLLYELSEGIDSENLKDMIFLLKDSLPKTEMTSLSFLAFLEKQGKIDEDNLTCLEDLCKTVVPKLLRNIEKYKREKAIQIVTPPVDKEAESYQGEEELVSQTDVKTFLEALPQESWQNKHAGSNEILSHVFQWLGFTVHIHNNVTKVEMEMVLQKQKCNPAHADGDCFVFCILTHGRFGAVYSSDEALIPIREIMSHFTALQCPRLAEKPKLFFIQACQGEEIQPSVSIEADALNPEQAPTSLQDSIPAEADFLLGLATVPGYVSFRHVEEGSWYIQSLCNHLKKLVPRHEDILSILTAVNDDVSRRVDKQGTKKQMPQPAFTLRKKLVFPVPLDALSL

SEQ ID NO: 5329 - protein, 478 aa, Homo sapiens
MKSQGQHWYSSSDKNCKVSFREKLLIIDSNLGVQDVENLKFLCIGLVPNKKLEKSSSASDVFEHLLAEDLLSEEDPFFLAELLYIIRQKKLLQHLNCTKEEVERLLPTRQRVSLFRNLLYELSEGIDSENLKDMIFLLKDSLPKTEMTSLSFLAFLEKQGKIDEDNLTCLEDLCKTVVPKLLRNIEKYKREKAIQIVTPPVDKEAESYQGEEELVSQTDVKTFLEALPRAAVYRMNRNHRGLCVIVNNHSFTSLKDRQGTHKDAEILSHVFQWLGFTVHIHNNVTKVEMEMVLQKQKCNPAHADGDCFVFCILTHGRFGAVYSSDEALIPIREIMSHFTALQCPRLAEKPKLFFIQACQGEEIQPSVSIEADALNPEQAPTSLQDSIPAEADFLLGLATVPGYVSFRHVEEGSWYIQSLCNHLKKLVPRMLKFLEKTMEIRGRKRTVWGAKQISATSLPTAISAQTPRPPMRRWSSVS

SEQ ID NO: 5330 - protein, 521 aa, Homo sapiens
MKSQGQHWYSSSDKNCKVSFREKLLIIDSNLGVQDVENLKFLCIGLVPNKKLEKSSSASDVFEHLLAEDLLSEEDPFFLAELLYIIRQKKLLQHLNCTKEEVERLLPTRQRVSLFRNLLYELSEGIDSENLKDMIFLLKDSLPKTEMTSLSFLAFLEKQGKIDEDNLTCLEDLCKTVVPKLLRNIEKYKREKAIQIVTPPVDKEAESYQGEEELVSQTDVKTFLEALPQESWQNKHAGSNGNRATNGAPSLVSRGMQGASANTLNSETSTKRAAVYRMNRNHRGLCVIVNNHSFTSLKDRQGTHKDAEILSHVFQWLGFTVHIHNNVTKVEMEMVLQKQKCNPAHADGDCFVFCILTHGRFGAVYSSDEALIPIREIMSHFTALQCPRLAEKPKLFFIQACQGEEIQPSVSIEADALNPEQAPTSLQDSIPAEADFLLGLATVPGYVSFRHVEEGSWYIQSLCNHLKKLVPRMLKFLEKTMEIRGRKRTVWGAKQISATSLPTAISAQTPRPPMRRWSSVS

SEQ ID NO: 5331 - protein, 522 aa, Homo sapiens
MKSQGQHWYSSSDKNCKVSFREKLLIIDSNLGVQDVENLKFLCIGLVPNKKLEKSSSASDVFEHLLAEDLLSEEDPFFLAELLYIIRQKKLLQHLNCTKEEVERLLPTRQRVSLFRNLLYELSEGIDSENLKDMIFLLKDSLPKTEMTSLSFLAFLEKQGKIDEDNLTCLEDLCKTVVPKLLRNIEKYKREKAIQIVTPPVDKEAESYQGEEELVSQTDVKTFLEALPQESWQNKHAGSNGNRATNGAPSLVSRGMQGASANTLNSETSTKRAAVYRMNRNHRGLCVIVNNHSFTSLKDRQGTHKDAEILSHVFQWLGFTVHIHNNVTKVEMEMVLQKQKCNPAHADGDCFVFCILTHGRFGAVYSSDEALIPIREIMSHFTALQCPRLAEKPKLFFIQACQGEEIQPSVSIEADALNPEQAPTSLQDSIPAEADFLLGLATVPGYVSFRHVEEGSWYIQSLCNHLKKLVPRHEDILSILTAVNDDVSRRVDKQGTKKQMPQPAFTLRKKLVFPVPLDALSL

SEQ ID NO: 5332 - protein, 479 aa, Homo sapiens
MKSQGQHWYSSSDKNCKVSFREKLLIIDSNLGVQDVENLKFLCIGLVPNKKLEKSSSASDVFEHLLAEDLLSEEDPFFLAELLYIIRQKKLLQHLNCTKEEVERLLPTRQRVSLFRNLLYELSEGIDSENLKDMIFLLKDSLPKTEMTSLSFLAFLEKQGKIDEDNLTCLEDLCKTVVPKLLRNIEKYKREKAIQIVTPPVDKEAESYQGEEELVSQTDVKTFLEALPRAAVYRMNRNHRGLCVIVNNHSFTSLKDRQGTHKDAEILSHVFQWLGFTVHIHNNVTKVEMEMVLQKQKCNPAHADGDCFVFCILTHGRFGAVYSSDEALIPIREIMSHFTALQCPRLAEKPKLFFIQACQGEEIQPSVSIEADALNPEQAPTSLQDSIPAEADFLLGLATVPGYVSFRHVEEGSWYIQSLCNHLKKLVPRHEDILSILTAVNDDVSRRVDKQGTKKQMPQPAFTLRKKLVFPVPLDALSL

SEQ ID NO: 5333 - protein, 273 aa, Homo sapiens
MKSQGQHWYSSSDKNCKVSFREKLLIIDSNLGVQDVENLKFLCIGLVPNKKLEKSSSASDVFEHLLAEDLLSEEDPFFLAELLYIIRQKKLLQHLNCTKEEVERLLPTRQRVSLFRNLLYELSEGIDSENLKDMIFLLKDSLPKTEMTSLSFLAFLEKQGKIDEDNLTCLEDLCKTVVPKLLRNIEKYKREKAIQIVTPPVDKEAESYQGEEELVSQTDVKTFLEALPQESWQNKHAGSNEGSCVQDESEPQRPLCHCQQPQLYLPEGQTRNP

SEQ ID NO: 5334 - protein, 242 aa, Homo sapiens
MSNPRSLEEEKYDMSGARLALILCVTKAREGSEEDLDALEHMFRQLRFESTMKRDPTAEQFQEELEKFQQAIDSREDPVSCAFVVLMAHGREGFLKGEDGEMVKLENLFEALNNKNCQALRAKPKVYIIQACRGEQRDPGETVGGDEIVMVIKDSPQTIPTYTDALHVYSTVEGYIAYRHDQKGSCFIQTLVDVFTKRKGHILELLTEVTRRMAEAELVQEGKARKTNPEIQSTLRKRLYLQ

SEQ ID NO: 5335 - protein, 242 aa, Homo sapiens; identical to SEQ ID NO: 5334

SEQ ID NO: 5336 - protein, 452 aa, Homo sapiens
MAAPSAGSWSTFQHKELMAADRGRRILGVCGMHPHHQETLKKNRVVLAKQLLLSELLEHLLEKDIITLEMRELIQAKVGSFSQNVELLNLLPKRGPQAFDAFCEALRETKQGHLEDMLLTTLSGLQHVLPPLSCDYDLSLPFPVCESCPLYKKLRLSTDTVEHSLDNKDGPVCLQVKPCTPEFYQTHFQLAYRLQSRPRGLALVLSNVHFTGEKELEFRSGGDVDHSTLVTLFKLLGYDVHVLCDQTAQEMQEKLQNFAQLPAHRVTDSCIVALLSHGVEGAIYGVDGKLLQLQEVFQLFDNANCPSLQNKPKMFFIQACRGDETDRGVDQQDGKNHAGSPGCEESDAGKEKLPKMRLPTRSDMICGYACLKGTAAMRNTKRGSWYIEALAQVFSERACDMHVADMLVKVNALIKDREGYAPGTEFHRCKEMSEYCSTLCRHLYLFPGHPPT

SEQ ID NO: 5337 - protein, 108 aa, Homo sapiens
MAAPSAGSWSTFQHKELMAADRGRRILGVCGMHPHHQETLKKNRVVLAKQLLLSELLEHLLEKDIITLEMRELIQAKVGSFSQNVELLNLLPKRGPQAFDAFCEALHS

SEQ ID NO: 5338 - protein, 313 aa, Homo sapiens
MHPHHQETLKKNRVVLAKQLLLSELLEHLLEKDIITLEMRELIQAKVGSFSQNVELLNLLPKRGPQAFDAFCEALRETKQGHLEDMLLTTLSGLQHVLPPLSCDYDLSLPFPVCESCPLYKKLRLSTDTVEHSLDNKDGPVCLQVKPCTPEFYQTHFQLAYRLQSRPRGLALVLSNVHFTGEKELEFRSGGDVDHSTLVTLFKLLGYDVHVLCDQTAQEMQEKLQNFAQLPAHRVTDSCIVALLSHGVEGAIYGVDGKLLQLQEVFQLFDNANCPSLQNKPKMFFIQACRGAGAIGSLGHLLLFTAATASLAL

SEQ ID NO: 5339 - protein, 330 aa, Homo sapiens
MLKLKTKFGSWQTLCKRSNVWQDKCFFKPFNIDQISPNKKAHPNMEAGPPESGESTDALKLCPHEEFLRLCKERAEEIYPIKERNNRTRLALIICNTEFDHLPPRNGADFDITGMKELLEGLDYSVDVEENLTARDMESALRAFATRPEHKSSDSTFLVLMSHGILEGICGTVHDEKKPDVLLYDTIFQIFNNRNCLSLKDKPKVIIVQACRGANRGELWVRDSPASLEVASSQSSENLEEDAVYKTHVEKDFIAFCSSTPHNVSWRDSTMGSIFITQLITCFQKYSWCCHLEEVFRKVQQSFETPRAKAQMPTIERLSMTRYFYLFPGN

SEQ ID NO: 5340 - protein, 147 aa, Homo sapiens
MAEGNHRKKPLKVLESLGKDFLTGVLDNLVEQNVLNWKEEEKKKYYDAKTEDKVRVMADSMQEKQRMAGQMLLQTFFNIDQISPNKKAHPNMEAGPPESGESTDALKLCPHEEFLRLCKERAEEIYPIKERNNRTRLALIICNTEFD

SEQ ID NO: 5341 - protein, 377 aa, Homo sapiens
MAEGNHRKKPLKVLESLGKDFLTGVLDNLVEQNVLNWKEEEKKKYYDAKTEDKVRVMADSMQEKQRMAGQMLLQTFFNIDQISPNKKAHPNMEAGPPESGESTDALKLCPHEEFLRLCKERAEEIYPIKERNNRTRLALIICNTEFDHLPPRNGADFDITGMKELLEGLDYSVDVEENLTARDMESALRAFATRPEHKSSDSTFLVLMSHGILEGICGTVHDEKKPDVLLYDTIFQIFNNRNCLSLKDKPKVIIVQACRGANRGELWVRDSPASLEVASSQSSENLEEDAVYKTHVEKDFIAFCSSTPHNVSWRDSTMGSIFITQLITCFQKYSWCCHLEEVFRKVQQSFETPRAKAQMPTIERLSMTRYFYLFPGN

SEQ ID NO: 5342 - protein, 434 aa, Homo sapiens
MAEDSGKKKRRKNFEAMFKGILQSGLDNFVINHMLKNNVAGQTSIQTLVPNTDQKSTSVKKDNHKKKTVKMLEYLGKDVLHGVFNYLAKHDVLTLKEEEKKKYYDTKIEDKALILVDSLRKNRVAHQMFTQTLLNMDQKITSVKPLLQIEAGPPESAESTNILKLCPREEFLRLCKKNHDEIYPIKKREDRRRLALIICNTKFDHLPARNGAHYDIVGMKRLLQGLGYTVVDEKNLTARDMESVLRAFAARPEHKSSDSTFLVLMSHGILEGICGTAHKKKKPDVLLYDTIFQIFNNRNCLSLKDKPKVIIVQACRGEKHGELWVRDSPASLALISSQSSENLEADSVCKIHEEKDFIAFCSSTPHNVSWRDRTRGSIFITELITCFQKYSCCCHLMEIFRKVQKSFEVPQAKAQMPTIERATLTRDFYLFPGN

SEQ ID NO: 5343 - protein, 133 aa, Homo sapiens
MLKNNVAGQTSIQTLVPNTDQKSTSVKKDNHKKKTVKMLEYLGKDVLHGVFNYLAKHDVLTLKEEEKKKYYDTKIEDKALILVDSLRKNRVAHQMFTQTLLNMDQKITSVKHLSNKKERGPQTPGSHHMQYKV

SEQ ID NO: 5344 - protein, 447 aa, Homo sapiens
MAAVPRVEGVFIFLIEDSGKKKRRKNFEAMFKGILQSGLDNFVINHMLKNNVAGQTSIQTLVPNTDQKSTSVKKDNHKKKTVKMLEYLGKDVLHGVFNYLAKHDVLTLKEEEKKKYYDTKIEDKALILVDSLRKNRVAHQMFTQTLLNMDQKITSVKPLLQIEAGPPESAESTNILKLCPREEFLRLCKKNHDEIYPIKKREDRRRLALIICNTKFDHLPARNGAHYDIVGMKRLLQGLGYTVVDEKNLTARDMESVLRAFAARPEHKSSDSTFLVLMSHGILEGICGTAHKKKKPDVLLYDTIFQIFNNRNCLSLKDKPKVIIVQACRGEKHGELWVRDSPASLALISSQSSENLEADSVCKIHEEKDFIAFCSSTPHNVSWRDRTRGSIFITELITCFQKYSCCCHLMEIFRKVQKSFEVPQAKAQMPTIERATLTRDFYLFPGN

SEQ ID NO: 5345 - protein, 292 aa, Homo sapiens
MAALLQIEAGPPESAESTNILKLCPREEFLRLCKKNHDEIYPIKKREDRRRLALIICNTKFDHLPARNGAHYDIVGMKRLLQGLGYTVVDEKNLTARDMESVLRAFAARPEHKSSDSTFLVLMSHGILEGICGTAHKKKKPDVLLYDTIFQIFNNRNCLSLKDKPKVIIVQACRGEKHGELWVRDSPASLALISSQSSENLEADSVCKIHEEKDFIAFCSSTPHNVSWRDRTRGSIFITELITCFQKYSCCCHLMEIFRKVQKSFEVPQAKAQMPTIERATLTRDFYLFPGN

SEQ ID NO: 5346 - protein, 376 aa, Homo sapiens
MAEDNHKKKTVKMLEYLGKDVLHGVFNYLAKHDVLTLKEEEKKKYYDTKIEDKALILVDSLRKNRVAHQMFTQTLLNMDQKITSVKPLLQIEAGPPESAESTNILKLCPREEFLRLCKKNHDEIYPIKKREDRRRLALIICNTKFDHLPARNGAHYDIVGMKRLLQGLGYTVVDEKNLTARDMESVLRAFAARPEHKSSDSTFLVLMSHGILEGICGTAHKKKKPDVLLYDTIFQIFNNRNCLSLKDKPKVIIVQACRGEKHGELWVRDSPASLALISSQSSENLEADSVCKIHEEKDFIAFCSSTPHNVSWRDRTRGSIFITELITCFQKYSCCCHLMEIFRKVQKSFEVPQAKAQMPTIERATLTRDFYLFPGN

SEQ ID NO: 5347 - protein, 447 aa, Homo sapiens; identical to SEQ ID NO: 5344

SEQ ID NO: 5348 - protein, 292 aa, Homo sapiens; identical to SEQ ID NO: 5345

SEQ ID NO: 5349 - protein, 293 aa, Homo sapiens
MSSASGLRRGHPAGGEENMTETDAFYKREMFDPAEKYKMDHRRRGIALIFNHERFFWHLTLPERRGTCADRDNLTRRFSDLGFEVKCFNDLKAEELLLKIHEVSTVSHADADCFVCVFLSHGEGNHIYAYDAKIEIQTLTGLFKGDKCHSLVGKPKIFIIQACRGNQHDVPVIPLDVVDNQTEKLDTNITEVDAASVYTLPAGADFLMCYSVAEGYYSHRETVNGSWYIQDLCEMLGKYGSSLEFTELLTLVNRKVSQRRVDFCKDPSAIGKKQVPCFASMLTKKLHFFPKSN

SEQ ID NO: 5350 - protein, 204 aa, Homo sapiens
MSSASGLRRGHPAVSTVSHADADCFVCVFLSHGEGNHIYAYDAKIEIQTLTGLFKGDKCHSLVGKPKIFIIQACRGNQHDVPVIPLDVVDNQTEKLDTNITEVDAASVYTLPAGADFLMCYSVAEGYYSHRETVNGSWYIQDLCEMLGKYGSSLEFTELLTLVNRKVSQRRVDFCKDPSAIGKKQVPCFASMLTKKLHFFPKSN

SEQ ID NO: 5351 - protein, 303 aa, Homo sapiens
MADDQGCIEEQGVEDSANEDSVDAKPDRSSFVPSLFSKKKKNVTMRSIKTTRDRVPTYQYNMNFEKLGKCIIINNKNFDKVTGMGVRNGTDKDAEALFKCFRSLGFDVIVYNDCSCAKMQDLLKKASEEDHTNAACFACILLSHGEENVIYGKDGVTPIKDLTAHFRGDRCKTLLEKPKLFFIQACRGTELDDGIQADSGPINDTDANPRYKIPVEADFLFAYSTVPGYYSWRSPGRGSWFVQALCSILEEHGKDLEIMQILTRVNDRVARHFESQSDDPHFHEKKQIPCVVSMLTKELYFSQ

SEQ ID NO: 5352 - protein, 303 aa, Homo sapiens; identical to SEQ ID NO: 5351

SEQ ID NO: 5353 - protein, 220 aa, Homo sapiens
MADDQGCIEEQGVEDSANEDSVDAKPDRSSFVPSLFSKKKKNVTMRSIKTTRDRVPTYQYNMNFEKLGKCIIINNKNFDKVTGMGVRNGTDKDAEALFKCFRSLGFDVIVYNDCSVTQAGVQRRDLGRLQPPPPRFKQYSCLSLLSSWDYRHAPPRLANFCIFRREGFRHVGQAGLKLLASSDPPTSGSQSAGITGVSLHTQPQIMKVSLRHCNTFICFA

SEQ ID NO: 5354 - protein, 303 aa, Homo sapiens; identical to SEQ ID NO: 5351

SEQ ID NO: 5355 - protein, 220 aa, Homo sapiens [sequence omitted]

SEQ ID NO: 5356 - protein, 336 aa, Homo sapiens
MDCVGWPPGRKWHLEKNTSCGGSSGICASYVTQMADDQGCIEEQGVEDSANEDSVDAKPDRSSFVPSLFSKKKKNVTMRSIKTTRDRVPTYQYNMNFEKLGKCIIINNKNFDKVTGMGVRNGTDKDAEALFKCFRSLGFDVIVYNDCSCAKMQDLLKKASEEDHTNAACFACILLSHGEENVIYGKDGVTPIKDLTAHFRGDRCKTLLEKPKLFFIQACRGTELDDGIQADSGPINDTDANPRYKIPVEADFLFAYSTVPGYYSWRSPGRGSWFVQALCSILEEHGKDLEIMQILTRVNDRVARHFESQSDDPHFHEKKQIPCVVSMLTKELYFSQ

SEQ ID NO: 5357 - protein, 253 aa, Homo sapiens
MADDQGCIEEQGVEDSANEDSVDAKPDRSSFVPSLFSKKKKNVTMRSIKTTRDRVPTYQYNMNFEKLGKCIIINNKNFDKVTGMGVRNGTDKDAEALFKCFRSLGFDVIVYNDCSCAKMQDLLKKASEEDHTNAACFACILLSHGEENMESCSVTQAGVQRRDLGRLQPPPPRLAEGPSLMMASRPTRGPSMTQMLILDTRSQWKLTSSSPIPRFQAITRGGAQEEAPGLCKPSAPSWRSTEKTWKSCRSSPG

SEQ ID NO: 5358 - protein, 222 aa, Homo sapiens
MADDQGCIEEQGVEDSANEDSVDAKPDRSSFVPSLFSKKKKNVTMRSIKTTRDRVPTYQYNMNFEKLGKCIIINNKNFDKVTGMGVRNGTDKDAEALFKCFRSLGFDVIVYNDCSCAKMQDLLKKASEEDHTNAACFACILLSHGEENVIYGKDGVTPIKDLTAHFRGDRCKTLLEKPKLFFIQACRGTELDDGIQADSGPINDTDANPRYKIPVEADFLFA

SEQ ID NO: 5359 - protein, 264 aa, Homo sapiens
MADDQGCIEEQGVEDSANEDSVDAKPDRSSFVPSLFSKKKKNVTMRSIKTTRDRVPTYQYNMNFEKLGKCIIINNKNFDKVTGMGVRNGTDKDAEALFKCFRSLGFDVIVYNDCSCAKMQDLLKKASEEDHTNAACFACILFFIQACRGTELDDGIQADSGPINDTDANPRYKIPVEADFLFAYSTVPGYYSWRSPGRGSWFVQALCSILEEHGKDLEIMQILTRVNDRVARHFESQSDDPHFHEKKQIPCVVSMLTKELYFSQ

SEQ ID NO: 5360 - protein, 278 aa, Homo sapiens
MQRGLFSDGDTSKKKKNVTMRSIKTTRDRVPTYQYNMNFEKLGKCIIINNKNFDKVTGMGVRNGTDKDAEALFKCFRSLGFDVIVYNDCSCAKMQDLLKKASEEDHTNAACFACILLSHGEENVIYGKDGVTPIKDLTAHFRGDRCKTLLEKPKLFFIQACRGTELDDGIQADSGPINDTDANPRYKIPVEADFLFAYSTVPGYYSWRSPGRGSWFVQALCSILEEHGKDLEIMQILTRVNDRVARHFESQSDDPHFHEKKQIPCVVSMLTKELYFSQ

SEQ ID NO: 5361 - protein, 395 aa, Homo sapiens
MDFSRNLYDIGEQLDSEDLASLKFLSLDYIPQRKQEPIKDALMLFQRLQEKRMLEESNLSFLKELLFRINRLDLLITYLNTRKEEMERELQTPGRAQISAYRVMLYQISEEVSRSELRSFKFLLQEEISKCKLDDDMNLLDIFIEMEKRVILGEGKLDILKRVCAQINKSLLKIINDYEEFSKGALTTTFEELHFEIKPHDDCTVEQIYEILKIYQLMDHSNMDCFICCILSHGDKGIIYGTDGQEAPIYELTSQFTGLKCPSLAGKPKVFFIQACQGDNYQKGIPVETDSEEQPYLEMDLSSPQTRYIPDEADFLLGMATVNNCVSYRNPAEGTWYIQSLCQSLRERCPRGDDILTILTEVNYEVSNKDDKKNMGKQMPQPTFTLRKKLVFPSD

SEQ ID NO: 5362 - protein, 496 aa, Homo sapiens
MDFSRNLYDIGEQLDSEDLASLKFLSLDYIPQRKQEPIKDALMLFQRLQEKRMLEESNLSFLKELLFRINRLDLLITYLNTRKEEMERELQTPGRAQISAYRFHFCRMSWAEANSQCQTQSVPFWRRVDHLLIRVMLYQISEEVSRSELRSFKFLLQEEISKCKLDDDMNLLDIFIEMEKRVILGEGKLDILKRVCAQINKSLLKIINDYEEFSKGEELCGVMTISDSPREQDSESQTLDKVYQMKSKPRGYCLIINNHNFAKAREKVPKLHSIRDRNGTHLDAGALTTTFEELHFEIKPHDDCTVEQIYEILKIYQLMDHSNMDCFICCILSHGDKGIIYGTDGQEAPIYELTSQFTGLKCPSLAGKPKVFFIQACQGDNYQKGIPVETDSEEQPYLEMDLSSPQTRYIPDEADFLLGMATVNNCVSYRNPAEGTWYIQSLCQSLRERCPRGDDILTILTEVNYEVSNKDDKKNMGKQMPQPTFTLRKKLVFPSD

SEQ ID NO: 5363 - protein, 464 aa, Homo sapiens
MDFSRNLYDIGEQLDSEDLASLKFLSLDYIPQRKQEPIKDALMLFQRLQEKRMLEESNLSFLKELLFRINRLDLLITYLNTRKEEMERELQTPGRAQISAYRVMLYQISEEVSRSELRSFKFLLQEEISKCKLDDDMNLLDIFIEMEKRVILGEGKLDILKRVCAQINKSLLKIINDYEEFSKGEELCGVMTISDSPREQDSESQTLDKVYQMKSKPRGYCLIINNHNFAKAREKVPKLHSIRDRNGTHLDAGALTTTFEELHFEIKPHDDCTVEQIYEILKIYQLMDHSNMDCFICCILSHGDKGIIYGTDGQEAPIYELTSQFTGLKCPSLAGKPKVFFIQACQGDNYQKGIPVETDSEEQPYLEMDLSSPQTRYIPDEADFLLGMATVNNCVSYRNPAEGTWYIQSLCQSLRERCPRGDDILTILTEVNYEVSNKDDKKNMGKQMPQPTFTLRKKLVFPSD

SEQ ID NO: 5364 - protein, 538 aa, Homo sapiens
MEGGRRARVVIESKRNFFLGAFPTPFPAEHVELGRLGDSETAMVPGKGGADYILLPFKKMDFSRNLYDIGEQLDSEDLASLKFLSLDYIPQRKQEPIKDALMLFQRLQEKRMLEESNLSFLKELLFRINRLDLLITYLNTRKEEMERELQTPGRAQISAYRVMLYQISEEVSRSELRSFKFLLQEEISKCKLDDDMNLLDIFIEMEKRVILGEGKLDILKRVCAQINKSLLKIINDYEEFSKERSSSLEGSPDEFSNGEELCGVMTISDSPREQDSESQTLDKVYQMKSKPRGYCLIINNHNFAKAREKVPKLHSIRDRNGTHLDAGALTTTFEELHFEIKPHDDCTVEQIYEILKIYQLMDHSNMDCFICCILSHGDKGIIYGTDGQEAPIYELTSQFTGLKCPSLAGKPKVFFIQACQGDNYQKGIPVETDSEEQPYLEMDLSSPQTRYIPDEADFLLGMATVNNCVSYRNPAEGTWYIQSLCQSLRERCPRGDDILTILTEVNYEVSNKDDKKNMGKQMPQPTFTLRKKLVFPSD

SEQ ID NO: 5365 - protein, 235 aa, Homo sapiens
MDFSRNLYDIGEQLDSEDLASLKFLSLDYIPQRKQEPIKDALMLFQRLQEKRMLEESNLSFLKELLFRINRLDLLITYLNTRKEEMERELQTPGRAQISAYRVMLYQISEEVSRSELRSFKFLLQEEISKCKLDDDMNLLDIFIEMEKRVILGEGKLDILKRVCAQINKSLLKIINDYEEFSKERSSSLEGSPDEFSNDFGQSLPNEKQTSGILSDHQQSQFCKSTGESAQTSQH

SEQ ID NO: 5366 - protein, 235 aa, Homo sapiens; identical to SEQ ID NO: 5365

SEQ ID NO: 5367 - protein, 278 aa, Homo sapiens [sequence omitted]

SEQ ID NO: 5368 - protein, 464 aa, Homo sapiens; identical to SEQ ID NO: 5363

SEQ ID NO: 5369 - protein, 220 aa, Homo sapiens
MDFSRNLYDIGEQLDSEDLASLKFLSLDYIPQRKQEPIKDALMLFQRLQEKRMLEESNLSFLKELLFRINRLDLLITYLNTRKEEMERELQTPGRAQISAYRVMLYQISEEVSRSELRSFKFLLQEEISKCKLDDDMNLLDIFIEMEKRVILGEGKLDILKRVCAQINKSLLKIINDYEEFSKDFGQSLPNEKQTSGILSDHQQSQFCKSTGESAQTSQH

SEQ ID NO: 5370 - protein, 198 aa, Homo sapiens
MDFSRNLYDIGEQLDSEDLASLKFLSLDYIPQRKQEPIKDALMLFQRLQEKRMLEESNLSFLKELLFRINRLDLLITYLNTRKEEMERELQTPGRAQISAYRVMLYQISEEVSRSELRSFKFLLQEEISKCKLDDDMNLLDIFIEMEKRVILGEGKLDILKRVCAQINKSLLKIINDYEEFSKERSSSLEGSPDEFSN

SEQ ID NO: 5371 - protein, 116 aa, Homo sapiens
MDFSRNLYDIGEQLDSEDLASLKFLSLDYIPQRKQEPIKDALMLFQRLQEKRMLEESNLSFLKELLFRINRLDLLITYLNTRKEEMERELQTPGRAQISAYRVMLYQISEEVSRSE

SEQ ID NO: 5372 - protein, 479 aa, Homo sapiens
MDFSRNLYDIGEQLDSEDLASLKFLSLDYIPQRKQEPIKDALMLFQRLQEKRMLEESNLSFLKELLFRINRLDLLITYLNTRKEEMERELQTPGRAQISAYRVMLYQISEEVSRSELRSFKFLLQEEISKCKLDDDMNLLDIFIEMEKRVILGEGKLDILKRVCAQINKSLLKIINDYEEFSKERSSSLEGSPDEFSNGEELCGVMTISDSPREQDSESQTLDKVYQMKSKPRGYCLIINNHNFAKAREKVPKLHSIRDRNGTHLDAGALTTTFEELHFEIKPHDDCTVEQIYEILKIYQLMDHSNMDCFICCILSHGDKGIIYGTDGQEAPIYELTSQFTGLKCPSLAGKPKVFFIQACQGDNYQKGIPVETDSEEQPYLEMDLSSPQTRYIPDEADFLLGMATVNNCVSYRNPAEGTWYIQSLCQSLRERCPRGDDILTILTEVNYEVSNKDDKKNMGKQMPQPTFTLRKKLVFPSD

SEQ ID NO: 5373 - protein, 124 aa, Homo sapiens
MDFSRNLYDIGEQLDSEDLASLKFLSLDYIPQRKQEPIKDALMLFQRLQEKRMLEESNLSFLKELLFRINRLDLLITYLNTRKEEMERELQTPGRAQISAYRVMLYQISEEVSRSELRSFKFLL

SEQ ID NO: 5374 - protein, 209 aa, Homo sapiens
MDFSRNLYDIGEQLDSEDLASLKFLSLDYIPQRKQEPIKDALMLFQRLQEKRMLEESNLSFLKELLFRINRLDLLITYLNTRKEEMERELQTPGRAQISAYRVMLYQISEEVSRSELRSFKFLLQEEISKCKLDDDMNLLDIFIEMEKRVILGEGKLDILKRVCAQINKSLLKIINDYEEFSKDFGQSLPNEKQTSGILSDHQQSQFCK

SEQ ID NO: 5375 - protein, 416 aa, Homo sapiens
MDEADRRLLRRCRLRLVEELQVDQLWDALLSRELFRPHMIEDIQRAGSGSRRDQARQLIIDLETRGSQALPLFISCLEDTGQDMLASFLRTNRQAAKLSKPTLENLTPVVLRPEIRKPEVLRPETPRPVDIGSGGFGDVGALESLRGNADLAYILSMEPCGHCLIINNVNFCRESGLRTRTGSNIDCEKLRRRFSSLHFMVEVKGDLTAKKMVLALLELAQQDHGALDCCVVVILSHGCQASHLQFPGAVYGTDGCPVSVEKIVNIFNGTSCPSLGGKPKLFFIQACGGEQKDHGFEVASTSPEDESPGSNPEPDATPFQEGLRTFDQLDAISSLPTPSDIFVSYSTFPGFVSWRDPKSGSWYVETLDDIFEQWAHSEDLQSLLLRVANAVSVKGIYKQMPGCFNFLRKKLFFKTS

SEQ ID NO: 5376 - protein, 266 aa, Homo sapiens
MDEADRRLLRRCRLRLVEELQVDQLWDALLSRELFRPHMIEDIQRAGSGSRRDQARQLIIDLETRGSQALPLFISCLEDTGQDMLASFLRTNRQAAKLSKPTLENLTPVVLRPEIRKPEVLRPETPRPVDIGSGGFGDVEQKDHGFEVASTSPEDESPGSNPEPDATPFQEGLRTFDQLDAISSLPTPSDIFVSYSTFPGFVSWRDPKSGSWYVETLDDIFEQWAHSEDLQSLLLRVANAVSVKGIYKQMPGCFNFLRKKLFFKTS

SEQ ID NO: 5377 - protein, 200 aa, Homo sapiens
MEPCGHCLIINNVNFCRESGLRTRTGSNIDCEKLRRRFSSLHFMVEVKGDLTAKKMVLALLELAQQDHGALDCCVVVILSHGCQASHLQFPGAVYGTDGCPVSVEKIVNIFNGTSCPSLGGKPKLFFIQACGGGFVSWRDPKSGSWYVETLDDIFEQWAHSEDLQSLLLRVANAVSVKGIYKQMPGCFNFLRKKLFFKTS

SEQ ID NO: 5378 - protein, 333 aa, Homo sapiens
MLASFLRTNRQAAKLSKPTLENLTPVVLRPEIRKPEVLRPETPRPVDIGSGGFGDVGALESLRGNADLAYILSMEPCGHCLIINNVNFCRESGLRTRTGSNIDCEKLRRRFSSLHFMVEVKGDLTAKKMVLALLELAQQDHGALDCCVVVILSHGCQASHLQFPGAVYGTDGCPVSVEKIVNIFNGTSCPSLGGKPKLFFIQACGGEQKDHGFEVASTSPEDESPGSNPEPDATPFQEGLRTFDQLDAISSLPTPSDIFVSYSTFPGFVSWRDPKSGSWYVETLDDIFEQWAHSEDLQSLLLRVANAVSVKGIYKQMPGCFNFLRKKLFFKTS

SEQ ID NO: 5379 - protein, 254 aa, Homo sapiens
MDEADRRLLRRCRLRLVEELQVDQLWDALLSRELFRPHMIEDIQRAGSGSRRDQARQLIIDLETRGSQALPLFISCLEDTGQDMLASFLRTNRQAAKLSKPTLENLTPVVLRPEIRKPEVLRPETPRPVDIGSGGFGDVGALESLRGNADLAYILSMEPCGHCLIINNVNFCRESGLRTRTGSNIDCEKLRRRFSSLHFMVEVKGDLTAKASHLQFPGAVYGTDGCPVSVEKIVNIFNGTSCPSLGGKPKLFFI

SEQ ID NO: 5380 - protein, 266 aa, Homo sapiens
MLASFLRTNRQAAKLSKPTLENLTPVVLRPEIRKPEVLRPETPRPVDIGSGGFGDVGALESLRGNADLAYILSMEPCGHCLIINNVNFCRESGLRTRTGSNIDCEKLRRRFSSLHFMVEVKGDLTAKKMVLALLELAQQDHGALDCCVVVILSHGCQASHLQFPGAVYGTDGCPVSVEKIVNIFNGTSCPSLGGKPKLFFIQACGGEQKDHGFEVASTSPEDESPGSNPEPDATPFQEGLRTFDQLDAISSLPTPSDIFVSYSTFP

SEQ ID NO: 5381 - protein, 421 aa, Homo sapiens
MDEADRRLLRRCRLRLVEELQVDQLWDALLSRELFRPHMIEDIQRAGSGSRRDQARQLIIDLETRGSQALPLFISCLEDTGQDMLASFLRTNRQAAKLSKPTLENLTPVVLRPEIRKPEVLRPETPRPVDIGSGGFGDVGALESLRGNADLAYILSMEPCGHCLIINNVNFCRESGLRTRTGSNIDCEKLRRRFSSLHFMVEVKGDLTAKKMVLALLELAQQDHGALDCCVVVILSHGCQASHLQFPGAVYGTDGCPVSVEKIVNIFNGTSCPSLGGKPKLFFIQACGGEQKDHGFEVASTSPEDESPGSNPEPDATPFQEGLRTFDQLDAISSLPTPSDIFVSYSTFPGFVSWRDPKSGSWYVETLDDIFEQWAHSEDLQSLLLRVSAAFLCKGEGRLLRGSVSSWGWGFGVSRAGPNQG

SEQ ID NO: 5382 - protein, 906 aa, Homo sapiens
MTAVHAGNINFKWDPKSLEIRTLAVERLLEPLVTQVTTLVNTNSKGPSNKKRGRSKKAHVLAASVEQATENFLEKGDKIAKESQFLKEELVAAVEDVRKQGDLMKAAAGEFADDPCSSVKRGNMVRAARALLSAVTRLLILADMADVYKLLVQLKVVEDGILKLRNAGNEQDLGIQYKALKPEVDKLNIMAAKRQQELKDVGHRDQMAAARGILQKNVPILYTASQACLQHPDVAAYKANRDLIYKQLQQAVTGISNAAQATASDDASQHQGGGGGELAYALNNFDKQIIVDPLSFSEERFRPSLEERLESIISGAALMADSSCTRDDRRERIVAECNAVRQALQDLLSEYMGNAGRKERSDALNSAIDKMTKKTRDLRRQLRKAVMDHVSDSFLETNVPLLVLIEAAKNGNEKEVKEYAQVFREHANKLIEVANLACSISNNEEGVKLVRMSASQLEALCPQVINAALALAAKPQSKLAQENMDLFKEQWEKQVRVLTDAVDDITSIDDFLAVSENHILEDVNKCVIALQEKDVDGLDRTAGAIRGRAARVIHVVTSEMDNYEPGVYTEKVLEATKLLSNTVMPRFTEQVEAAVEALSSDPAQPMDENEFIDASRLVYDGIRDIRKAVLMIRTPEELDDSDFETEDFDVRSRTSVQTEDDQLIAGQSARAIMAQLPQEQKAKIAEQVASFQEEKSKLDAEVSKWDDSGNDIIVLAKQMCMIMMEMTDFTRGKGPLKNTSDVISAAKKIAEAGSRMDKLGRTIADHCPDSACKQDLLAYLQRIALYCHQLNICSKVKAEVQNLGGELVVSGVDSAMSLIQAAKNLMNAVVQTVKASYVASTKYQKSQGMASLNLPAVSWKMKAPEKKPLVKREKQDETQTKIKRASQKKHVNPVQALSEFKAMDSI

SEQ ID NO: 5383 - protein, 803 aa, Homo sapiens
MKAAAGEFADDPCSSVKRGNMVRAARALLSAVTRLLILADMADVYKLLVQLKVVEDGILKLRNAGNEQDLGIQYKALKPEVDKLNIMAAKRQQELKDVGHRDQMAAARGILQKNVPILYTASQACLQHPDVAAYKANRDLIYKQLQQAVTGISNAAQATASDDASQHQGGGGGELAYALNNFDKQIIVDPLSFSEERFRPSLEERLESIISGAALMADSSCTRDDRRERIVAECNAVRQALQDLLSEYMGNAGRKERSDALNSAIDKMTKKTRDLRRQLRKAVMDHVSDSFLETNVPLLVLIEAAKNGNEKEVKEYAQVFREHANKLIEVANLACSISNNEEGVKLVRMSASQLEALCPQVINAALALAAKPQSKLAQENMDLFKEQWEKQVRVLTDAVDDITSIDDFLAVSENHILEDVNKCVIALQEKDVDGLDRTAGAIRGRAARVIHVVTSEMDNYEPGVYTEKVLEATKLLSNTVMPRFTEQVEAAVEALSSDPAQPMDENEFIDASRLVYDGIRDIRKAVLMIRTPEELDDSDFETEDFDVRSRTSVQTEDDQLIAGQSARAIMAQLPQEQKAKIAEQVASFQEEKSKLDAEVSKWDDSGNDIIVLAKQMCMIMMEMTDFTRGKGPLKNTSDVISAAKKIAEAGSRMDKLGRTIADHCPDSACKQDLLAYLQRIALYCHQLNICSKVKAEVQNLGGELVVSGVDSAMSLIQAAKNLMNAVVQTVKASYVASTKYQKSQGMASLNLPAVSWKMKAPEKKPLVKREKQDETQTKIKRASQKKHVNPVQALSEFKAMDSI

SEQ ID NO: 5384 - protein, 118 aa, Homo sapiens
MTAVHAGNINFKWDPKSLEIRTLAVERLLEPLVTQVTTLVNTNSKGPSNKKRGRSKKAHVLAASVEQATENFLEKGDKIAKESQFLKEELVAAVEDVRKQGDLMKAAAGEFADDPCSS

SEQ ID NO: 5385 - protein, 139 aa, Homo sapiens
MTAVHAGNINFKWDPKSLEIRTLAVERLLEPLVTQVTTLVNTNSKGPSNKKRGRSKKAHVLAASVEQATENFLEKGDKIAKESQFLKEELVAAVEDVRKQGDLMKAAAGEFADDPCSSVKRGNMVRAARALLSAVTRLL

SEQ ID NO: 5386 - protein, 215 aa, Homo sapiens
MTAVHAGNINFKWDPKSLEIRTLAVERLLEPLVTQVTTLVNTNSKGPSNKKRGRSKKAHVLAASVEQATENFLEKGDKIAKESQFLKEELVAAVEDVRKQGDLMKAAAGEFADDPCSSVKRGNMVRAARALLSAVTRLLILADMADVYKLLVQLKVVEDGILKLRNAGNEQDLGIQYKALKPEVDKLNIMAAKRQQELKDVGHRDQMAAARGILQ

SEQ ID NO: 5387 - protein, 101 aa, Homo sapiens
MTAVHAGNINFKWDPKSLEIRTLAVERLLEPLVTQVTTLVNTNSKGPSNKKRGRSKKAHVLAASVEQATENFLEKGDKIAKESQFLKEELVAAVEDVRKQG

SEQ ID NO: 5388 - protein, 123 aa, Homo sapiens
MTAVHAGNINFKWDPKSLEIRTLAVERLLEPLVTQVTTLVNTNSKGPSNKKRGRSKKAHVLAASVEQATENFLEKGDKIAKESQFLKEELVAAVEDVRKQGDLMKAAAGEFADDPCSSVKRGN

SEQ ID NO: 5389 - protein, 156 aa, Homo sapiens
MTAVHAGNINFKWDPKSLEIRTLAVERLLEPLVTQVTTLVNTNSKGPSNKKRGRSKKAHVLAASVEQATENFLEKGDKIAKESQFLKEELVAAVEDVRKQGDLMKAAAGEFADDPCSSVKRGNMVRAARALLSAVTRLLILADMADVYKLLVQLKV

SEQ ID NO: 5390 - protein, 94 aa, Homo sapiens
MTAVHAGNINFKWDPKSLEIRTLAVERLLEPLVTQVTTLVNTNSKGPSNKKRGRSKKAHVLAASVEQATENFLEKGDKIAKESQFLKEELVAAV

SEQ ID NO: 5391 - protein, 929 aa, Homo sapiens
MTAVHAGNINFKWDPKSLEIRTLAVERLLEPLVTQVTTLVNTNSKGPSNKKRGRSKKAHVLAASVEQATENFLEKGDKIAKESQFLKEELVAAVEDVRKQGDLMKAAAGEFADDPCSSVKRGNMVRAARALLSAVTRLLILADMADVYKLLVQLKVVEDGILKLRNAGNEQDLGIQYKALKPEVDKLNIMAAKRQQELKDVGHRDQMAAARGILQKNVPILYTASQACLQHPDVAAYKANRDLIYKQLQQAVTGISNAAQATASDDASQHQGGGGGELAYALNNFDKQIIVDPLSFSEERFRPSLEERLESIISGAALMADSSCTRDDRRERIVAECNAVRQALQDLLSEYMGNAGRKERSDALNSAIDKMTKKTRDLRRQLRKAVMDHVSDSFLETNVPLLVLIEAAKNGNEKEVKEYAQVFREHANKLIEVANLACSISNNEEGVKLVRMSASQLEALCPQVINAALALAAKPQSKLAQENMDLFKEQWEKQVRVLTDAVDDITSIDDFLAVSENHILEDVNKCVIALQEKDVDGLDRTAGAIRGRAARVIHVVTSEMDNYEPGVYTEKVLEATKLLSNTVMPRFTEQVEAAVEALSSDPAQPMDENEFIDASRLVYDGIRDIRKAVLMIRTPEELDDSDFETEDFDVRSRTSVQTEDDQLIAGQSARAIMAQLPQEQKAKIAEQVASFQEEKSKLDAEVSKWDDSGNDIIVLAKQMCMIMMEMTDFTRGKGPLKNTSDVISAAKKIAEAGSRMDKLGRTIADHCPDSACKQDLLAYLQRIALYCHQLNICSKVKAEVQNLGGELVVSGNCDTCGALQGLKGWPPPLCATHWVDSAMSLIQAAKNLMNAVVQTVKASYVASTKYQKSQGMASLNLPAVSWKMKAPEKKPLVKREKQDETQTKIKRASQKKHVNPVQALSEFKAMDSI

SEQ ID NO: 5392 - protein, 536 aa, Homo sapiens
MTKKTRDLRRQLRKAVMDHVSDSFLETNVPLLVLIEAAKNGNEKEVKEYAQVFREHANKLIEVANLACSISNNEEGVKLVRMSASQLEALCPQVINAALALAAKPQSKLAQENMDLFKEQWEKQVRVLTDAVDDITSIDDFLAVSENHILEDVNKCVIALQEKDVDGLDRTAGAIRGRAARVIHVVTSEMDNYEPGVYTEKVLEATKLLSNTVMPRFTEQVEAAVEALSSDPAQPMDENEFIDASRLVYDGIRDIRKAVLMIRTPEELDDSDFETEDFDVRSRTSVQTEDDQLIAGQSARAIMAQLPQEQKAKIAEQVASFQEEKSKLDAEVSKWDDSGNDIIVLAKQMCMIMMEMTDFTRGKGPLKNTSDVISAAKKIAEAGSRMDKLGRTIADHCPDSACKQDLLAYLQRIALYCHQLNICSKVKAEVQNLGGELVVSGVDSAMSLIQAAKNLMNAVVQTVKASYVASTKYQKSQGMASLNLPAVSWKMKAPEKKPLVKREKQDETQTKIKRASQKKHVNPVQALSEFKAMDSI

SEQ ID NO: 5393 - protein, 891 aa, Homo sapiens
MTAVHAGNINFKWDPKSLEIRTLAVERLLEPLVTQVTTLVNTNSKGPSNKKRGRSKKAHVLAASVEQATENFLEKGDKIAKESQFLKEELVAAVEDVRKQGDLMKAAAGEFADDPCSSVKRGNMVRAARALLSAVTRLLKVVEDGILKLRNAGNEQDLGIQYKALKPEVDKLNIMAAKRQQELKDVGHRDQMAAARGILQKNVPILYTASQACLQHPDVAAYKANRDLIYKQLQQAVTGISNAAQATASDDASQHQGGGGGELAYALNNFDKQIIVDPLSFSEERFRPSLEERLESIISGAALMADSSCTRDDRRERIVAECNAVRQALQDLLSEYMGNAGRKERSDALNSAIDKMTKKTRDLRRQLRKAVMDHVSDSFLETNVPLLVLIEAAKNGNEKEVKEYAQVFREHANKLIEVANLACSISNNEEGVKLVRMSASQLEALCPQVINAALALAAKPQSKLAQENMDLFKEQWEKQVRVLTDAVDDITSIDDFLAVSENHILEDVNKCVIALQEKDVDGLDRTAGAIRGRAARVIHVVTSEMDNYEPGVYTEKVLEATKLLSNTVMPRFTEQVEAAVEALSSDPAQPMDENEFIDASRLVYDGIRDIRKAVLMIRTPEELDDSDFETEDFDVRSRTSVQTEDDQLIAGQSARAIMAQLPQEQKAKIAEQVASFQEEKSKLDAEVSKWDDSGNDIIVLAKQMCMIMMEMTDFTRGKGPLKNTSDVISAAKKIAEAGSRMDKLGRTIADHCPDSACKQDLLAYLQRIALYCHQLNICSKVKAEVQNLGGELVVSGVDSAMSLIQAAKNLMNAVVQTVKASYVASTKYQKSQGMASLNLPAVSWKMKAPEKKPLVKREKQDETQTKIKRASQKKHVNPVQALSEFKAMDSI

SEQ ID NO: 5394 - protein, 781 aa, Homo sapiens
MATQADLMELDMAMEPDRKAAVSHWQQQSYLDSGIHSGATTTAPSLSGKGNPEEEDVDTSQVLYEWEQGFSQSFTQEQVADIDGQYAMTRAQRVRAAMFPETLDEGMQIPSTQFDAAHPTNVQRLAEPSQMLKHAVVNLINYQDDAELATRAIPELTKLLNDEDQVVVNKAAVMVHQLSKKEASRHAIMRSPQMVSAIVRTMQNTNDVETARCTAGTLHNLSHHREGLLAIFKSGGIPALVKMLGSPVDSVLFYAITTLHNLLLHQEGAKMAVRLAGGLQKMVALLNKTNVKFLAITTDCLQILAYGNQESKLIILASGGPQALVNIMRTYTYEKLLWTTSRVLKVLSVCSSNKPAIVEAGGMQALGLHLTDPSQRLVQNCLWTLRNLSDAATKQEGMEGLLGTLVQLLGSDDINVVTCAAGILSNLTCNNYKNKMMVCQVGGIEALVRTVLRAGDREDITEPAICALRHLTSRHQEAEMAQNAVRLHYGLPVVVKLLHPPSHWPLIKATVGLIRNLALCPANHAPLREQGAIPRLVQLLVRAHQDTQRRTSMGGTQQQFVEGVRMEEIVEGCTGALHILARDVHNRIVIRGLNTIPLFVQLLYSPIENIQRVAAGVLCELAQDKEAAEAIEAEGATAPLTELLHSRNEGVATYAAAVLFRMSEDKPQDYKKRLSVELTSSLFRTEPMAWNETADLGLDIGAQGEPLGYRQDDPSYRSFHSGGYGQDALGMDPMMEHEMGGHHPGADYPVDGLPDLGHAQDLMDGLPPGDSNQLAWFDTDL

SEQ ID NO: 5395 - protein, 781 aa, Homo sapiens; identical to SEQ ID NO: 5394

SEQ ID NO: 5396 - protein, 781 aa, Homo sapiens; identical to SEQ ID NO: 5394

SEQ ID NO: 5397 - protein, 781 aa, Homo sapiens; identical to SEQ ID NO: 5394

SEQ ID NO: 5398 - protein, 150 aa, Homo sapiens
MATQADLMELDMAMEPDRKAAVSHWQQQSYLDSGIHSGATTTAPSLSGKGNPEEEDVDTSQVLYEWEQGFSQSFTQEQVADIDGQYAMTRAQRVRAAMFPETLDEGMQIPSTQFDAAHPTNVQRLAEPSQMLKHAVVNLINYQDDAELAT

SEQ ID NO: 5399 - protein, 13 aa, Homo sapiens
MATQADLMELDMA

SEQ ID NO: 5400 - protein, 100 aa, Homo sapiens
MATQADLMELDMAMEPDRKAAVSHWQQQSYLDSGIHSGATTTAPSLSGKGNPEEEDVDTSQVLYEWEQGFSQSFTQEQVADIDGQYAMTRAQRVRAAMFP

SEQ ID NO: 5401 - protein, 108 aa, Homo sapiens
MATQADLMELDMAMEPDRKAAVSHWQQQSYLDSGIHSGATTTAPSLSGKGNPEEEDVDTSQVLYEWEQGFSQSFTQEQVADIDGQYAMTRAQRVRAAMFPETLDEGMQ

SEQ ID NO: 5402 - protein, 774 aa, Homo sapiens
MELDMAMEPDRKAAVSHWQQQSYLDSGIHSGATTTAPSLSGKGNPEEEDVDTSQVLYEWEQGFSQSFTQEQVADIDGQYAMTRAQRVRAAMFPETLDEGMQIPSTQFDAAHPTNVQRLAEPSQMLKHAVVNLINYQDDAELATRAIPELTKLLNDEDQVVVNKAAVMVHQLSKKEASRHAIMRSPQMVSAIVRTMQNTNDVETARCTAGTLHNLSHHREGLLAIFKSGGIPALVKMLGSPVDSVLFYAITTLHNLLLHQEGAKMAVRLAGGLQKMVALLNKTNVKFLAITTDCLQILAYGNQESKLIILASGGPQALVNIMRTYTYEKLLWTTSRVLKVLSVCSSNKPAIVEAGGMQALGLHLTDPSQRLVQNCLWTLRNLSDAATKQEGMEGLLGTLVQLLGSDDINVVTCAAGILSNLTCNNYKNKMMVCQVGGIEALVRTVLRAGDREDITEPAICALRHLTSRHQEAEMAQNAVRLHYGLPVVVKLLHPPSHWPLIKATVGLIRNLALCPANHAPLREQGAIPRLVQLLVRAHQDTQRRTSMGGTQQQFVEGVRMEEIVEGCTGALHILARDVHNRIVIRGLNTIPLFVQLLYSPIENIQRVAAGVLCELAQDKEAAEAIEAEGATAPLTELLHSRNEGVATYAAAVLFRMSEDKPQDYKKRLSVELTSSLFRTEPMAWNETADLGLDIGAQGEPLGYRQDDPSYRSFHSGGYGQDALGMDPMMEHEMGGHHPGADYPVDGLPDLGHAQDLMDGLPPGDSNQLAWFDTDL

SEQ ID NO: 5403 - protein, 339 aa, Homo sapiens
MWQLWASLCCLLVLANARSRPSFHPLSDELVNYVNKRNTTWQAGHNFYNVDMSYLKRLCGTFLGGPKPPQRVMFTEDLKLPASFDAREQWPQCPTIKEIRDQGSCGSCWAFGAVEAISDRICIHTNAHVSVEVSAEDLLTCCGSMCGDGCNGGYPAEAWNFWTRKGLVSGGLYESHVGCRPYSIPPCEHHVNGSRPPCTGEGDTPKCSKICEPGYSPTYKQDKHYGYNSYSVSNSEKDIMAEIYKNGPVEGAFSVYSDFLLYKSGVYQHVTGEMMGGHAIRILGWGVENGTPYWLVANSWNTDWGDNGFFKILRGQDHCGIESEVVAGIPRTDQYWEKI

SEQ ID NO: 5404 - protein, 339 aa, Homo sapiens; identical to SEQ ID NO: 5403

SEQ ID NO: 5405 - protein, 110 aa, Homo sapiens
MWQLWASLCCLLVLANARSRPSFHPLSDELVNYVNKRNTTWQAGHNFYNVDMSYLKRLCGTFLGGPKPPQRVMFTEDLKLPASFDAREQWPQCPTIKEIRDQGSCGSCWL

SEQ ID NO: 5406 - protein, 339 aa, Homo sapiens; identical to SEQ ID NO: 5403

SEQ ID NO: 5407 - protein, 339 aa, Homo sapiens; identical to SEQ ID NO: 5403

SEQ ID NO: 5408 - protein, 339 aa, Homo sapiens; identical to SEQ ID NO: 5403

SEQ ID NO: 5409 - protein, 339 aa, Homo sapiens; identical to SEQ ID NO: 5403

SEQ ID NO: 5410 - protein, 339 aa, Homo sapiens; identical to SEQ ID NO: 5403

SEQ ID NO: 5411 - protein, 339 aa, Homo sapiens; identical to SEQ ID NO: 5403

SEQ ID NO: 5412 - protein, 276 aa, Homo sapiens [sequence omitted]

SEQ ID NO: 5413 - protein, 245 aa, Homo sapiens
MPGAGPLSIPCRMSWAFGAVEAISDRICIHTNAHVSVEVSAEDLLTCCGSMCGDGCNGGYPAEAWNFWTRKGLVSGGLYESHVGCRPYSIPPCEHHVNGSRPPCTGEGDTPKCSKICEPGYSPTYKQDKHYGYNSYSVSNSEKDIMAEIYKNGPVEGAFSVYSDFLLYKSGVYQHVTGEMMGGHAIRILGWGVENGTPYWLVANSWNTDWGDNGFFKILRGQDHCGIESEVVAGIPRTDQYWEKI

SEQ ID NO: 5414 - protein, 412 aa, Homo sapiens
MQPSSLLPLALCLLAAPASALVRIPLHKFTSIRRTMSEVGGSVEDLIAKGPVSKYSQAVPAVTEGPIPEVLKNYMDAQYYGEIGIGTPPQCFTVVFDTGSSNLWVPSIHCKLLDIACWIHHKYNSDKSSTYVKNGTSFDIHYGSGSLSGYLSQDTVSVPCQSASSASALGGVKVERQVFGEATKQPGITFIAAKFDGILGMAYPRISVNNVLPVFDNLMQQKLVDQNIFSFYLSRDPDAQPGGELMLGGTDSKYYKGSLSYLNVTRKAYWQVHLDQVEVASGLTLCKEGCEAIVDTGTSLMVGPVDEVRELQKAIGAVPLIQGEYMIPCEKVSTLPAITLKLGGKGYKLSPEDYTLKVSQAGKTLCLSGFMGMDIPPPSGPLWILGDVFIGRYYTVFDRDNNRVGFAEAARL

SEQ ID NO: 5415 - protein, 333 aa, Homo sapiens [sequence omitted]

SEQ ID NO: 5416 - protein, 225 aa, Homo sapiens
MNPTLILAAFCLGIASATLTFDHSLEAQWTKWKAMHNRLYGMNEEGWRRAVWEKNMKMIELHNQEYREGKHSFTMAMNAFGDMTSEEFRQVMNGFQNRKPRKGKVFQEPLFYEAPRSVDWREKGYVTPVKNQGQCGSCWAFSATGALEGQMFRKTGRLISLSEQNLVDCSGPQGNEGCNGGLMDYAFQYVQDNGGLDSEESYPYEATVSGAPCHHSSSAFGRWTL

SEQ ID NO: 5417 - protein, 333 aa, Homo sapiens [sequence omitted]

SEQ ID NO: 5418 - protein, 39 aa, Homo sapiens
MNPTLILAAFCLGIASATLTFDHSLEAQWTKWKAMHNRL

SEQ ID NO: 5419 - protein, 147 aa, Homo sapiens
MADELSEKQVYDAHTKEIDLVNRDPKHLNDDVVKIDFEDVIAEPEGTHSFDGIWKASFTTFTVTKYWFYRLLSALFGIPMALIWGIYFAILSFLHIWAVVPCIKSFLIEIQCISRVYSIYVHTVCDPLFEAVGKIFSNVRINLQKEI

SEQ ID NO: 5420 - protein, 147 aa, Homo sapiens; identical to SEQ ID NO: 5419

SEQ ID NO: 5421 - protein, 178 aa, Homo sapiens
MSGGKYVDSEGHLYTVPIREQGNIYKPNNKAMADELSEKQVYDAHTKEIDLVNRDPKHLNDDVVKIDFEDVIAEPEGTHSFDGIWKASFTTFTVTKYWFYRLLSALFGIPMALIWGIYFAILSFLHIWAVVPCIKSFLIEIQCISRVYSIYVHTVCDPLFEAVGKIFSNVRINLQKEI

SEQ ID NO: 5422 - protein, 162 aa, Homo sapiens
MGLETEKADVQLFMDDDSYSHHSGLEYADPEKFADSDQDRDPHRLNSHLKLGFEDVIAEPVTTHSFDKVWICSHALFEISKYVMYKFLTVFLAIPLAFIAGILFATLSCLHIWILMPFVKTCLMVLPSVQTIWKSVTDVIIAPLCTSVGRCFSSVSLQLSQD

SEQ ID NO: 5423 - protein, 112 aa, Homo sapiens
MGLETEKADVQLFMDDDSYSHHSGLEYADPEKFADSDQDRDPHRLNSHLKDFNAFCKDLPNGSAFSADNMEECDRCYHCSIVYERRTMLLFCQPATEPGLNTWTPGLEIGIL

SEQ ID NO: 5424 - protein, 113 aa, Homo sapiens
MGLETEKADVQLFMDDDSYSHHSGLEYADPEKFADSDQDRDPHRLNSHLKLGFEDVIAEPVTTHSFDKVWICSHALFEISKYVMYKFLTVFLAIPLAFIAGILFATLSCLHIW

SEQ ID NO: 5425 - protein, 345 aa, Homo sapiens
MQRLVAWDPACLPLPPPPPAFKSMEVANFYYEADCLAAAYGGKAAPAAPPAARPGPRPPAGELGSIGDHERAIDFSPYLEPLGAPQAPAPATATDTFEAAPPAPAPAPASSGQHHDFLSDLFSDDYGGKNCKKPAEYGYVSLGRLGAAKGALHPGCFAPLHPPPPPPPPPAELKAEPGFEPADCKRKEEAGAPGGGAGMAAGFPYALRAYLGYQAVPSGSSGSLSTSSSSSPPGTPSPADAKAPPTACYAGAAPAPSQVKSKAKKTVDKHSDEYKIRRERNNIAVRKSRDKAKMRNLETQHKVLELTAENERLQKKVEQLSRELSTLRNLFKQLPEPLLASSGHC

SEQ ID NO: 5426 - protein, 727 aa, Homo sapiens
MEGDAVEAIVEESETFIKGKERKTYQRRREGGQEEDACHLPQNQTDGGEVVQDVNSSVQMVMMEQLDPTLLQMKTEVMEGTVAPEAEAAVDDTQIITLQVVNMEEQPINIGELQLVQVPVPVTVPVATTSVEELQGAYENEVSKEGLAESEPMICHTLPLPEGFQVVKVGANGEVETLEQGELPPQEDPSWQKDPDYQPPAKKTKKTKKSKLRYTEEGKDVDVSVYDFEEEQQEGLLSEVNAEKVVGNMKPPKPTKIKKKGVKKTFQCELCSYTCPRRSNLDRHMKSHTDERPHKCHLCGRAFRTVTLLRNHLNTHTGTRPHKCPDCDMAFVTSGELVRHRRYKHTHEKPFKCSMCDYASVEVSKLKRHIRSHTGERPFQCSLCSYASRDTYKLKRHMRTHSGEKPYECYICHARFTQSGTMKMHILQKHTENVAKFHCPHCDTVIARKSDLGVHLRKQHSYIEQGKKCRYCDAVFHERYALIQHQKSHKNEKRFKCDQCDYACRQERHMIMHKRTHTGEKPYACSHCDKTFRQKQLLDMHFKRYHDPNFVPAAFVCSKCGKTFTRRNTMARHADNCAGPDGVEGENGGETKKSKRGRKRKMRSKKEDSSDSENAEPDLDDNEDEEEPAVEIEPEPEPQPVTPAPPPAKKRRGRPPGRTNQPKQNQPTAIIQVEDQNTGAIENIIVEVKKEPDAEPAEGEEEEAQPAATDAPNGDLTPEMILSMMDR

SEQ ID NO: 5427 - protein, 399 aa, Homo sapiens
MAFVTSGELVRHRRYKHTHEKPFKCSMCDYASVEVSKLKRHIRSHTGERPFQCSLCSYASRDTYKLKRHMRTHSGEKPYECYICHARFTQSGTMKMHILQKHTENVAKFHCPHCDTVIARKSDLGVHLRKQHSYIEQGKKCRYCDAVFHERYALIQHQKSHKNEKRFKCDQCDYACRQERHMIMHKRTHTGEKPYACSHCDKTFRQKQLLDMHFKRYHDPNFVPAAFVCSKCGKTFTRRNTMARHADNCAGPDGVEGENGGETKKSKRGRKRKMRSKKEDSSDSENAEPDLDDNEDEEEPAVEIEPEPEPQPVTPAPPPAKKRRGRPPGRTNQPKQNQPTAIIQVEDQNTGAIENIIVEVKKEPDAEPAEGEEEEAQPAATDAPNGDLTPEMILSMMDR

SEQ ID NO: 5428 - protein, 375 aa, Homo sapiens
MERASCLLLLLLPLVHVSATTPEPCELDDEDFRCVCNFSEPQPDWSEAFQCVSAVEVEIHAGGLNLEPFLKRVDADADPRQYADTVKALRVRRLTVGAAQVPAQLLVGALRVLAYSRLKELTLEDLKITGTMPPLPLEATGLALSSLRLRNVSWATGRSWLAELQQWLKPGLKVLSIAQAHSPAFSCEQVRAFPALTSLDLSDNPGLGERGLMAALCPHKFPAIQNLALRNTGMETPTGVCAALAAAGVQPHSLDLSHNSLRATVNPSAPRCMWSSALNSLNLSFAGLEQVPKGLPAKLRVLDLSCNRLNRAPQPDELPEVDNLTLDGNPFLVPGTALPHEGSMNSGVVPACARSTLSVGVSGTLVLLQGARGFA

SEQ ID NO: 5429 - protein, 375 aa, Homo sapiens; identical to SEQ ID NO: 5428

SEQ ID NO: 5430 - protein, 133 aa, Homo sapiens
MSFPCKFVASFLLIFNVSSKGAVSKEITNALETWGALGQDINLDIPSFQMSDDIDDIKWEKTSDKKKIAQFRKEKETFKEKDTYKLFKNGTLKIKHLKTDDQDIYKVSIYDTKGKNVLEKIFDLKIQGKCSFP

SEQ ID NO: 5431 - protein, 351 aa, Homo sapiens
MSFPCKFVASFLLIFNVSSKGAVSKEITNALETWGALGQDINLDIPSFQMSDDIDDIKWEKTSDKKKIAQFRKEKETFKEKDTYKLFKNGTLKIKHLKTDDQDIYKVSIYDTKGKNVLEKIFDLKIQERVSKPKISWTCINTTLTCEVMNGTDPELNLYQDGKHLKLSQRVITHKWTTSLSAKFKCTAGNKVSKESSVEPVSCPEKGLDIYLIIGICGGGSLLMVFVALLVFYITKRKKQRSRRNDEELETRAHRVATEERGRKPHQIPASTPQNPATSQHPPPPPGHRSQAPSHRPPPPGHRVQHQPQKRPPAPSGTQVHQQKGPPLPRPRVQPKPPHGAAENSLSPSSN

SEQ ID NO: 5432 - protein, 847 aa, Homo sapiens
MHLLGPWLLLLVLEYLAFSDSSKWVFEHPETLYAWEGACVWIPCTYRALDGDLESFILFHNPEYNKNTSKFDGTRLYESTKDGKVPSEQKRVQFLGDKNKNCTLSIHPVHLNDSGQLGLRMESKTEKWMERIHLNVSERPFPPHIQLPPEIQESQEVTLTCLLNFSCYGYPIQLQWLLEGVPMRQAAVTSTSLTIKSVFTRSELKFSPQWSHHGKIVTCQLQDADGKFLSNDTVQLNVKHTPKLEIKVTPSDAIVREGDSVTMTCEVSSSNPEYTTVSWLKDGTSLKKQNTFTLNLREVTKDQSGKYCCQVSNDVGPGRSEEVFLQVQYAPEPSTVQILHSPAVEGSQVEFLCMSLANPLPTNYTWYHNGKEMQGRTEEKVHIPKILPWHAGTYSCVAENILGTGQRGPGAELDVQYPPKKVTTVIQNPMPIREGDTVTLSCNYNSSNPSVTRYEWKPHGAWEEPSLGVLKIQNVGWDNTTIACAACNSWCSWASPVALNVQYAPRDVRVRKIKPLSEIHSGNSVSLQCDFSSSHPKEVQFFWEKNGRLLGKESQLNFDSISPEDAGSYSCWVNNSIGQTASKAWTLEVLYAPRRLRVSMSPGDQVMEGKSATLTCESDANPPVSHYTWFDWNNQSLPYHSQKLRLEPVKVQHSGAYWCQGTNSVGKGRSPLSTLTVYYSPETIGRRVAVGLGSCLAILILAICGLKLQRRWKRTQSQQGLQENSSGQSFFVRNKKVRRAPLSEGPHSLGCYNPMMEDGISYTTLRFPEMNIPRTGDAESSEMQRPPPDCDDTVTYSALHKRQVGDYENVIPDFPEDEGIHYSELIQFGVGERPQAQENVDYVILKH

SEQ ID NO: 5433 - protein, 662 aa, Homo sapiens
MESKTEKWMERIHLNVSERPFPPHIQLPPEIQESQEVTLTCLLNFSCYGYPIQLQWLLEGVPMRQAAVTSTSLTIKSVFTRSELKFSPQWSHHGKIVTCQLQDADGKFLSNDTVQLNVKHTPKLEIKVTPSDAIVREGDSVTMTCEVSSSNPEYTTVSWLKDGTSLKKQNTFTLNLREVTKDQSGKYCCQVSNDVGPGRSEEVFLQVQYAPEPSTVQILHSPAVEGSQVEFLCMSLANPLPTNYTWYHNGKEMQGRTEEKVHIPKILPWHAGTYSCVAENILGTGQRGPGAELDVQYPPKKVTTVIQNPMPIREGDTVTLSCNYNSSNPSVTRYEWKPHGAWEEPSLGVLKIQNVGWDNTTIACAACNSWCSWASPVALNVQYAPRDVRVRKIKPLSEIHSGNSVSLQCDFSSSHPKEVQFFWEKNGRLLGKESQLNFDSISPEDAGSYSCWVNNSIGQTASKAWTLEVLYAPRRLRVSMSPGDQVMEGKSATLTCESDANPPVSHYTWFDWNNQSLPYHSQKLRLEPVKVQHSGAYWCQGTNSVGKGRSPLSTLTVYYSPETIGRRVAVGLGSCLAILILAICGLKLQRRDAESSEMQRPPPDCDDTVTYSALHKRQVGDYENVIPDFPEDEGIHYSELIQFGVGERPQAQENVDYVILKH

SEQ ID NO: 5434 - protein, 670 aa, Homo sapiens
MHLLGPWLLLLVLEYLAFSDSSKWVFEHPETLYAWEGACVWIPCTYRALDGDLESFILFHNPEYNKNTSKFDGTRLYESTKDGKVPSEQKRVQFLGDKNKNCTLSIHPVHLNDSGQLGLRMESKTEKWMERIHLNVSERPFPPHIQLPPEIQESQEVTLTCLLNFSCYGYPIQLQWLLEGVPMRQAAVTSTSLTIKSVFTRSELKFSPQWSHHGKIVTCQLQDADGKFLSNDTVQLNVKHPPKKVTTVIQNPMPIREGDTVTLSCNYNSSNPSVTRYEWKPHGAWEEPSLGVLKIQNVGWDNTTIACAACNSWCSWASPVALNVQYAPRDVRVRKIKPLSEIHSGNSVSLQCDFSSSHPKEVQFFWEKNGRLLGKESQLNFDSISPEDAGSYSCWVNNSIGQTASKAWTLEVLYAPRRLRVSMSPGDQVMEGKSATLTCESDANPPVSHYTWFDWNNQSLPYHSQKLRLEPVKVQHSGAYWCQGTNSVGKGRSPLSTLTVYYSPETIGRRVAVGLGSCLAILILAICGLKLQRRWKRTQSQQGLQENSSGQSFFVRNKKVRRAPLSEGPHSLGCYNPMMEDGISYTTLRFPEMNIPRTGDAESSEMQRPPPDCDDTVTYSALHKRQVGDYENVIPDFPEDEGIHYSELIQFGVGERPQAQENVDYVILKH

SEQ ID NO: 5435 - protein, 675 aa, Homo sapiens
MSLWLLEGVPMRQAAVTSTSLTIKSVFTRSELKFSPQWSHHGKIVTCQLQDADGKFLSNDTVQLNVKHTPKLEIKVTPSDAIVREGDSVTMTCEVSSSNPEYTTVSWLKDGTSLKKQNTFTLNLREVTKDQSGKYCCQVSNDVGPGRSEEVFLQVQYAPEPSTVQILHSPAVEGSQVEFLCMSLANPLPTNYTWYHNGKEMQGRTEEKVHIPKILPWHAGTYSCVAENILGTGQRGPGAELDVQYPPKKVTTVIQNPMPIREGDTVTLSCNYNSSNPSVTRYEWKPHGAWEEPSLGVLKIQNVGWDNTTIACAACNSWCSWASPVALNVQYAPRDVRVRKIKPLSEIHSGNSVSLQCDFSSSHPKEVQFFWEKNGRLLGKESQLNFDSISPEDAGSYSCWVNNSIGQTASKAWTLEVLYAPRRLRVSMSPGDQVMEGKSATLTCESDANPPVSHYTWFDWNNQSLPYHSQKLRLEPVKVQHSGAYWCQGTNSVGKGRSPLSTLTVYYSPETIGRRVAVGLGSCLAILILAICGLKLQRRWKRTQSQQGLQENSSGQSFFVRNKKVRRAPLSEGPHSLGCYNPMMEDGISYTTLRFPEMNIPRTGDAESSEMQRPPPDCDDTVTYSALHKRQVGDYENVIPDFPEDEGIHYSELIQFGVGERPQAQENVDYVILKH

SEQ ID NO: 5436 - protein, 759 aa, Homo sapiens
MHLLGPWLLLLVLEYLAFSDSSKWVFEHPETLYAWEGACVWIPCTYRALDGDLESFILFHNPEYNKNTSKFDGTRLYESTKDGKVPSEQKRVQFLGDKNKNCTLSIHPVHLNDSGQLGLRMESKTEKWMERIHLNVSERPFPPHIQLPPEIQESQEVTLTCLLNFSCYGYPIQLQWLLEGVPMRQAAVTSTSLTIKSVFTRSELKFSPQWSHHGKIVTCQLQDADGKFLSNDTVQLNVKHTPKLEIKVTPSDAIVREGDSVTMTCEVSSSNPEYTTVSWLKDGTSLKKQNTFTLNLREVTKDQSGKYCCQVSNDVGPGRSEEVFLQVQYPPKKVTTVIQNPMPIREGDTVTLSCNYNSSNPSVTRYEWKPHGAWEEPSLGVLKIQNVGWDNTTIACAACNSWCSWASPVALNVQYAPRDVRVRKIKPLSEIHSGNSVSLQCDFSSSHPKEVQFFWEKNGRLLGKESQLNFDSISPEDAGSYSCWVNNSIGQTASKAWTLEVLYAPRRLRVSMSPGDQVMEGKSATLTCESDANPPVSHYTWFDWNNQSLPYHSQKLRLEPVKVQHSGAYWCQGTNSVGKGRSPLSTLTVYYSPETIGRRVAVGLGSCLAILILAICGLKLQRRWKRTQSQQGLQENSSGQSFFVRNKKVRRAPLSEGPHSLGCYNPMMEDGISYTTLRFPEMNIPRTGDAESSEMQRPPPDCDDTVTYSALHKRQVGDYENVIPDFPEDEGIHYSELIQFGVGERPQAQENVDYVILKH

SEQ ID NO: 5437 - protein, 751 aa, Homo sapiens
MHLLGPWLLLLVLEYLAFSDSSKWVFEHPETLYAWEGACVWIPCTYRALDGDLESFILFHNPEYNKNTSKFDGTRLYESTKDGKVPSEQKRVQFLGDKNKNCTLSIHPVHLNDSGQLGLRMESKTEKWMERIHLNVSERPFPPHIQLPPEIQESQEVTLTCLLNFSCYGYPIQLQWLLEGVPMRQAAVTSTSLTIKSVFTRSELKFSPQWSHHGKIVTCQLQDADGKFLSNDTVQLNVKHTPKLEIKVTPSDAIVREGDSVTMTCEVSSSNPEYTTVSWLKDGTSLKKQNTFTLNLREVTKDQSGKYCCQVSNDVGPGRSEEVFLQVQYAPEPSTVQILHSPAVEGSQVEFLCMSLANPLPTNYTWYHNGKEMQGRTEEKVHIPKILPWHAGTYSCVAENILGTGQRGPGAELDVQYPPKKVTTVIQNPMPIREGDTVTLSCNYNSSNPSVTRYEWKPHGAWEEPSLGVLKIQNVGWDNTTIACAACNSWCSWASPVALNVQYAPRDVRVRKIKPLSEIHSGNSVSLQCDFSSSHPKEVQFFWEKNGRLLGKESQLNFDSISPEDAGSYSCWVNNSIGQTASKAWTLEVLYAPRRLRVSMSPGDQVMEGKSATLTCESDANPPVSHYTWFDWNNQSLPYHSQKLRLEPVKVQHSGAYWCQGTNSVGKGRSPLSTLTVYYSPETIGRRVAVGLGSCLAILILAICGLKLQRRWKRTQSQQGLQENSSGQSFFVRNKKRCRVLRDAETSPGLR

SEQ ID NO: 5438 - protein, 260 aa, Homo sapiens
MARPHPWWLCVLGTLVGLSATPAPKSCPERHYWAQGKLCCQMCEPGTFLVKDCDQHRKAAQCDPCIPGVSFSPDHHTRPHCESCRHCNSGLLVRNCTITANAECACRNGWQCRDKECTECDPLPNPSLTARSSQALSPHPQPTHLPYVSEMLEARTAGHMQTLADFRQLPARTLSTHWPPQRSLCSSDFIRILVIFSGMFLVFTLAGALFLHQRRKYRSNKGESPVEPAEPCHYSCPREEEGSTIPIQEDYRKPEPACSP

SEQ ID NO: 5439 - protein, 385 aa, Homo sapiens
MLVRRGARAGPRMPRGWTALCLLSLLPSGFMSLDNNGTATPELPTQGTFSNVSTNVSYQETTTPSTLGSTSLHPVSQHGNEATTNITETTVKFTSTSVITSVYGNTNSSVQSQTSVISTVFTTPANVSTPETTLKPSLSPGNVSDLSTTSTSLATSPTKPYTSSSPILSDIKAEIKCSGIREVKLTQGICLEQNKTSSCAEFKKDRGEGLARVLCGEEQADADAGAQVCSLLLAQSEVRPQCLLLVLANRTEISSKLQLMKKHQSDLKKLGILDFTEQDVASHQSYSQKTLIALVTSGALLAVLGITGYFLMNRRSWSPTGERLGEDPYYTENGGGQGYSSGPGTSPEAQGKASVNRGAQENGTGQATSRNGHSARQHVVADTEL

SEQ ID NO: 5440 - protein, 328 aa, Homo sapiens
MLVRRGARAGPRMPRGWTALCLLSLLPSGFMSLDNNGTATPELPTQGTFSNVSTNVSYQETTTPSTLGSTSLHPVSQHGNEATTNITETTVKFTSTSVITSVYGNTNSSVQSQTSVISTVFTTPANVSTPETTLKPSLSPGNVSDLSTTSTSLATSPTKPYTSSSPILSDIKAEIKCSGIREVKLTQGICLEQNKTSSCAEFKKDRGEGLARVLCGEEQADADAGAQVCSLLLAQSEVRPQCLLLVLANRTEISSKLQLMKKHQSDLKKLGILDFTEQDVASHQSYSQKTLIALVTSGALLAVLGITGYFLMNRRSWSPTGERLELEP

SEQ ID NO: 5441 - protein, 227 aa, Homo sapiens
MDFGPGRLFRFFSYCVVAHIQLAVFFFSVGILETRILLADGAEFKKDRGEGLARVLCGEEQADADAGAQVCSLLLAQSEVRPQCLLLVLANRTEISSKLQLMKKHQSDLKKLGILDFTEQDVASHQSYSQKTLIALVTSGALLAVLGITGYFLMNRRSWSPTGERLGEDPYYTENGGGQGYSSGPGTSPEAQGKASVNRGAQENGTGQATSRNGHSARQHVVADTEL

SEQ ID NO: 5442 - protein, 355 aa, Homo sapiens
MSLDNNGTATPELPTQGTFSNVSTNVSYQETTTPSTLGSTSLHPVSQHGNEATTNITETTVKFTSTSVITSVYGNTNSSVQSQTSVISTVFTTPANVSTPETTLKPSLSPGNVSDLSTTSTSLATSPTKPYTSSSPILSDIKAEIKCSGIREVKLTQGICLEQNKTSSCAEFKKDRGEGLARVLCGEEQADADAGAQVCSLLLAQSEVRPQCLLLVLANRTEISSKLQLMKKHQSDLKKLGILDFTEQDVASHQSYSQKTLIALVTSGALLAVLGITGYFLMNRRSWSPTGERLGEDPYYTENGGGQGYSSGPGTSPEAQGKASVNRGAQENGTGQATSRNGHSARQHVVADTEL

SEQ ID NO: 5443 - protein, 250 aa, Homo sapiens
MFLQMYPTKKLQHLVPLEVPACTLCLNMAMRPQQTSQAEIKCSGIREVKLTQGICLEQNKTSSCAEFKKDRGEGLARVLCGEEQADADAGAQVCSLLLAQSEVRPQCLLLVLANRTEISSKLQLMKKHQSDLKKLGILDFTEQDVASHQSYSQKTLIALVTSGALLAVLGITGYFLMNRRSWSPTGERLGEDPYYTENGGGQGYSSGPGTSPEAQGKASVNRGAQENGTGQATSRNGHSARQHVVADTEL

SEQ ID NO: 5444 - protein, 171 aa, Homo sapiens
MEHSTFLSGLVLATLLSQVSPFKIPIEELEDRVFVNCNTSITWVEGTVGTLLSDITRLDLGKRILDPRGIYRCNGTDIYKDKESTVQVHYRMCQSCVELDPATVAGIIVTDVIATLLLALGVFCFAGHETGRLSGAADTQALLRNDQVYQPLRDRDDAQYSHLGGNWARNK

SEQ ID NO: 5445 - protein, 127 aa, Homo sapiens
MEHSTFLSGLVLATLLSQVSPFKIPIEELEDRVFVNCNTSITWVEGTVGTLLSDITRLDLGKRILDPRGIYRCNGTDIYKDKESTVQVHYRTADTQALLRNDQVYQPLRDRDDAQYSHLGGNWARNK

SEQ ID NO: 5446 - protein, 458 aa, Homo sapiens
MNRGVPFRHLLLVLQLALLPAATQGKKVVLGKKGDTVELTCTASQKKSIQFHWKNSNQIKILGNQGSFLTKGPSKLNDRADSRRSLWDQGNFPLIIKNLKIEDSDTYICEVEDQKEEVQLLVFGLTANSDTHLLQGQSLTLTLESPPGSSPSVQCRSPRGKNIQGGKTLSVSQLELQDSGTWTCTVLQNQKKVEFKIDIVVLAFQKASSIVYKKEGEQVEFSFPLAFTVEKLTGSGELWWQAERASSSKSWITFDLKNKEVSVKRVTQDPKLQMGKKLPLHLTLPQALPQYAGSGNLTLALEAKTGKLHQEVNLVVMRATQLQKNLTCEVWGPTSPKLMLSLKLENKEAKVSKREKAVWVLNPEAGMWQCLLSDSGQVLLESNIKVLPTWSTPVQPMALIVLGGVAGLLLFIGLGIFFCVRCRHRRRQAERMSQIKRLLSEKKTCQCPHRFQKTCSPI

SEQ ID NO: 5447 - protein, 240 aa, Homo sapiens
MIETYNQTSPRSAATGLPISMKIFMYLLTVFLITQMIGSALFAVYLHRRLDKIEDERNLHEDFVFMKTIQRCNTGERSLSLLNCEEIKSQFEGFVKDIMLNKEETKKENSFEMQKVLQWAEKGYYTMSNNLVTLENGKQLTVKRQGLYYIYAQVTFCSNREASSQAPFIASLCLKSPGRFERILLRAANTHSSAKPCGQQSIHLGGVFELQPGASVFVNVTDPSQVSHGTGFTSFGLLKL

SEQ ID NO: 5448 - protein, 261 aa, Homo sapiens
MIETYNQTSPRSAATGLPISMKIFMYLLTVFLITQMIGSALFAVYLHRRLDKIEDERNLHEDFVFMKTIQRCNTGERSLSLLNCEEIKSQFEGFVKDIMLNKEETKKENSFEMQKGDQNPQIAAHVISEASSKTTSVLQWAEKGYYTMSNNLVTLENGKQLTVKRQGLYYIYAQVTFCSNREASSQAPFIASLCLKSPGRFERILLRAANTHSSAKPCGQQSIHLGGVFELQPGASVFVNVTDPSQVSHGTGFTSFGLLKL

SEQ ID NO: 5449 - protein, 203 aa, Homo sapiens
MVRLPLQCVLWGCLLTAVHPEPPTACREKQYLINSQCCSLCQPGQKLVSDCTEFTETECLPCGESEFLDTWNRETHCHQHKYCDPNLGLRVQQKGTSETDTICTCEEGWHCTSEACESCVLHRSCSPGFGVKQIATGVSDTICEPCPVGFFSNVSSAFEKCHPWTRSPGSAESPGGDPHHLRDPVCHPLGAGLYQKGGQEANQ

SEQ ID NO: 5450 - protein, 261 aa, Homo sapiens
GRSPLRTRDRVLTNWEDGLTVAYGAVKLIQSLSLQPVGWQQNWGLSSPPTMLLPSRAQSPTELPLAPLAEPNTGCSSLLSWHSTRGELHLWALGLGQMGGSKCGSPLSPLAPTLEALRRPWCGQQGAGGTRGISTDPPSGKGGRAWGRDPLPREGLLRGTAAPAAGGDLTPCLSRPPTPSRNPRRSIFPTIFLAPTLLLQCRRLYMDANRSPRRMAKRVASQCRRDSEAAPTQECGHVGKQAVGQRAWCCCCCGVRVRGWH

SEQ ID NO: 5451 - protein, 277 aa, Homo sapiens
MVRLPLQCVLWGCLLTAVHPEPPTACREKQYLINSQCCSLCQPGQKLVSDCTEFTETECLPCGESEFLDTWNRETHCHQHKYCDPNLGLRVQQKGTSETDTICTCEEGWHCTSEACESCVLHRSCSPGFGVKQIATGVSDTICEPCPVGFFSNVSSAFEKCHPWTSCETKDLVVQQAGTNKTDVVCGPQDRLRALVVIPIIFGILFAILLVLVFIKKVAKKPTNKAPHPKQEPQEINFPDDLPGSNTAAPVQETLHGCQPVTQEDGKESRISVQERQ

SEQ ID NO: 5452 - protein, 361 aa, Homo sapiens
MDKFWWHAAWGLCLVPLSLAQIDLNITCRFAGVFHVEKNGRYSISRTEAADLCKAFNSTLPTMAQMEKALSIGFETCRYGFIEGHVVIPRIHPNSICAANNTGVYILTSNTSQYDTYCFNASAPPEEDCTSVTDLPNAFDGPITITIVNRDGTRYVQKGEYRTNPEDIYPSNPTDDDVSSGSSSERSSTSGGYIFYTFSTVHPIPDEDSPWITDSTDRIPATRDQDTFHPSGGSHTTHGSESDGHSHGSQEGGANTTSGPIRTPQIPEWLIILASLLALALILAVCIAVNSRRRCGQKKKLVINSGNGAVEDRKPSGLNGEASKSQEMVHLVNKESSETPDQFMTADETRNLQNVDMKIGV

SEQ ID NO: 5453 - protein, 139 aa, Homo sapiens
MDKFWWHAAWGLCLVPLSLAQIDLNITCRFAGVFHVEKNGRYSISRTEAADLCKAFNSTLPTMAQMEKALSIGFETCSLHCSQQSKKVWAEEKASDQQWQWSCGGQKAKWTQRRGQQVSGNGAFGEQGVVRNSRPVYDS

SEQ ID NO: 5454 - protein, 340 aa, Homo sapiens
MDKFWWHAAWGLCLVPLSLAQIDLNITCRFAGVFHVEKNGRYSISRTEAADLCKAFNSTLPTMAQMEKALSIGFETCRYGFIEGHVVIPRIHPNSICAANNTGVYILTSNTSQYDTYCFNASAPPEEDCTSVTDLPNAFDGPITITIVNRDGTRYVQKGEYRTNPEDIYPSNPTDDDVSSGSSSERSSTSGGYIFYTFSTVHPIPDEDSPWITDSTDRIPATRHSHGSQEGGANTTSGPIRTPQIPEWLIILASLLALALILAVCIAVNSRRRCGQKKKLVINSGNGAVEDRKPSGLNGEASKSQEMVHLVNKESSETPDQFMTADETRNLQNVDMKIGV

SEQ ID NO: 5455 - protein, 396 aa, Homo sapiens
MDKFWWHAAWGLCLVPLSLAQIDLNITCRFAGVFHVEKNGRYSISRTEAADLCKAFNSTLPTMAQMEKALSIGFETCRYGFIEGHVVIPRIHPNSICAANNTGVYILTSNTSQYDTYCFNASAPPEEDCTSVTDLPNAFDGPITITIVNRDGTRYVQKGEYRTNPEDIYPSNPTDDDVSSGSSSERSSTSGGYIFYTFSTVHPIPDEDSPWITDSTDRIPATNMDSSHSITLQPTANPNTGLVEDLDRTGPLSMTTRRDQDTFHPSGGSHTTHGSESDGHSHGSQEGGANTTSGPIRTPQIPEWLIILASLLALALILAVCIAVNSRRRCGQKKKLVINSGNGAVEDRKPSGLNGEASKSQEMVHLVNKESSETPDQFMTADETRNLQNVDMKIGV

SEQ ID NO: 5456 - protein, 699 aa, Homo sapiens
MDKFWWHAAWGLCLVPLSLAQIDLNITCRFAGVFHVEKNGRYSISRTEAADLCKAFNSTLPTMAQMEKALSIGFETCRYGFIEGHVVIPRIHPNSICAANNTGVYILTSNTSQYDTYCFNASAPPEEDCTSVTDLPNAFDGPITITIVNRDGTRYVQKGEYRTNPEDIYPSNPTDDDVSSGSSSERSSTSGGYIFYTFSTVHPIPDEDSPWITDSTDRIPATSTSSNTISAGWEPNEENEDERDRHLSFSGSGIDDDEDFISSTISTTPRAFDHTKQNQDWTQWNPSHSNPEVLLQTTTRMTDVDRNGTTAYEGNWNPEAHPPLIHHEHHEEEETPHSTSTIQATPSSTTEETATQKEQWFGNRWHEGYRQTPKEDSHSTTGTAAASAHTSHPMQGRTTPSPEDSSWTDFFNPISHPMGRGHQAGRRMDMDSSHSITLQPTANPNTGLVEDLDRTGPLSMTTQQSNSQSFSTSHEGLEEDKDHPTTSTLTSSNRNDVTGGRRDPNHSEGSTTLLEGYTSHYPHTKESRTFIPVTSAKTGSFGVTAVTVGDSNSNVNRSLSGDQDTFHPSGGSHTTHGSESDGHSHGSQEGGANTTSGPIRTPQIPEWLIILASLLALALILAVCIAVNSRRRCGQKKKLVINSGNGAVEDRKPSGLNGEASKSQEMVHLVNKESSETPDQFMTADETRNLQNVDMKIGV

SEQ ID NO: 5457 - protein, 80 aa, Homo sapiens
MDKFWWHAAWGLCLVPLSLAQIDLNITCRFAGVFHVEKNGRYSISRTEAADLCKAFNSTLPTMAQMEKALSIGFETCSST

SEQ ID NO: 5458 - protein, 742 aa, Homo sapiens
MDKFWWHAAWGLCLVPLSLAQIDLNITCRFAGVFHVEKNGRYSISRTEAADLCKAFNSTLPTMAQMEKALSIGFETCRYGFIEGHVVIPRIHPNSICAANNTGVYILTSNTSQYDTYCFNASAPPEEDCTSVTDLPNAFDGPITITIVNRDGTRYVQKGEYRTNPEDIYPSNPTDDDVSSGSSSERSSTSGGYIFYTFSTVHPIPDEDSPWITDSTDRIPATTLMSTSATATETATKRQETWDWFSWLFLPSESKNHLHTTTQMAGTSSNTISAGWEPNEENEDERDRHLSFSGSGIDDDEDFISSTISTTPRAFDHTKQNQDWTQWNPSHSNPEVLLQTTTRMTDVDRNGTTAYEGNWNPEAHPPLIHHEHHEEEETPHSTSTIQATPSSTTEETATQKEQWFGNRWHEGYRQTPKEDSHSTTGTAAASAHTSHPMQGRTTPSPEDSSWTDFFNPISHPMGRGHQAGRRMDMDSSHSITLQPTANPNTGLVEDLDRTGPLSMTTQQSNSQSFSTSHEGLEEDKDHPTTSTLTSSNRNDVTGGRRDPNHSEGSTTLLEGYTSHYPHTKESRTFIPVTSAKTGSFGVTAVTVGDSNSNVNRSLSGDQDTFHPSGGSHTTHGSESDGHSHGSQEGGANTTSGPIRTPQIPEWLIILASLLALALILAVCIAVNSRRRCGQKKKLVINSGNGAVEDRKPSGLNGEASKSQEMVHLVNKESSETPDQFMTADETRNLQNVDMKIGV

SEQ ID NO: 5459 - protein, 714 aa, Homo sapiens
MDKFWWHAAWGLCLVPLSLAQIDLNITCRFAGVFHVEKNGRYSISRTEAADLCKAFNSTLPTMAQMEKALSIGFETCRYGFIEGHVVIPRIHPNSICAANNTGVYILTSNTSQYDTYCFNASAPPEEDCTSVTDLPNAFDGPITITIVNRDGTRYVQKGEYRTNPEDIYPSNPTDDDVSSGSSSERSSTSGGYIFYTFSTVHPIPDEDSPWITDSTDRIPATTLMSTSATATETATKRQETWDWFSWLFLPSESKNHLHTTTQMAGTSSNTISAGWEPNEENEDERDRHLSFSGSGIDDDEDFISSTISTTPRAFDHTKQNQDWTQWNPSHSNPEVLLQTTTRMTADVDRNGTTAYEGNWNPEAHPPLIHHEHHEEEETPHSTSTIQATPSSTTEETATQKEQWFGNRWHEGYRQTPKEDSHSTTGTAAASAHTSHPMQGRTTPSPEDSSWTDFFNPISHPMGRGHQAGRRMDMDSSHSITLQPTANPNTGLVEDLDRTGPLSMTTRNRNDVTGGRRDPNHSEGSTTLLEGYTSHYPHTKESRTFIPVTSAKTGSFGVTAVTVGDSNSNVNRSLSGDQDTFHPSGGSHTTHGSESDGHSHGSQEGGANTTSGPIRTPQIPEWLIILASLLALALILAVCIAVNSRRRCGQKKKLVINSGNGAVEDRKPSGLNGEASKSQEMVHLVNKESSETPDQFMTADETRNLQNVDMKIGV

SEQ ID NO: 5460 - protein, 493 aa, Homo sapiens
MDKFWWHAAWGLCLVPLSLAQIDLNITCRFAGVFHVEKNGRYSISRTEAADLCKAFNSTLPTMAQMEKALSIGFETCRYGFIEGHVVIPRIHPNSICAANNTGVYILTSNTSQYDTYCFNASAPPEEDCTSVTDLPNAFDGPITITIVNRDGTRYVQKGEYRTNPEDIYPSNPTDDDVSSGSSSERSSTSGGYIFYTFSTVHPIPDEDSPWITDSTDRIPATNMDSSHSITLQPTANPNTGLVEDLDRTGPLSMTTQQSNSQSFSTSHEGLEEDKDHPTTSTLTSSNRNDVTGGRRDPNHSEGSTTLLEGYTSHYPHTKESRTFIPVTSAKTGSFGVTAVTVGDSNSNVNRSLSGDQDTFHPSGGSHTTHGSESDGHSHGSQEGGANTTSGPIRTPQIPEWLIILASLLALALILAVCIAVNSRRRCGQKKKLVINSGNGAVEDRKPSGLNGEASKSQEMVHLVNKESSETPDQFMTADETRNLQNVDMKIGV

SEQ ID NO: 5461 - protein, 429 aa, Homo sapiens
MDKFWWHAAWGLCLVPLSLAQIDLNITCRFAGVFHVEKNGRYSISRTEAADLCKAFNSTLPTMAQMEKALSIGFETCRYGFIEGHVVIPRIHPNSICAANNTGVYILTSNTSQYDTYCFNASAPPEEDCTSVTDLPNAFDGPITITIVNRDGTRYVQKGEYRTNPEDIYPSNPTDDDVSSGSSSERSSTSGGYIFYTFSTVHPIPDEDSPWITDSTDRIPATNRNDVTGGRRDPNHSEGSTTLLEGYTSHYPHTKESRTFIPVTSAKTGSFGVTAVTVGDSNSNVNRSLSGDQDTFHPSGGSHTTHGSESDGHSHGSQEGGANTTSGPIRTPQIPEWLIILASLLALALILAVCIAVNSRRRCGQKKKLVINSGNGAVEDRKPSGLNGEASKSQEMVHLVNKESSETPDQFMTADETRNLQNVDMKIGV

SEQ ID NO: 5462 - protein, 674 aa, Homo sapiens
MDKFWWHAAWGLCLVPLSLAQIDLNITCRFAGVFHVEKNGRYSISRTEAADLCKAFNSTLPTMAQMEKALSIGFETCRYGFIEGHVVIPRIHPNSICAANNTGVYILTSNTSQYDTYCFNASAPPEEDCTSVTDLPNAFDGPITITIVNRDGTRYVQKGEYRTNPEDIYPSNPTDDDVSSGSSSERSSTSGGYIFYTFSTVHPIPDEDSPWITDSTDRIPATTLMSTSATATETATKRQETWDWFSWLFLPSESKNHLHTTTQMAGTSSNTISAGWEPNEENEDERDRHLSFSGSGIDDDEDFISSTISTTPRAFDHTKQNQDWTQWNPSHSNPEVLLQTTTRMTDVDRNGTTAYEGNWNPEAHPPLIHHEHHEEEETPHSTSTIQATPSSTTEETATQKEQWFGNRWHEGYRQTPKEDSHSTTGTAAASAHTSHPMQGRTTPSPEDSSWTDFFNPISHPMGRGHQAGRRMDMDSSHSITLQPTANPNTGLVEDLDRTGPLSMTTQQSNSQSFSTSHEGLEEDKDHPTTSTLTSSRDQDTFHPSGGSHTTHGSESDGHSHGSQEGGANTTSGPIRTPQIPEWLIILASLLALALILAVCIAVNSRRRCGQKKKLVINSGNGAVEDRKPSGLNGEASKSQEMVHLVNKESSETPDQFMTADETRNLQNVDMKIGV

SEQ ID NO: 5463 - protein, 699 aa, Homo sapiens
MDKFWWHAAWGLCLVPLSLAQIDLNITCRFAGVFHVEKNGRYSISRTEAADLCKAFNSTLPTMAQMEKALSIGFETCRYGFIEGHVVIPRIHPNSICAANNTGVYILTSNTSQYDTYCFNASAPPEEDCTSVTDLPNAFDGPITITIVNRDGTRYVQKGEYRTNPEDIYPSNPTDDDVSSGSSSERSSTSGGYIFYTFSTVHPIPDEDSPWITDSTDRIPATTLMSTSATATETATKRQETWDWFSWLFLPSESKNHLHTTTQMAGTSSNTISAGWEPNEENEDERDRHLSFSGSGIDDDEDFISSTISTTPRAFDHTKQNQDWTQWNPSHSNPEVLLQTTTRMTDVDRNGTTAYEGNWNPEAHPPLIHHEHHEEEETPHSTSTTASAHTSHPMQGRTTPSPEDSSWTDFFNPISHPMGRGHQAGRRMDMDSSHSITLQPTANPNTGLVEDLDRTGPLSMTTQQSNSQSFSTSHEGLEEDKDHPTTSTLTSSNRNDVTGGRRDPNHSEGSTTLLEGYTSHYPHTKESRTFIPVTSAKTGSFGVTAVTVGDSNSNVNRSLSGDQDTFHPSGGSHTTHGSESDGHSHGSQEGGANTTSGPIRTPQIPEWLIILASLLALALILAVCIAVNSRRRCGQKKKLVINSGNGAVEDRKPSGLNGEASKSQEMVHLVNKESSETPDQFMTADETRNLQNVDMKIGV

SEQ ID NO: 5464 - protein, 78 aa, Homo sapiens
MDKFWWHAAWGLCLVPLSLAQIDLNITCRFAGVFHVEKNGRYSISRTEAADLCKAFNSTLPTMAQMEKALSIGFETCR

SEQ ID NO: 5465 - protein, 294 aa, Homo sapiens
  VARIANT 1: note = MOD_RES - Any amino acid
XDKFWWHAAWGLCLVPLSLAQIDLNITCRFAGVFHVEKNGRYSISRTEAADLCKAFNSTLPTMAQMEKALSIGFETCRYGFIEGHVVIPRIHPNSICAANNTGVYILTSNTSQYDTYCFNASAPPEEDCTSVTDLPNAFDGPITITIVNRDGTRYVQKGEYRTNPEDIYPSNPTDDDVSSGSSSERSSTSGGYIFYTFSTVHPIPDEDSPWITDSTDRIPATRDQDTFHPSGGSHTTHGSESDGHSHGSQEGGANTTSGPIRTPQIPEWLIILASLLALALILAVCIAVNSRRS

SEQ ID NO: 5466 - protein, 305 aa, Homo sapiens
MWPLVAALLLGSACCGSAQLLFNKTKSVEFTFCNDTVVIPCFVTNMEAQNTTEVYVKWKFKGRDIYTFDGALNKSTVPTDFSSAKIEVSQLLKGDASLKMDKSDAVSHTGNYTCEVTELTREGETIIELKYRVVSWFSPNENILIVIFPIFAILLFWGQFGIKTLKYRSGGMDEKTIALLVAGLVITVIVIVGAILFVPGEYSLKNATGLGLIVTSTGILILLHYYVFSTAIGLTSFVIAILVIQVIAYILAVVGLSLCIAACIPMHGPLLISGLSILALAQLLGLVYMKFVASNQKTIQPPRNN

SEQ ID NO: 5467 - protein, 323 aa, Homo sapiens
MWPLVAALLLGSACCGSAQLLFNKTKSVEFTFCNDTVVIPCFVTNMEAQNTTEVYVKWKFKGRDIYTFDGALNKSTVPTDFSSAKIEVSQLLKGDASLKMDKSDAVSHTGNYTCEVTELTREGETIIELKYRVVSWFSPNENILIVIFPIFAILLFWGQFGIKTLKYRSGGMDEKTIALLVAGLVITVIVIVGAILFVPGEYSLKNATGLGLIVTSTGILILLHYYVFSTAIGLTSFVIAILVIQVIAYILAVVGLSLCIAACIPMHGPLLISGLSILALAQLLGLVYMKFVASNQKTIQPPRKAVEEPLNAFKESKGMMNDE

SEQ ID NO: 5468 - protein, 495 aa, Homo sapiens
MPMGSLQPLATLYLLGMLVASCLGRLSWYDPDFQARLTRSNSKCQGQLEVYLKDGWHMVCSQSWGRSSKQWEDPSQASKVCQRLNCGVPLSLGPFLVTYTPQSSIICYGQLGSFSNCSHSRNDMCHSLGLTCLEPQKTTPPTTRPPPTTTPEPTAPPRLQLVAQSGGQHCAGVVEFYSGSLGGTISYEAQDKTQDLENFLCNNLQCGSFLKHLPETEAGRAQDPGEPREHQPLPIQWKIQNSSCTSLEHCFRKIKPQKSGRVLALLCSGFQPKVQSRLVGGSSICEGTVEVRQGAQWAALCDSSSARSSLRWEEVCREQQCGSVNSYRVLDAGDPTSRGLFCPHQKLSQCHELWERNSYCKKVFVTCQDPNPAGLAAGTVASIILALVLLVVLLVVCGPLAYKKLVKKFRQKKQRQWIGPTGMNQNMSFHRNHTATVRSHAENPTASHVDNEYSQPPRNSHLSAYPALEGALHRSSMQPDNSSDSDYDLHGAQRL

SEQ ID NO: 5469 - protein, 193 aa, Homo sapiens
MPEEGSGCSVRRRPYGCVLRAALVPLVAGLVICLVVCIQRFAQAQQQLPLESLGWDVAELQLNHTGPQQDPRLYWQGGPALGRSFLHGPELDKGQLRIHRDGIYMVHIQVTLAICSSTTASRHHPTTLAVGICSPASRSISLLRLSFHQGCTIASQRLTPLARGDTLCTNLTGTLLPSRNTDETFFGVQWVRP

SEQ ID NO: 5470 - protein, 208 aa, Homo sapiens
MPEEGSGCSVRRRPYGCVLRAALVPLVAGLVICLVVCIQRFAQAQQQLPLESLGWDVAELQLNHTGPQQDPRLYWQGGPALGRSFLHGPELDKGQLRIHRDGIYMVHIQVTLAICSSTTASRHHPTTLAVGICSPASRSISLLRLSFHQGLFGFWNWGLKVKCFLRHLIWTAHCFIPLTQLVFMQALQSWRNHHCSHFTDEENRGVNR

SEQ ID NO: 5471 - protein, 226 aa, Homo sapiens
MPGGPGVLQALPATIFLLFLLSAVYLGPGCQALWMHKVPASLMVSLGEDAHFQCPHNSSNNANVTWWRVLHGNYTWPPEFLGPGEDPNGTLIIQNVNKSHGGIYVCRVQEGNESYQQSCGTYLRVRQPPPRPFLDMGEGTKNRIITAEGIILLFCAVVPGTLLLFRKRWQNEKLGLDAGDEYEDENLYEGLNLDDCSMYEDISRGLQGTYQDVGSLNIGDVQLEKP

SEQ ID NO: 5472 - protein, 188 aa, Homo sapiens
MPGGPGVLQALPATIFLLFLLSAVYLGPGCQALWMHKVPASLMVSLGEDAHFQCPHNSSNNANVTWWRVLHGNYTWPPEFLGPGEDPNEPPPRPFLDMGEGTKNRIITAEGIILLFCAVVPGTLLLFRKRWQNEKLGLDAGDEYEDENLYEGLNLDDCSMYEDISRGLQGTYQDVGSLNIGDVQLEKP

SEQ ID NO: 5473 - protein, 288 aa, Homo sapiens
MGHTRRQGTSPSKCPYLNFFQLLVLAGLSHFCSGVIHVTKEVKEVATLSCGHNVSVEELAQTRIYWQKEKKMVLTMMSGDMNIWPEYKNRTIFDITNNLSIVILALRPSDEGTYECVVLKYEKDAFKREHLAEVTLSVKADFPTPSISDFEIPTSNIRRIICSTSGGFPEPHLSWLENGEELNAINTTVSQDPETELYAVSSKLDFNMTTNHSFMCLIKYGHLRVNQTFNWNTTKQEHFPDNLLPSWAITLISVNGIFVICCLTYCFAPRCRERRRNERLRRESVRPV

SEQ ID NO: 5474 - protein, 162 aa, Homo sapiens
MGHTRRQGTSPSKCPYLNFFQLLVLAGLSHFCSGVIHVTKEVKEVATLSCGHNVSVEELAQTRIYWQKEKKMVLTMMSGDMNIWPEYKNRTIFDITNNLSIVILALRPSDEGTYECVVLKYEKDAFKREHLAEVTLSVKGFAPRCRERRRNERLRRESVRPV

SEQ ID NO: 5475 - protein, 256 aa, Homo sapiens
MGHTRRQGTSPSKCPYLNFFQLLVLAGLSHFCSGVIHVTKEVKEVATLSCGHNVSVEELAQTRIYWQKEKKMVLTMMSGDMNIWPEYKNRTIFDITNNLSIVILALRPSDEGTYECVVLKYEKDAFKREHLAEVTLSVKADFPTPSISDFEIPTSNIRRIICSTSGGFPEPHLSWLENGEELNAINTTVSQDPETELYAVSSKLDFNMTTNHSFMCLIKYGHLRVNQTFNWNTSFAPRCRERRRNERLRRESVRPV

SEQ ID NO: 5476 - protein, 288 aa, Homo sapiens; identical to SEQ ID NO: 5473

SEQ ID NO: 5477 - protein, 267 aa, Homo sapiens
MGSACIKVTKYFLFLFNLIFFILGAVILGFGVWILADKSSFISVLQTSSSSLRMGAYVFIGVGAVTMLMGFLGCIGAVNEVRCLLGLYFAFLLLILIAQVTAGALFYFNMGKLKQEMGGIVTELIRDYNSSREDSLQDAWDYVQAQVKCCGWVSFYNWTDNAELMNRPEVTYPCSCEVKGEEDNSLSVRKGFCEAPGNRTQSGNHPEDWPVYQEGCMEKVQAWLQENLGIILGVGVGVAIIELLGMVLSICLCRHVHSEDYSKVPKY

SEQ ID NO: 5478 - protein, 242 aa, Homo sapiens
MGSACIKVTKYFLFLFNLIFFILGAVILGFGVWILADKSSFISVLQTSSSSLRMGAYVFIGVGAVTMLMGFLGCIGAVNEVRCLLGLLKQEMGGIVTELIRDYNSSREDSLQDAWDYVQAQVKCCGWVSFYNWTDNAELMNRPEVTYPCSCEVKGEEDNSLSVRKGFCEAPGNRTQSGNHPEDWPVYQEGCMEKVQAWLQENLGIILGVGVGVAIIELLGMVLSICLCRHVHSEDYSKVPKY

SEQ ID NO: 5479 - protein, 68 aa, Homo sapiens
MGSACIKVTKYFLFLFNLIFFILGAVILGFGVWILADKSSFISVLQTSSSSLRMGAYVFIGVGAVTML

SEQ ID NO: 5480 - protein, 38 aa, Homo sapiens
MGSACIKVTKYFLFLFNLIFFILGAVILGFGVWILADK

SEQ ID NO: 5481 - protein, 105 aa, Homo sapiens
MGSACIKVTKYFLFLFNLIFFILGAVILGFGVWILADKSSFISVLQTSSSSLRMGAYVFIGVGAVTMLMGFLGCIGAVNEVRCLLGLYFAFLLLILIAQVTAGAL

SEQ ID NO: 5482 - protein, 108 aa, Homo sapiens
MGSACIKVTKYFLFLFNLIFFILGAVILGFGVWILADKSSFISVLQTSSSSLRMGAYVFIGVGAVTMLMGFLGCIGAVNEVRCLLGLYFAFLLLILIAQVTAGALFYF

SEQ ID NO: 5483 - protein, 235 aa, Homo sapiens
MALPVTALLLPLALLLHAARPSQFRVSPLDRTWNLGETVELKCQVLLSNPTSGCSWLFQPRGAAASPTFLLYLSQNKPKAAEGLDTQRFSGKRLGDTFVLTLSDFRRENEGYYFCSALSNSIMYFSHFVPVFLPAKPTTTPAPRPPTPAPTIASQPLSLRPEACRPAAGGAVHTRGLDFACDIYIWAPLAGTCGVLLLSLVITLYCNHRNRRRVCKCPRPVVKSGDKPSLSARYV

SEQ ID NO: 5484 - protein, 198 aa, Homo sapiens
MALPVTALLLPLALLLHAARPSQFRVSPLDRTWNLGETVELKCQVLLSNPTSGCSWLFQPRGAAASPTFLLYLSQNKPKAAEGLDTQRFSGKRLGDTFVLTLSDFRRENEGYYFCSALSNSIMYFSHFVPVFLPAKPTTTPAPRPPTPAPTIASQPLSLRPEACRPAAGGAGNRRRVCKCPRPVVKSGDKPSLSARYV

SEQ ID NO: 5485 - protein, 235 aa, Homo sapiens; identical to SEQ ID NO: 5483

SEQ ID NO: 5486 - protein, 198 aa, Homo sapiens
MALPVTALLLPLALLLHAARPSQFRVSPLDRTWNLGETVELKCQVLLSNPTSGCSWLFQPRGAAASPTFLLYLSQNKPKAAEGLDTQRFSGKRLGDTFVLTLSDFRRENEGYYFCSALSNSIMYFSHFVPVFLPVHTRGLDFACDIYIWAPLAGTCGVLLLSLVITLYCNHRNRRRVCKCPRPVVKSGDKPSLSARYV

SEQ ID NO: 5487 - protein, 220 aa, Homo sapiens
MALPVTALLLPLALLLHAARPSQFRVSPLDRTWNLGETVELKCQVLLSNPTSGCSWLFQPRGAAASPTFLLYLSQNKPKAAEGLDTLSDFRRENEGYYFCSALSNSIMYFSHFVPVFLPAKPTTTPAPRPPTPAPTIASQPLSLRPEACRPAAGGAVHTRGLDFACDIYIWAPLAGTCGVLLLSLVITLYCNHRNRRRVCKCPRPVVKSGDKPSLSARYV

SEQ ID NO: 5488 - protein, 198 aa, Homo sapiens; identical to SEQ ID NO: 5484

SEQ ID NO: 5489 - protein, 276 aa, Homo sapiens
MRNQAPGRPKGATFPPRRPTGSRAPPLAPELRAKQRPGERVMALPVTALLLPLALLLHAARPSQFRVSPLDRTWNLGETVELKCQVLLSNPTSGCSWLFQPRGAAASPTFLLYLSQNKPKAAEGLDTQRFSGKRLGDTFVLTLSDFRRENEGYYFCSALSNSIMYFSHFVPVFLPAKPTTTPAPRPPTPAPTIASQPLSLRPEACRPAAGGAVHTRGLDFACDIYIWAPLAGTCGVLLLSLVITLYCNHRNRRRVCKCPRPVVKSGDKPSLSARYV

SEQ ID NO: 5490 - protein, 79 aa, Homo sapiens [sequence omitted]

SEQ ID NO: 5491 - protein, 67 aa, Homo sapiens
MSHKQIYYSDKYDDEEFEYRHVMLPKDIAKLVPKTHLMSESEWRNLGVQQSQGWVHYMIHEPGQCTG

SEQ ID NO: 5492 - protein, 63 aa, Homo sapiens
MRTRHVMLPKDIAKLVPKTHLMSESEWRNLGVQQSQGWVHYMIHEPEPHILLFRRPLPKKPKK

SEQ ID NO: 5493 - protein, 79 aa, Homo sapiens
MAHKQIYYSDKYFDEHYEYRHVMLPRELSKQVPKTHLMSEEEWRRLGVQQSLGWVHYMIHEPEPHILLFRRPLPKDQQK

SEQ ID NO: 5494 - protein, 510 aa, Homo sapiens
MHPLQCVLQVQRSLGWGPLASVSWLSLRMCRAHSSLSSTMCPSPERQEDGARKDFSSRLAAGPTFQHFLKSASAPQEKLSSEVEDPPPYLMMDELLGRQRKVYLETYGCQMNVNDTEIAWSILQKSGYLRTSNLQEADVILLVTCSIREKAEQTIWNRLHQLKALKTRRPRSRVPLRIGILGCMAERLKEEILNREKMVDILAGPDAYRDLPRLLAVAESGQQAANVLLSLDETYADVMPVQTSASATSAFVSIMRGCDNMCSYCIVPFTRGRERSRPIASILEEVKKLSEQVLQLIHERDNICKQIHLPAQSGSSRVLEAMRRGYSREAYVELVHHIRESIPGVSLSSDFIAGFCGETEEDHVQTVSLLREVQYNMGFLFAYSMRQKTRAYHRLKDDVPEEVKLRRLEELITIFREEATKANQTSVGCTQLVLVEGLSKRSATDLCGRNDGNLKVIFPDAEMEDVNNPGLRVRAQPGDYVLVKITSASSQTLRGHVLCRTTLRDSSAYC

SEQ ID NO: 5495 - protein, 587 aa, Homo sapiens
MHPLQCVLQVQRSLGWGPLASVSWLSLRMCRAHSSLSSTMCPSPERQEDGARKDFSSRLAAGPTFQHFLKSASAPQEKLSSEVEDPPPYLMMDELLGRQRKVYLETYGCQMNVNDTEIAWSILQKSGYLRTSNLQEADVILLVTCSIREKAEQTIWNRLHQLKALKTRRPRSRVPLRIGILGCMAERLKEEILNREKMVDILAGPDAYRDLPRLLAVAESGQQAANVLLSLDETYADVMPVQTSASATSAFVSIMRGCDNMCSYCIVPFTRGRERSRPIASILEEVKKLSEQGLKEVTLLGQNVNSFRDNSEVQFNSAVPTNLSRGFTTNYKTKQGGLRFAHLLDQVSRVDPEMRIRFTSPHPKDFPDEVLQLIHERDNICKQIHLPAQSGSSRVLEAMRRGYSREAYVELVHHIRESIPGVSLSSDFIAGFCGETEEDHVQTVSLLREVQYNMGFLFAYSMRQKTRAYHRLKDDVPEEVKLRRLEELITIFREEATKANQTSVGCTQLVLVEGLSKRSATDLCGRNDGNLKVIFPDAEMEDVNNPGLRVRAQPGDYVLVKITSASSQTLRGHVLCRTTLRDSSAYC

SEQ ID NO: 5496 - protein, 601 aa, Homo sapiens
MHPLQCVLQVQRSLGWGPLASVSWLSLRMCRAHSSLSSTMCPSPERQEDGARKDFSSRLAAGPTFQHFLKSASAPQEKLSSEVEDPPPYLMMDELLGRQRKVYLETYGCQMNVNDTEIAWSILQKSGYLRTSNLQEADVILLVTCSIREKAEQTIWNRLHQLKALKTRRPRSRVPLRIGILGCMAERLKEEILNREKMVDILAGPDAYRDLPRLLAVAESGQQAANVLLSLDETYADVMPVQTSASATSAFVSIMRGCDNMCSYCIVPFTRGRERSRPIASILEEVKKLSEQVFLPPRPPKVLGLQGLKEVTLLGQNVNSFRDNSEVQFNSAVPTNLSRGFTTNYKTKQGGLRFAHLLDQVSRVDPEMRIRFTSPHPKDFPDEVLQLIHERDNICKQIHLPAQSGSSRVLEAMRRGYSREAYVELVHHIRESIPGVSLSSDFIAGFCGETEEDHVQTVSLLREVQYNMGFLFAYSMRQKTRAYHRLKDDVPEEVKLRRLEELITIFREEATKANQTSVGCTQLVLVEGLSKRSATDLCGRNDGNLKVIFPDAEMEDVNNPGLRVRAQPGDYVLVKITSASSQTLRGHVLCRTTLRDSSAYC

SEQ ID NO: 5497 - protein, 327 aa, Homo sapiens
MNVNDTEIAWSILQKSGYLRTSNLQEADVILLVTCSIREKAEQTIWNRLHQLKALKTRRPRSRVPLRIGILGCMAERLKEEILNREKMVDILAGPDAYRDLPRLLAVAESGQQAANVLLSLDETYADVMPVQTSASATSAFVYSREAYVELVHHIRESIPGVSLSSDFIAGFCGETEEDHVQTVSLLREVQYNMGFLFAYSMRQKTRAYHRLKDDVPEEVKLRRLEELITIFREEATKANQTSVGCTQLVLVEGLSKRSATDLCGRNDGNLKVIFPDAEMEDVNNPGLRVRAQPGDYVLVKITSASSQTLRGHVLCRTTLRDSSAYC

SEQ ID NO: 5498 - protein, 497 aa, Homo sapiens
MMDELLGRQRKVYLETYGCQMNVNDTEIAWSILQKSGYLRTSNLQEADVILLVTCSIREKAEQTIWNRLHQLKALKTRRPRSRVPLRIGILGCMAERLKEEILNREKMVDILAGPDAYRDLPRLLAVAESGQQAANVLLSLDETYADVMPVQTSASATSAFVSIMRGCDNMCSYCIVPFTRGRERSRPIASILEEVKKLSEQGLKEVTLLGQNVNSFRDNSEVQFNSAVPTNLSRGFTTNYKTKQGGLRFAHLLDQVSRVDPEMRIRFTSPHPKDFPDEVLQLIHERDNICKQIHLPAQSGSSRVLEAMRRGYSREAYVELVHHIRESIPGVSLSSDFIAGFCGETEEDHVQTVSLLREVQYNMGFLFAYSMRQKTRAYHRLKDDVPEEVKLRRLEELITIFREEATKANQTSVGCTQLVLVEGLSKRSATDLCGRNDGNLKVIFPDAEMEDVNNPGLRVRAQPGDYVLVKITSASSQTLRGHVLCRTTLRDSSAYC

SEQ ID NO: 5499 - protein, 426 aa, Homo sapiens
MHPLQCVLQVQRSLGWGPLASVSWLSLRMCRAHSSLSSTMCPSPERQEDGARKDFSSRLAAGPTFQHFLKSASAPQEKLSSEVEDPPPYLMMDELLGRQRKVYLETYGCQMNVNDTEIAWSILQKSGYLRTSNLQEADVILLVTCSIREKAEQTIWNRLHQLKALKTRRPRSRVPLRIGILGCMAERLKEEILNREKMVDILAGPDAYRDLPRLLAVAESGQQAANVLLSLDETYADVMPVQTSASATSAFVSIMRGCDNMCSYCIVPFTRGRERSRPIASILEEVKKLSEQGLKEVTLLGQNVNSFRDNSEVQFNSAVPTNLSRGFTTNYKTKQGGLRFAHLLDQVSRVDPEMRIRFTSPHPKDFPDEVLQLIHERDNICKQIHLPAQSGSSRVLEAMRRGYSREAYVELVHHIRESIPEDTGIS

SEQ ID NO: 5500 - protein, 373 aa, Homo sapiens
GDGQNLFTKDVTVIEGEVATISCQVNKSDDSVIQLLNPNRQTIYFRDFRPLKDSRFQLLNFSSSELKVSLTNVSISDEGRYFCQLYTDPPQESYTTITVLVPPRNLMIDIQKDTAVEGEEIEVNCTAMASKPATTIRWFKGNTELKGKSEVEEWSDMYTVTSQLMLKVHKEDDGVPVICQVEHPAVTGNLQTQRYLEVQYKPQVHIQMTYPLQGLTREGDALELTCEAIGKPQPVMVTWVRVDDEMPQHAVLSGPNLFINNLNKTDNGTYRCEASNIVGKAHSDYMLYVYDSRAGEEGSIRAVDHAVIGGVVAVVVFAMLCLLIILGRYFARHKGTYFTHEAKGADDAADADTAIINAEGGQNNSEEKKEYFI

SEQ ID NO: 5501 - protein, 442 aa, Homo sapiens
MASVVLPSGSQCAAAAAAAAPPGLRLRLLLLLFSAAALIPTGDGQNLFTKDVTVIEGEVATISCQVNKSDDSVIQLLNPNRQTIYFRDFRPLKDSRFQLLNFSSSELKVSLTNVSISDEGRYFCQLYTDPPQESYTTITVLVPPRNLMIDIQKDTAVEGEEIEVNCTAMASKPATTIRWFKGNTELKGKSEVEEWSDMYTVTSQLMLKVHKEDDGVPVICQVEHPAVTGNLQTQRYLEVQYKPQVHIQMTYPLQGLTREGDALELTCEAIGKPQPVMVTWVRVDDEMPQHAVLSGPNLFINNLNKTDNGTYRCEASNIVGKAHSDYMLYVYDPPTTIPPPTTTTTTTTTTTTTILTIITDSRAGEEGSIRAVDHAVIGGVVAVVVFAMLCLLIILGRYFARHKGTYFTHEAKGADDAADADTAIINAEGGQNNSEEKKEYFI

SEQ ID NO: 5502 - protein, 127 aa, Homo sapiens
MLYVYDPPTTIPPPTTTTTTTTTTTTTILTIITDTTATTEPAVHDSRAGEEGSIRAVDHAVIGGVVAVVVFAMLCLLIILGRYFARHKGTYFTHEAKGADDAADADTAIINAEGGQNNSEEKKEYFI

SEQ ID NO: 5503 - protein, 414 aa, Homo sapiens
MASVVLPSGSQCAAAAAAAAPPGLRLRLLLLLFSAAALIPTGDGQNLFTKDVTVIEGEVATISCQVNKSDDSVIQLLNPNRQTIYFRDFRPLKDSRFQLLNFSSSELKVSLTNVSISDEGRYFCQLYTDPPQESYTTITVLVPPRNLMIDIQKDTAVEGEEIEVNCTAMASKPATTIRWFKGNTELKGKSEVEEWSDMYTVTSQLMLKVHKEDDGVPVICQVEHPAVTGNLQTQRYLEVQYKPQVHIQMTYPLQGLTREGDALELTCEAIGKPQPVMVTWVRVDDEMPQHAVLSGPNLFINNLNKTDNGTYRCEASNIVGKAHSDYMLYVYDSRAGEEGSIRAVDHAVIGGVVAVVVFAMLCLLIILGRYFARHKGTYFTHEAKGADDAADADTAIINAEGGQNNSEEKKEYFI

SEQ ID NO: 5504 - protein, 388 aa, Homo sapiens
MGRARRFQWPLLLLWAAAAGPGAGQEVQTENVTVAEGGVAEITCRLHQYDGSIVVIQNPARQTLFFNGTRALKDERFQLEEFSPRRVRIRLSDARLEDEGGYFCQLYTEDTHHQIATLTVLVAPENPVVEVREQAVEGGEVELSCLVPRSRPAATLRWYRDRKELKGVSSSQENGKVWSVASTVRFRVDRKDDGGIIICEAQNQALPSGHSKQTQYVLDVQYSPTARIHASQAVVREGDTLVLTCAVTGNPRPNQIRWNRGNESLPERAEAVGETLTLPGLVSADNGTYTCEASNKHGHARALYVLVVYDPGAVVEAQTSVPYAIVGGILALLVFLIICVLVGMVWCSVRQKGSYLTHEASGLDEQGEAREAFLNGSDGHKRKEEFFI

SEQ ID NO: 5505 - protein, 219 aa, Homo sapiens
MEAARDYAGALIRPLTFMGSQTKRVLFTPLMHPARPFRVSNHDRSSRRGVMASSLQELISKTLDALVIATGLVTLVLEEDGTVVDTEEFFQTLGDNTHFMILEKGQKWMPGSQHVPTCSPPKRSGIARVTFDLYRLNPKDFIGCLNVKATMYEMYSVSYDIRCTGLKGLLRSLLRFLSYSAQVTGQFLIYLGTYMLRVLDDKEERPSLRSQAKGRFTCG

SEQ ID NO: 5506 - protein, 219 aa, Homo sapiens
MEYLSALNPSDLLRSVSNISSEFGRRVWTSAPPPQRPFRVCDHKRTIRKGLTAATRQELLAKALETLLLNGVLTLVLEEDGTAVDSEDFFQLLEDDTCLMVLQSGQSWSPTRSGVLSYGLGRERPKHSKDIARFTFDVYKQNPRDLFGSLNVKATFYGLYSMSCDFQGLGPKKVLRELLRWTSTLLQGLGHMLLGISSTLRHAVEGAEQWQQKGRLHSY

SEQ ID NO: 5507 - protein, 219 aa, Homo sapiens; identical to SEQ ID NO: 5506

SEQ ID NO: 5508 - protein, 219 aa, Homo sapiens; identical to SEQ ID NO: 5506

SEQ ID NO: 5509 - protein, 219 aa, Homo sapiens; identical to SEQ ID NO: 5506

SEQ ID NO: 5510 - protein, 619 aa, Homo sapiens
MNLERLRKRVRQYLDQQQYQSALFWADKVASLSREPQDIYWLAQCLYLTAQYHRAAHALRSRKLDKLYEACRYLAARCHYAAKEHQQALDVLDMEEPINKRLFEKYLKDESGFKDPSSDWEMSQSSIKSSICLLRGKIYDALDNRTLATYSYKEALKLDVYCFEAFDLLTSHHMLTAQEEKELLESLPLSKLCNEEQELLRFLFENKLKKYNKPSETVIPESVDGLQENLDVVVSLAERHYYNCDFKMCYKLTSVVMEKDPFHASCLPVHIGTLVELNKANELFYLSHKLVDLYPSNPVSWFAVGCYYLMVGHKNEHARRYLSKATTLEKTYGPAWIAYGHSFAVESEHDQAMAAYFTAAQLMKGCHLPMLYIGLEYGLTNNSKLAERFFSQALSIAPEDPFVMHEVGVVAFQNGEWKTAEKWFLDALEKIKAIGNEVTVDKWEPLLNNLGHVCRKLKKYAEALDYHRQALVLIPQNASTYSAIGYIHSLMGNFENAVDYFHTALGLRRDDTFSVTMLGHCIEMYIGDSEAYIGADIKDKLKCYDFDVHTMKTLKNIISPPWDFREFEVEKQTAEETGLTPLETSRKTPDSRPSLEETFEIEMNESDMMLETSMSDHST

SEQ ID NO: 5511 - protein, 475 aa, Homo sapiens
MEEPINKRLFEKYLKDESGFKDPSSDWEMSQSSIKSSICLLRGKIYDALDNRTLATYSYKEALKLDVYCFEAFDLLTSHHMLTAQEEKELLESLPLSKLCNEEQELLRFLFENKLKKYNKPSETVIPESVDGLQENLDVVVSLAERHYYNCDFKMCYKLTSVVMEKDPFHASCLPVHIGTLVELNKANELFYLSHKLVDLYPSNPVSWFAVGCYYLMVGHKNEHARRYLSKATTLEKTYGPAWIAYGHSFAVESEHDQAMAAYFTAAQLMKGWKTAEKWFLDALEKIKAIGNEVTVDKWEPLLNNLGHVCRKLKKYAEALDYHRQALVLIPQNASTYSAIGYIHSLMGNFENAVDYFHTALGLRRDDTFSVTMLGHCIEMYIGDSEAYIGADIKDKLKCYDFDVHTMKTLKNIISPPWDFREFEVEKQTAEETGLTPLETSRKTPDSRPSLEETFEIEMNESDMMLETSMSDHST

SEQ ID NO: 5512 - protein, 620 aa, Homo sapiens
MNLERLRKRVRQYLDQQQYQSALFWADKVASLSREEPQDIYWLAQCLYLTAQYHRAAHALRSRKLDKLYEACRYLAARCHYAAKEHQQALDVLDMEEPINKRLFEKYLKDESGFKDPSSDWEMSQSSIKSSICLLRGKIYDALDNRTLATYSYKEALKLDVYCFEAFDLLTSHHMLTAQEEKELLESLPLSKLCNEEQELLRFLFENKLKKYNKPSETVIPESVDGLQENLDVVVSLAERHYYNCDFKMCYKLTSVVMEKDPFHASCLPVHIGTLVELNKANELFYLSHKLVDLYPSNPVSWFAVGCYYLMVGHKNEHARRYLSKATTLEKTYGPAWIAYGHSFAVESEHDQAMAAYFTAAQLMKGCHLPMLYIGLEYGLTNNSKLAERFFSQALSIAPEDPFVMHEVGVVAFQNGEWKTAEKWFLDALEKIKAIGNEVTVDKWEPLLNNLGHVCRKLKKYAEALDYHRQALVLIPQNASTYSAIGYIHSLMGNFENAVDYFHTALGLRRDDTFSVTMLGHCIEMYIGDSEAYIGADIKDKLKCYDFDVHTMKTLKNIISPPWDFREFEVEKQTAEETGLTPLETSRKTPDSRPSLEETFEIEMNESDMMLETSMSDHST

SEQ ID NO: 5513 - protein, 620 aa, Homo sapiens; identical to SEQ ID NO: 5512

SEQ ID NO: 5514 - protein, 526 aa, Homo sapiens
MEEPINKRLFEKYLKDESGFKDPSSDWEMSQSSIKSSICLLRGKIYDALDNRTLATYSYKEALKLDVYCFEAFDLLTSHHMLTAQEEKELLESLPLSKLCNEEQELLRFLFENKLKKYNKPSETVIPESVDGLQENLDVVVSLAERHYYNCDFKMCYKLTSVVMEKDPFHASCLPVHIGTLVELNKANELFYLSHKLVDLYPSNPVSWFAVGCYYLMVGHKNEHARRYLSKATTLEKTYGPAWIAYGHSFAVESEHDQAMAAYFTAAQLMKGCHLPMLYIGLEYGLTNNSKLAERFFSQALSIAPEDPFVMHEVGVVAFQNGEWKTAEKWFLDALEKIKAIGNEVTVDKWEPLLNNLGHVCRKLKKYAEALDYHRQALVLIPQNASTYSAIGYIHSLMGNFENAVDYFHTALGLRRDDTFSVTMLGHCIEMYIGDSEAYIGADIKDKLKCYDFDVHTMKTLKNIISPPWDFREFEVEKQTAEETGLTPLETSRKTPDSRPSLEETFEIEMNESDMMLETSMSDHST

SEQ ID NO: 5515 - protein, 526 aa, Homo sapiens; identical to SEQ ID NO: 5514

SEQ ID NO: 5516 - protein, 475 aa, Homo sapiens; identical to SEQ ID NO: 5511

SEQ ID NO: 5517 - protein, 499 aa, Homo sapiens
MAQFAFESDLHSLLQLDAPIPNAPPARWQRKAKEAAGPAPSPMRAANRSHSAGRTPGRTPGKSSSKVQTTPSKPGGDRYIPHRSAAQMEVASFLLSKENQPENSQTPTKKEHQKAWALNLNGFDVEEAKILRLSGKPQNAPEGYQNRLKVLYSQKATPGSSRKTCRYIPSLPDRILDAPEIRNDYYLNLVDWSSGNVLAVALDNSVYLWSASSGDILQLLQMEQPGEYISSVAWIKEGNYLAVGTSSAEVQLWDVQQQKRLRNMTSHSARVGSLSWNSYILSSGSRSGHIHHHDVRVAEHHVATLSGHSQEVCGLRWAPDGRHLASGGNDNLVNVWPSAPGEGGWVPLQTFTQHQGAVKAVAWCPWQSNVLATGGGTSDRHIRIWNVCSGACLSAVDAHSQVCSILWSPHYKELISGHGFAQNQLVIWKYPTMAKVAELKGHTSRVLSLTMSPDGATVASAAADETLRLWRCFELDPARRREREKASAAKSSLIHQGIR

SEQ ID NO: 5518 - protein, 499 aa, Homo sapiens; identical to SEQ ID NO: 5517

SEQ ID NO: 5519 - protein, 475 aa, Homo sapiens
MAQFAFESDLHSLLQLDAPIPNAPPARWQRKAKEAAGPAPSPMRAANRSHSAGRTPGRTPGKSSSKVQTTPSKENQPENSQTPTKKEHQKAWALNLNGFDVEEAKILRLSGKPQNAPEGYQNRLKVLYSQKATPGSSRKTCRYIPSLPDRILDAPEIRNDYYLNLVDWSSGNVLAVALDNSVYLWSASSGDILQLLQMEQPGEYISSVAWIKEGNYLAVGTSSAEVQLWDVQQQKRLRNMTSHSARVGSLSWNSYILSSGSRSGHIHHHDVRVAEHHVATLSGHSQEVCGLRWAPDGRHLASGGNDNLVNVWPSAPGEGGWVPLQTFTQHQGAVKAVAWCPWQSNVLATGGGTSDRHIRIWNVCSGACLSAVDAHSQVCSILWSPHYKELISGHGFAQNQLVIWKYPTMAKVAELKGHTSRVLSLTMSPDGATVASAAADETLRLWRCFELDPARRREREKASAAKSSLIHQGIR

SEQ ID NO: 5520 - protein, 473 aa, Homo sapiens
MSTELFSSTREEGSSGSGPSFRSNQRKMLNLLLERDTSFTVCPDVPRTPVGKFLGDSANLSILSGGTPKRCLDLSNLSSGEITATQLTTSADLDETGHLDSSGLQEVHLAGMNHDQHLMKCSPAQLLCSTPNGLDRGHRKRDAMCSSSANKENDNGNLVDSEMKYLGSPITTVPKLDKNPNLGEDQAEEISDELMEFSLKDQEAKVSRSGLYRSPSMPENLNRPRLKQVEKFKDNTIPDKVKKKYFSGQGKLRKGLCLKKTVSLCDITITQMLEEDSNQGHLIGDFSKVCALPTVSGKHQDLKYVNPETVAALLSGKFQGLIEKFYVIDCRYPYEYLGGHIQGALNLYSQEELFNFFLKKPIVPLDTQKRIIIVFHCEFSSERGPRMCRCLREEDRSLNQYPALYYPELYILKGGYRDFFPEYMELCEPQSYCPMHHQDHKTELLRCRSQSKVQEGERQLREQIALLVKDMSP

SEQ ID NO: 5521 - protein, 400 aa, Homo sapiens
MSTELFSSTREEGSSGSGPSFRSNQRKMLNLLLERDTSFTVCPDVPRTPVGKFLGDSANLSILSGSPGFFRTSGSAFSWDDNGNLVDSEMKYLGSPITTVPKLDKNPNLGEDQAEEISDELMEFSLKDQEAKVSRSGLYRSPSMPENLNRPRLKQVEKFKDNTIPDKVKKKYFSGQGKLRKGLCLKKTVSLCDITITQMLEEDSNQGHLIGDFSKVCALPTVSGKHQDLKYVNPETVAALLSGKFQGLIEKFYVIDCRYPYEYLGGHIQGALNLYSQEELFNFFLKKPIVPLDTQKRIIIVFHCEFSSERGPRMCRCLREEDRSLNQYPALYYPELYILKGGYRDFFPEYMELCEPQSYCPMHHQDHKTELLRCRSQSKVQEGERQLREQIALLVKDMSP

SEQ ID NO: 5522 - protein, 443 aa, Homo sapiens
MSTELFSSTREEGSSGSGPSFRSNQRKMLNLLLERDTSFTVCPDVPRTPVGKFLGDSANLSILSGGTPKRCLDLSNLSSGEITATQLTTSADLDETGHLDSSGLQEVHLAGMNHDQHLMKCSPDNGNLVDSEMKYLGSPITTVPKLDKNPNLGEDQAEEISDELMEFSLKDQEAKVSRSGLYRSPSMPENLNRPRLKQVEKFKDNTIPDKVKKKYFSGQGKLRKGLCLKKTVSLCDITITQMLEEDSNQGHLIGDFSKVCALPTVSGKHQDLKYVNPETVAALLSGKFQGLIEKFYVIDCRYPYEYLGGHIQGALNLYSQEELFNFFLKKPIVPLDTQKRIIIVFHCEFSSERGPRMCRCLREEDRSLNQYPALYYPELYILKGGYRDFFPEYMELCEPQSYCPMHHQDHKTELLRCRSQSKVQEGERQLREQIALLVKDMSP

SEQ ID NO: 5523 - protein, 430 aa, Homo sapiens
MSTELFSSTREEGSSGSGPSFRSNQRKMLNLLLERDTSFTVCPDVPRTPVGKFLGDSANLSILSGSPGFFRTSGSAFSWDAQLLCSTPNGLDRGHRKRDAMCSSSANKENDNGNLVDSEMKYLGSPITTVPKLDKNPNLGEDQAEEISDELMEFSLKDQEAKVSRSGLYRSPSMPENLNRPRLKQVEKFKDNTIPDKVKKKYFSGQGKLRKGLCLKKTVSLCDITITQMLEEDSNQGHLIGDFSKVCALPTVSGKHQDLKYVNPETVAALLSGKFQGLIEKFYVIDCRYPYEYLGGHIQGALNLYSQEELFNFFLKKPIVPLDTQKRIIIVFHCEFSSERGPRMCRCLREEDRSLNQYPALYYPELYILKGGYRDFFPEYMELCEPQSYCPMHHQDHKTELLRCRSQSKVQEGERQLREQIALLVKDMSP

SEQ ID NO: 5524 - protein, 400 aa, Homo sapiens; identical to SEQ ID NO: 5521

SEQ ID NO: 5525 - protein, 249 aa, Homo sapiens
MSTELFSSTREEGSSGSGPSFRSNQRKMLNLLLERDTSFTVCPDVPRTPVGKFLGDSANLSILSGGTPKRCLDLSNLSSGEITATQLTTSADLDETGHLDSSGLQEVHLAGMNHDQHLMKCSPAQLLCSTPNGLDRGHRKRDAMCSSSANKENDNGNLVDSEMKYLGSPITTVPKLDKNPNLGEDQAEEISDELMEFSLKDQEAKVSRSGLYRSPSMPENLNRPRLKQVEKFKDNTIPDKVKKKYFSGQ

SEQ ID NO: 5526 - protein, 473 aa, Homo sapiens; identical to SEQ ID NO: 5520

SEQ ID NO: 5527 - protein, 490 aa, Homo sapiens
MSEEARFCFSPGENSKTMSTELFSSTREEGSSGSGPSFRSNQRKMLNLLLERDTSFTVCPDVPRTPVGKFLGDSANLSILSGGTPKRCLDLSNLSSGEITATQLTTSADLDETGHLDSSGLQEVHLAGMNHDQHLMKCSPAQLLCSTPNGLDRGHRKRDAMCSSSANKENDNGNLVDSEMKYLGSPITTVPKLDKNPNLGEDQAEEISDELMEFSLKDQEAKVSRSGLYRSPSMPENLNRPRLKQVEKFKDNTIPDKVKKKYFSGQGKLRKGLCLKKTVSLCDITITQMLEEDSNQGHLIGDFSKVCALPTVSGKHQDLKYVNPETVAALLSGKFQGLIEKFYVIDCRYPYEYLGGHIQGALNLYSQEELFNFFLKKPIVPLDTQKRIIIVFHCEFSSERGPRMCRCLREEDRSLNQYPALYYPELYILKGGYRDFFPEYMELCEPQSYCPMHHQDHKTELLRCRSQSKVQEGERQLREQIALLVKDMSP

SEQ ID NO: 5528 - protein, 236 aa, Homo sapiens
MARPLVPSSQKALLLELKGLQEEPVEGFRVTLVDEGDLYNWEVAIFGPPNTYYEGGYFKARLKFPIDYPYSPPAFRFLTKMWHPNIYETGDVCISILHPPVDDPQSGELPSERWNPTQNVRTILLSVISLLNEPNTFSPANVDASVMYRKWKESKGKDREYTDIIRKQVLGTKVDAERDGVKVPTTLAEYCVKTKAPAPDEGSDLFYDDYYEDGEVEEEADSCFGDDEDDSGTEES

SEQ ID NO: 5529 - protein, 191 aa, Homo sapiens
MQTIKCVVVGDGAVGKTCLLISYTTNKFPSEYVPTVFDNYAVTVMIGGEPYTLGLFDTAGQEDYDRLRPLSYPQTDVFLVCFSVVSPSSFENVKEKWVPEITHHCPKTPFLLVGTQIDLRDDPSTIEKLAKNKQKPITPETAEKLARDLKAVKYVECSALTQRGLKNVFDEAILAALEPPETQPKRKCCIF

SEQ ID NO: 5530 - protein, 191 aa, Homo sapiens
MQTIKCVVVGDGAVGKTCLLISYTTNKFPSEYVPTVFDNYAVTVMIGGEPYTLGLFDTAGQEDYDRLRPLSYPQTDVFLVCFSVVSPSSFENVKEKWVPEITHHCPKTPFLLVGTQIDLRDDPSTIEKLAKNKQKPITPETAEKLARDLKAVKYVECSALTQKGLKNVFDEAILAALEPPEPKKSRRCVLL

SEQ ID NO: 5531 - protein, 191 aa, Homo sapiens; identical to SEQ ID NO: 5530

SEQ ID NO: 5532 - protein, 136 aa, Homo sapiens
MQTIKCVVVGDGAVGKTCLLISYTTNKFPSEYVPTVFDNYAVTVMIGGEPYTLGLFDTAGQEDYDRLRPLSYPQTDVFLVCFSVVSPSSFENVKEKWVPEITHHCPKTPFLLVGTQIDLRDDPSTIEKLAKNKQKP

SEQ ID NO: 5533 - protein, 233 aa, Homo sapiens
MSPDILHNKQISIGICTDYLDFSWVNYIHFKQLKNQWKVRRGDTGFARSAGRQNSSRQDSNEWWSQFGEVCPTSWNEVFDNYAVTVMIGGEPYTLGLFDTAGQEDYDRLRPLSYPQTDVFLVCFSVVSPSSFENVKEKWVPEITHHCPKTPFLLVGTQIDLRDDPSTIEKLAKNKQKPITPETAEKLARDLKAVKYVECSALTQKGLKNVFDEAILAALEPPEPKKSRRCVLL

SEQ ID NO: 5534 - protein, 560 aa, Homo sapiens
MPQTRSQAQATISFPKRKLSRALNKAKNSSDAKLEPTNVQTVTCSPRVKALPLSPRKRLGDDNLCNTPHLPPCSPPKQGKKENGPPHSHTLKGRRLVFDNQLTIKSPSKRELAKVHQNKILSSVRKSQEITTNSEQRCPLKKESACVRLFKQEGTCYQQAKLVLNTAVPDRLPAREREMDVIRNFLREHICGKKAGSLYLSGAPGTGKTACLSRILQDLKKELKGFKTIMLNCMSLRTAQAVFPAIAQEICQEEVSRPAGKDMMRKLEKHMTAEKGPMIVLVLDEMDQLDSKGQDVLYTLFEWPWLSNSHLVLIGIANTLDLTDRILPRLQAREKCKPQLLNFPPYTRNQIVTILQDRLNQVSRDQVLDNAAVQFCARKVSAVSGDVRKALDVCRRAIEIVESDVKSQTILKPLSECKSPSEPLIPKRVGLIHISQVISEVDGNRMTLSQEGAQDSFPLQQKILVCSLMLLIRQLKIKEVTLGKLYEAYSKVCRKQQVAAVDQSECLSLSGLLEARGILGLKRNKETRLTKVFFKIEEKEIEHALKDKALIGNILATGLP

SEQ ID NO: 5535 - protein, 531 aa, Homo sapiens
MADVLSVLRQYNIQKKEIVVKGDEVIFGEFSWPKNVKTNYVVWGTGKEGQPREYYTLDSILFLLNNVHLSHPVYVRRAATENIPVVRRPDRKDLLGYLNGEASTSASIDRSAPLEIGLQRSTQVKRAADEVLAEAKKPRIEDEECVRLDKERLAARLEGHKEGIVQTEQIRSLSEAMSVEKIAAIKAKIMAKKRSTIKTDLDDDITALKQRSFVDAEVDVTRDIVSRERVWRTRTTILQSTGKNFSKNIFAILQSVKAREEGRAPEQRPAPNAAPVDPTLRTKQPIPAAYNRYDQERFKGKEETEGFKIDTMGTYHGMTLKSVTEGASARKTQTPAAQPVPRPVSQARPPPNQKKGSRTPIIIIPAATTSLITMLNAKDLLQDLKFVPSDEKKKQGCQRENETLIQRRKDQMQPGGTAISVTVPYRVVDQPLKLMPQDWDRVVAVFVQGPAWQFKGWPWLLPDGSPVDIFAKIKAFHLKYDEVRLDPNVQKWDVTVLELSYHKRHLDRPVFLRFWETLDRYMVKHKSHLRF

SEQ ID NO: 5536 - protein, 316 aa, Homo sapiens
MADVLSVLRQYNIQKKEIVVKGDEVIFGEFSWPKNVKTNYVVWGTGKEGQPREYYTLDSILFLLNNVHLSHPVYVRRAATENIPVVRRPDRKDLLGYLNGEASTSASIDRSAPLEIGLQRSTQVKRAADEVLAEAKKPRIEDEECVRLDKERLAARLEGHKEGIVQTEQIRSLSEAMSVEKIAAIKAKIMAKKRSTIKTDLDDDITALKQRSFVDAEVDVTRDIVSRERVWRTRTTILQSTGKNFSKNIFAILQSVKAREEGRAPEQRPAPNAAPVDPTLRTKQPIPAAYNRYDQERISNTHYHNSCSYHLFNNHA

SEQ ID NO: 5537 - protein, 438 aa, Homo sapiens
MGGCAGSRRRFSDSEGEETVPEPRLPLLDHQGAHWKNAVGFWLLGLCNNFSYVVMLSAAHDILSHKRTSGNQSHVDPGPTPIPHNSSSRFDCNSVSTAAVLLADILPTLVIKLLAPLGLHLLPYSPRVLVSGICAAGSFVLVAFSHSVGTSLCGVVFASISSGLGEVTFLSLTAFYPRAVISWWSSGTGGAGLLGALSYLGLTQAGLSPQQTLLSMLGIPALLLASYFLLLTSPEAQDPGGEEEAESAARQPLIRTEAPESKPGSSSSLSLRERWTVFKGLLWYIVPLVVVYFAEYFINQGLFELLFFWNTSLSHAQQYRWYQMLYQAGVFASRSSLRCCRIRFTWALALLQCLNLVFLLADVWFGFLPSIYLVFLIILYEGLLGGAAYVNTFHNIALETSDEHREFAMAATCISDTLGISLSGLLALPLHDFLCQLS

SEQ ID NO: 5538 - protein, 167 aa, Homo sapiens
MGGCAGSRRRFSDSEGEETVPEPRLPLLDHQGAHWKNAVGFWLLGLCNNFSYVVMLSAAHDILSHKRTSGNQSHPPGSRQWDLCCWKLRPGCLFSFCGDQPVCYFLLLTSPEAQDPGGEEEAESAARQPLIRTEAPESKPGSSSSLSLRERWTVFKGLLWYIVPLVV

SEQ ID NO: 5539 - protein, 421 aa, Homo sapiens
MGGCAGSRRRFSDSEGEETVPEPRLPLLDHQGAHWKNAVGFWLLGLCNNFSYVVMLSAAHDILSHKRTSGNQSHVDPGPTPIPHNSSSRFDCNSVSTAAVLLADILPTLVIKLLAPLGLHLLPYSPRVLVSGICAAGSFVLVAFSHSVGTSLCGVVFASISSGLGEVTFLSLTAFYPRAVISWWSSGTGGAGLLGALSYLGLTQAGLSPQQTLLSMLGIPALLLASYFLLLTSPEAQDPGGEEEAESAARQPLIRTEAPESKPGSSSSLSLRERWTVFKVRMMAGFELLFFWNTSLSHAQQYRWYQMLYQAGVFASRSSLRCCRIRFTWALALLQCLNLVFLLADVWFGFLPSIYLVFLIILYEGLLGGAAYVNTFHNIALETSDEHREFAMAATCISDTLGISLSGLLALPLHDFLCQLS

SEQ ID NO: 5540 - protein, 390 aa, Homo sapiens
MGGCAGSRRRFSDSEGEETVPEPRLPLLDHQGAHWKNAVGFWLLGLCNNFSYVVMLSAAHDILSHKRTSGNQSHVDPGPTPIPHNSSSRFDCNSVSTAAVLLADILPTLVIKLLAPLGLHLLPYSPRVLVSGICAAGSFVLVAFSHSVGTSLCGVVFASISSGLGEVTFLSLTAFYPSYFLLLTSPEAQDPGGEEEAESAARQPLIRTEAPESKPGSSSSLSLRERWTVFKGLLWYIVPLVVVYFAEYFINQGLFELLFFWNTSLSHAQQYRWYQMLYQAGVFASRSSLRCCRIRFTWALALLQCLNLVFLLADVWFGFLPSIYLVFLIILYEGLLGGAAYVNTFHNIALETSDEHREFAMAATCISDTLGISLSGLLALPLHDFLCQLS

SEQ ID NO: 5541 - protein, 253 aa, Homo sapiens
MGGCAGSRRRFSDSEGEETVPEPRLPLLDHQGAHWKNAVGFWLLGLCNNFSYVVMLSAAHDILSHKRTSGNQSHVDPGPTPIPHNSSSRFDCNSVSTAAVLLADILPTLVIKLLAPLGLHLLPYSPRVLVSGICAAGSFVLVAFSHSVGTSLCGSSSSLSLRERWTVFKGLLWYIVPLVVVYFAEYFINQGLFELLFFWNTSLSHAQQYRWYQMLYQAGVFASRSSLRCCRIRFTWALALLQMESRSVAQAGM

SEQ ID NO: 5542 - protein, 339 aa, Homo sapiens
MGGCAGSRRRFSDSEGEETVPEPRLPLLDHQGAHWKNAVGFWLLGLCNNFSYVVMLSAAHDILSHKRTSGNQSHVDPGPTPIPHNSSSRFDCNSVSTAPPGSRQWDLCCWKLRPGCLFSFCGDQPVCYFLLLTSPEAQDPGGEEEAESAARQPLIRTEAPESKPGSSSSLSLRERWTVFKGLLWYIVPLVVVYFAEYFINQGLFELLFFWNTSLSHAQQYRWYQMLYQAGVFASRSSLRCCRIRFTWALALLQCLNLVFLLADVWFGFLPSIYLVFLIILYEGLLGGAAYVNTFHNIALETSDEHREFAMAATCISDTLGISLSGLLALPLHDFLCQLS

SEQ ID NO: 5543 - protein, 384 aa, Homo sapiens
MLSAAHDILSHKRTSGNQSHVDPGPTPIPHNSSSRFDCNSVSTAAVLLADILPTLVIKLLAPLGLHLLPYSPRVLVSGICAAGSFVLVAFSHSVGTSLCGVVFASISSGLGEVTFLSLTAFYPRAVISWWSSGTGGAGLLGALSYLGLTQAGLSPQQTLLSMLGIPALLLASYFLLLTSPEAQDPGGEEEAESAARQPLIRTEAPESKPGSSSSLSLRERWTVFKGLLWYIVPLVVVYFAEYFINQGLFELLFFWNTSLSHAQQYRWYQMLYQAGVFASRSSLRCCRIRFTWALALLQCLNLVFLLADVWFGFLPSIYLVFLIILYEGLLGGAAYVNTFHNIALETSDEHREFAMAATCISDTLGISLSGLLALPLHDFLCQLS

SEQ ID NO: 5544 - protein, 438 aa, Homo sapiens; identical to SEQ ID NO: 5537

SEQ ID NO: 5545 - protein, 438 aa, Homo sapiens; identical to SEQ ID NO: 5537

SEQ ID NO: 5546 - protein, 338 aa, Homo sapiens
MWTQAQRRSPTTAHHDLTATLSLRLPRVLVSGICAAGSFVLVAFSHSVGTSLCGVVFASISSGLGEVTFLSLTAFYPRAVISWWSSGTGGAGLLGALSYLGLTQAGLSPQQTLLSMLGIPALLLASYFLLLTSPEAQDPGGEEEAESAARQPLIRTEAPESKPGSSSSLSLRERWTVFKGLLWYIVPLVVVYFAEYFINQGLFELLFFWNTSLSHAQQYRWYQMLYQAGVFASRSSLRCCRIRFTWALALLQCLNLVFLLADVWFGFLPSIYLVFLIILYEGLLGGAAYVNTFHNIALETSDEHREFAMAATCISDTLGISLSGLLALPLHDFLCQLS

SEQ ID NO: 5547 - protein, 360 aa, Homo sapiens
MLSAAHDILSHKRTSGNQSHAVLLADILPTLVIKLLAPLGLHLLPYSPRVLVSGICAAGSFVLVAFSHSVGTSLCGVVFASISSGLGEVTFLSLTAFYPRAVISWWSSGTGGAGLLGALSYLGLTQAGLSPQQTLLSMLGIPALLLASYFLLLTSPEAQDPGGEEEAESAARQPLIRTEAPESKPGSSSSLSLRERWTVFKGLLWYIVPLVVVYFAEYFINQGLFELLFFWNTSLSHAQQYRWYQMLYQAGVFASRSSLRCCRIRFTWALALLQCLNLVFLLADVWFGFLPSIYLVFLIILYEGLLGGAAYVNTFHNIALETSDEHREFAMAATCISDTLGISLSGLLALPLHDFLCQLS

SEQ ID NO: 5548 - protein, 432 aa, Homo sapiens
MAVPFVEDWDLVQTLGEGAYGEVQLAVNRVTEEAVAVKIVDMKRAVDCPENIKKEICINKMLNHENVVKFYGHRREGNIQYLFLEYCSGGELFDRIEPDIGMPEPDAQRFFHQLMAGVVYLHGIGITHRDIKPENLLLDERDNLKISDFGLATVFRYNNRERLLNKMCGTLPYVAPELLKRREFHAEPVDVWSCGIVLTAMLAGELPWDQPSDSCQEYSDWKEKKTYLNPWKKIDSAPLALLHKILVENPSARITIPDIKKDRWYNKPLKKGAKRPRVTSGGVSESPSGFSKHIQSNLDFSPVNSASSEENVKYSSSQPEPRTGLSLWDTSPSYIDKLVQGISFSQPTCPDHMLLNSQLLGTPGSSQVTISTTDRRNNKLIFKVNLLEMDDKILVDFRLSKGDGLEFKRHFLKIKGKLIDIVSSQKIWLPAT

SEQ ID NO: 5549 - protein, 476 aa, Homo sapiens
MAVPFVEDWDLVQTLGEGAYGEVQLAVNRVTEEAVAVKIVDMKRAVDCPENIKKEICINKMLNHENVVKFYGHRREGNIQYLFLEYCSGGELFDRIEPDIGMPEPDAQRFFHQLMAGVVYLHGIGITHRDIKPENLLLDERDNLKISDFGLATVFRYNNRERLLNKMCGTLPYVAPELLKRREFHAEPVDVWSCGIVLTAMLAGELPWDQPSDSCQEYSDWKEKKTYLNPWKKIDSAPLALLHKILVENPSARITIPDIKKDRWYNKPLKKGAKRPRVTSGGVSESPSGFSKHIQSNLDFSPVNSASSEENVKYSSSQPEPRTGLSLWDTSPSYIDKLVQGISFSQPTCPDHMLLNSQLLGTPGSSQNPWQRLVKRMTRFFTKLDADKSYQCLKETCEKLGYQWKKSCMNQVTISTTDRRNNKLIFKVNLLEMDDKILVDFRLSKGDGLEFKRHFLKIKGKLIDIVSSQKIWLPAT

SEQ ID NO: 5550 - protein, 476 aa, Homo sapiens; identical to SEQ ID NO: 5549

SEQ ID NO: 5551 - protein, 476 aa, Homo sapiens; identical to SEQ ID NO: 5549

SEQ ID NO: 5552 - protein, 133 aa, Homo sapiens
MAVPFVEDWDLVQTLGEGAYGEVQLAVNRVTEEAVAVKIVDMKRAVDCPENIKKEICINKMLNHENVVKFYGHRREGNIQYLFLEYCSGGELFDRIEPDIGMPEPDAQRFFHQLMAGVVYLHGIGITHRDIKP

SEQ ID NO: 5553 - protein, 170 aa, Homo sapiens
MAVPFVEDWDLVQTLGEGAYGEVQLAVNRVTEEAVAVKIVDMKRAVDCPENIKKEICINKMLNHENVVKFYGHRREGNIQYLFLEYCSGGELFDRIEPDIGMPEPDAQRFFHQLMAGVVYLHGIGITHRDIKPENLLLDERDNLKISDFGLATVFRYNNRERLLNKMCGT

SEQ ID NO: 5554 - protein, 204 aa, Homo sapiens
MAVPFVEDWDLVQTLGEGAYGEVQLAVNRVTEEAVAVKIVDMKRAVDCPENIKKEICINKMLNHENVVKFYGHRREGNIQYLFLEYCSGGELFDRIEPDIGMPEPDAQRFFHQLMAGVVYLHGIGITHRDIKPENLLLDERDNLKISDFGLATVFRYNNRERLLNKMCGTLPYVAPELLKRREFHAEPVDVWSCGIVLTAMLAG

SEQ ID NO: 5555 - protein, 42 aa, Homo sapiens
MAVPFVEDWDLVQTLGEGAYGEVQLAVNRVTEEAVAVKIVDM

SEQ ID NO: 5556 - protein, 476 aa, Homo sapiens; identical to SEQ ID NO: 5549

SEQ ID NO: 5557 - protein, 127 aa, Homo sapiens
MAVPFVEDWDLVQTLGEGAYGEVQLAVNRVTEEAVAVKIVDMKRAVDCPENIKKEICINKMLNHENVVKFYGHRREGNIQYLFLEYCSGGELFDRIEPDIGMPEPDAQRFFHQLMAGVVYLHGIGIT

SEQ ID NO: 5558 - protein, 442 aa, Homo sapiens
MAVPFVEDWDLVQTLGEGAYGEVQLAVNRVTEEAVAVKIVDMKRAVDCPENIKKEICINKMLNHENVVKFYGHRREGNIQYLFLEYCSGGELFDRIEPDIGMPEPDAQRFFHQLMAGVVYLHGIGITHRDIKPENLLLDERDNLKISDFGLATVFRYNNRERLLNKMCGTLPYVAPELLKRREFHAEPVDVWSCGIVLTAMLAGELPWDQPSDSCQEYSDWKEKKTYLNPWKKIDSAPLALLHKILVENPSARITIPDIKKDRWYNKPLKKGAKRPRVTSGGVSESPSGFSKHIQSNLDFSPVNSASSEENVKYSSSQPEPRTGLSLWDTSPSYIDKLVQGISFSQPTCPDHMLLNSQLLGTPGSSQNPWQRLVKRMTRFFTKLDADKSYQCLKETCEKLGYQWKKSCMNQGDGLEFKRHFLKIKGKLIDIVSSQKIWLPAT

SEQ ID NO: 5559 - protein, 543 aa, Homo sapiens
MSRESDVEAQQSHGSSACSQPHGSVTQSQGSSSQSQGISSSSTSTMPNSSQSSHSSSGTLSSLETVSTQELYSIPEDQEPEDQEPEEPTPAPWARLWALQDGFANLECVNDNYWFGRDKSCEYCFDEPLLKRTDKYRTYSKKHFRIFREVGPKNSYIAYIEDHSGNGTFVNTELVGKGKRRPLNNNSEIALSLSRNKVFVFFDLTVDDQSVYPKALRDEYIMSKTLGSGACGEVKLAFERKTCKKVAIKIISKRKFAIGSAREADPALNVETEIEILKKLNHPCIIKIKNFFDAEDYYIVLELMEGGELFDKVVGNKRLKEATCKLYFYQMLLAVQYLHENGIIHRDLKPENVLLSSQEEDCLIKITDFGHSKILGETSLMRTLCGTPTYLAPEVLVSVGTAGYNRAVDCWSLGVILFICLSGYPPFSEHRTQVSLKDQITSGKYNFIPEVWAEVSEKALDLVKKLLVVDPKARFTTEEALRHPWLQDEDMKRKFQDLLSEENESTALPQVLAQPSTSRKRPREGEAEGAETTKRPAVCAAVL

SEQ ID NO: 5560 - protein, 514 aa, Homo sapiens
MSRESDVEAQQSHGSSACSQPHGSVTQSQGSSSQSQGISSSSTSTMPNSSQSSHSSSGTLSSLETVSTQELYSIPEDQEPEDQEPEEPTPAPWARLWALQDGFANLECVNDNYWFGRDKSCEYCFDEPLLKRTDKYRTYSKKHFRIFREVGPKNSYIAYIEDHSGNGTFVNTELVGKGKRRPLNNNSEIALSLSRNKVFVFFDLTVDDQSVYPKALRDEYIMSKTLGSGACGEVKLAFERKTCKKVAIKIISKRKFAIGSAREADPALNVETEIEILKKLNHPCIIKIKNFFDAEDYYIVLELMEGGELFDKVVGNKRLKEATCKLYFYQMLLAVQITDFGHSKILGETSLMRTLCGTPTYLAPEVLVSVGTAGYNRAVDCWSLGVILFICLSGYPPFSEHRTQVSLKDQITSGKYNFIPEVWAEVSEKALDLVKKLLVVDPKARFTTEEALRHPWLQDEDMKRKFQDLLSEENESTALPQVLAQPSTSRKRPREGEAEGAETTKRPAVCAAVL

SEQ ID NO: 5561 - protein, 226 aa, Homo sapiens
MSRESDVEAQQSHGSSACSQPHGSVTQSQGSSSQSQGISSSSTSTMPNSSQSSHSSSGTLSSLETVSTQELYSIPPEVLVSVGTAGYNRAVDCWSLGVILFICLSGYPPFSEHRTQVSLKDQITSGKYNFIPEVWAEVSEKALDLVKKLLVVDPKARFTTEEALRHPWLQDEDMKRKFQDLLSEENESTALPQVLAQPSTSRKRPREGEAEGAETTKRPAVCAAVL

SEQ ID NO: 5562 - protein, 163 aa, Homo sapiens
MSRESDVEAQQSHGSSACSQPHGSVTQSQGSSSQSQGISSSSTSTMPNSSQSSHSSSGTLSSLETVSTQELYSIPEDQEPEDQEPEEPTPAPWARLWALQDGFANLGDEDMKRKFQDLLSEENESTALPQVLAQPSTSRKRPREGEAEGAETTKRPAVCAAVL

SEQ ID NO: 5563 - protein, 289 aa, Homo sapiens
MSRESDVEAQQSHGSSACSQPHGSVTQSQGSSSQSQGISSSSTSTMPNSSQSSHSSSGTLSSLETVSTQELYSIPEDQEPEDQEPEEPTPAPWARLWALQDGFANLECVNDNYWFGRDKSCEYCFDEPLLKRTDKYRTYSKKHFRIFREVGPKNSYIAYIEDHSGNGTFVNTELVGKGKRRPLNNNSEIALSLSRNKVFVFFDLTVDDQSVYPKALRDEYIMSKTLGSGACGEVKLAFERKTCKKVAIKIISKRKFAIGSAREADPALNVETEIEILKKLNHDGRGRAV

SEQ ID NO: 5564 - protein, 452 aa, Homo sapiens
MSRESDVEAQQSHGSSACSQPHGSVTQSQGSSSQSQGISSSSTSTMPNSSQSSHSSSGTLSSLETVSTQELYSIPEDQEPEDQEPEEPTPAPWARLWALQDGFANLVFVFFDLTVDDQSVYPKALRDEYIMSKTLGSGACGEVKLAFERKTCKKVAIKIISKRKFAIGSAREADPALNVETEIEILKKLNHPCIIKIKNFFDAEDYYIVLELMEGGELFDKVVGNKRLKEATCKLYFYQMLLAVQYLHENGIIHRDLKPENVLLSSQEEDCLIKITDFGHSKILGETSLMRTLCGTPTYLAPEVLVSVGTAGYNRAVDCWSLGVILFICLSGYPPFSEHRTQVSLKDQITSGKYNFIPEVWAEVSEKALDLVKKLLVVDPKARFTTEEALRHPWLQDEDMKRKFQDLLSEENESTALPQVLAQPSTSRKRPREGEAEGAETTKRPAVCAAVL

SEQ ID NO: 5565 - protein, 586 aa, Homo sapiens
MSRESDVEAQQSHGSSACSQPHGSVTQSQGSSSQSQGISSSSTSTMPNSSQSSHSSSGTLSSLETVSTQELYSIPEDQEPEDQEPEEPTPAPWARLWALQDGFANLETESGHVTQSDLELLLSSDPPASASQSAGIRGVRHHPRPVCSLKCVNDNYWFGRDKSCEYCFDEPLLKRTDKYRTYSKKHFRIFREVGPKNSYIAYIEDHSGNGTFVNTELVGKGKRRPLNNNSEIALSLSRNKVFVFFDLTVDDQSVYPKALRDEYIMSKTLGSGACGEVKLAFERKTCKKVAIKIISKRKFAIGSAREADPALNVETEIEILKKLNHPCIIKIKNFFDAEDYYIVLELMEGGELFDKVVGNKRLKEATCKLYFYQMLLAVQYLHENGIIHRDLKPENVLLSSQEEDCLIKITDFGHSKILGETSLMRTLCGTPTYLAPEVLVSVGTAGYNRAVDCWSLGVILFICLSGYPPFSEHRTQVSLKDQITSGKYNFIPEVWAEVSEKALDLVKKLLVVDPKARFTTEEALRHPWLQDEDMKRKFQDLLSEENESTALPQVLAQPSTSRKRPREGEAEGAETTKRPAVCAAVL

SEQ ID NO: 5566 - protein, 514 aa, Homo sapiens; identical to SEQ ID NO: 5560

SEQ ID NO: 5567 - protein, 452 aa, Homo sapiens; identical to SEQ ID NO: 5564

SEQ ID NO: 5568 - protein, 543 aa, Homo sapiens; identical to SEQ ID NO: 5559

SEQ ID NO: 5569 - protein, 543 aa, Homo sapiens; identical to SEQ ID NO: 5559

SEQ ID NO: 5570 - protein, 322 aa, Homo sapiens
MSKTLGSGACGEVKLAFERKTCKKVAIKIISKRKFAIGSAREADPALNVETEIEILKKLNHPCIIKIKNFFDAEDYYIVLELMEGGELFDKVVGNKRLKEATCKLYFYQMLLAVQYLHENGIIHRDLKPENVLLSSQEEDCLIKITDFGHSKILGETSLMRTLCGTPTYLAPEVLVSVGTAGYNRAVDCWSLGVILFICLSGYPPFSEHRTQVSLKDQITSGKYNFIPEVWAEVSEKALDLVKKLLVVDPKARFTTEEALRHPWLQDEDMKRKFQDLLSEENESTALPQVLAQPSTSRKRPREGEAEGAETTKRPAVCAAVL

SEQ ID NO: 5571 - protein, 207 aa, Homo sapiens
MSRESDVEAQQSHGSSACSQPHGSVTQSQGSSSQSQGISSSSTSTMPNSSQSSHSSSGTLSSLETVSTQELYSIPEDQEPEDQEPEEPTPAPWARLWALQDGFANLECVNDNYWFGRDKSCEYCFDEPLLKRTDKYRTYSKKHFRIFREVGPKNSYIAYIEDHSGNGTFVNTELVGKGKRRPLNNNSEIALSLSRNKEKILKIYSLS

SEQ ID NO: 5572 - protein, 97 aa, Homo sapiens
MKVSAALLWLLLIAAAFSPQGLAGPASVPTTCCFNLANRKIPLQRLESYRRITSGKCPQKAVIFKTKLAKDICADPKKKWVQDSMKYLDQKSPTPKP

SEQ ID NO: 5573 - protein, 99 aa, Homo sapiens
MKVSAALLCLLLIAATFIPQGLAQPDAINAPVTCCYNFTNRKISVQRLASYRRITSSKCPKEAVIFKTIVAKEICADPKQKWVQDSMDHLDKQTQTPKT

SEQ ID NO: 5574 - protein, 92 aa, Homo sapiens
MQVSTAALAVLLCTMALCNQFSASLAADTPTACCFSYTSRQIPQNFIADYFETSSQCSKPGVIFLTKRSRQVCADPSEEWVQKYVSDLELSA

SEQ ID NO: 5575 - protein, 91 aa, Homo sapiens
MKVSAAALAVILIATALCAPASASPYSSDTTPCCFAYIARPLPRAHIKEYFYTSGKCSNPAVVFVTRKNRQVCANPEKKWVREYINSLEMS

SEQ ID NO: 5576 - protein, 91 aa, Homo sapiens; identical to SEQ ID NO: 5575

SEQ ID NO: 5577 - protein, 99 aa, Homo sapiens
MKASAALLCLLLTAAAFSPQGLAQPVGINTSTTCCYRFINKKIPKQRLESYRRTTSSHCPREAVIFKTKLDKEICADPTQKWVQDFMKHLDKKTQTPKL

SEQ ID NO: 5578 - protein, 109 aa, Homo sapiens
MWKPMPSPSNMKASAALLCLLLTAAAFSPQGLAQPVGINTSTTCCYRFINKKIPKQRLESYRRTTSSHCPREAVIFKTKLDKEICADPTQKWVQDFMKHLDKKTQTPKL

SEQ ID NO: 5579 - protein, 91 aa, Homo sapiens
MWKPMPSPSNMKASAALLCLLLTAAAFSPQGLAQPERPRTHPQWTFLLVVSLQLGLILQLPAATDLSIRKSLSRGWRATEGPPVATVPGKL

SEQ ID NO: 5580 - protein, 57 aa, Homo sapiens
MWKPMPSPSNMKASAALLCLLLTAAAFSPQGLAQPASRPNWTRRSVLTPHRSGSRTL

SEQ ID NO: 5581 - protein, 98 aa, Homo sapiens
MNQTAILICCLIFLTLSGIQGVPLSRTVRCTCISISNQPVNPRSLEKLEIIPASQFCPRVEIIATMKKKGEKRCLNPESKAIKNLLKAVSKERSKRSP

SEQ ID NO: 5582 - protein, 89 aa, Homo sapiens
MNAKVVVVLVLVLTALCLSDGKPVSLSYRCPCRFFESHVARANVKHLKILNTPNCALQIVARLKNNNRQVCIDPKLKWIQEYLEKALNK

SEQ ID NO: 5583 - protein, 119 aa, Homo sapiens
MNAKVVVVLVLVLTALCLSDGKPVSLSYRCPCRFFESHVARANVKHLKILNTPNCALQIVARLKNNNRQVCIDPKLKWIQEYLEKALNKGRREEKVGKKEKIGKKKRQKKRKAAQKRKN

SEQ ID NO: 5584 - protein, 93 aa, Homo sapiens
MNAKVVVVLVLVLTALCLSDGKPVSLSYRCPCRFFESHVARANVKHLKILNTPNCALQIVARLKNNNRQVCIDPKLKWIQEYLEKALNKRFKM

SEQ ID NO: 5585 - protein, 140 aa, Homo sapiens
MNAKVVVVLVLVLTALCLSDGKPVSLSYRCPCRFFESHVARANVKHLKILNTPNCALQIVARLKNNNRQVCIDPKLKWIQEYLEKALNNLISAAPAGKRVIAGARALHPSPPRACPTARALCEIRLWPPPEWSWPSPGDV

SEQ ID NO: 5586 - protein, 90 aa, Homo sapiens
MNAKVVVVLVLVLTALCLSDGKPVSLSYRCPCRFFESHVARANVKHLKILNTPNCALQIVARLKNNNRQVCIDPKLKWIQEYLEKALNNC

SEQ ID NO: 5587 - protein, 109 aa, Homo sapiens
MKFISTSLLLMLLVSSLSPVQGVLEVYYTSLRCRCVQESSVFIPRRFIDRIQILPRGNGCPRKEIIVWKKNKSIVCVDPQAEWIQRMMEVLRKRSSSTLPVPVFKRKIP

SEQ ID NO: 5588 - protein, 114 aa, Homo sapiens
MSLPSSRAARVPGPSGSLCALLALLLLLTPPGPLASAGPVSAVLTELRCTCLRVTLRVNPKTIGKLQVFPAGPQCSKVEVVASLKNGKQVCLDPEAPFLKKVIQKILDSGNKKN

SEQ ID NO: 5589 - protein, 125 aa, Homo sapiens
MKKSGVLFLLGIILLVLIGVQGTPVVRKGRCSCISTNQGTIHLQSLKDLKQFAPSPSCEKIEIIATLKNGVQTCLNPDSADVKELIKKWEKQVSQKKKQKNGKKHQKKKVLKVRKSQRSRQKKTT

SEQ ID NO: 5590 - protein, 360 aa, Homo sapiens
MEDFNMESDSFEDFWKGEDLSNYSYSSTLPPFLLDAAPCEPESLEINKYFVVIIYALVFLLSLLGNSLVMLVILYSRVGRSVTDVYLLNLALADLLFALTLPIWAASKVNGWIFGTFLCKVVSLLKEVNFYSGILLLACISVDRYLAIVHATRTLTQKRYLVKFICLSIWGLSLLLALPVLLFRRTVYSSNVSPACYEDMGNNTANWRMLLRILPQSFGFIVPLLIMLFCYGFTLRTLFKAHMGQKHRAMRVIFAVVLIFLLCWLPYNLVLLADTLMRTQVIQETCERRNHIDRALDATEILGILHSCLNPLIYAFIGQKFRHGLLKILAIHGLISKDSLPKDSRPSFVGSSSGHTSTTL

SEQ ID NO: 5591 - protein, 138 aa, Homo sapiens
MEDFNMESDSFEDFWKGEDLSNYSYSSTLPPFLLDAAPCEPESLEINKYFVVIIYALVFLLSLLGNSLVMLVILYSRVGRSVTDVYLLNLALADLLFALTLPIWAASKVNGWIFGTFLCKVVSLLKEVNFYSGILLLA

SEQ ID NO: 5592 - protein, 15 aa, Homo sapiens
MEDFNMESDSFEDFW

SEQ ID NO: 5593 - protein, 172 aa, Homo sapiens
MEDFNMESDSFEDFWKGEDLSNYSYSSTLPPFLLDAAPCEPESLEINKYFVVIIYALVFLLSLLGNSLVMLVILYSRVGRSVTDVYLLNLALADLLFALTLPIWAASKVNGWIFGTFLCKVVSLLKEVNFYSGILLLACISVDRYLAIVHATRTLTQKRYLVKFICLSIWGL

SEQ ID NO: 5594 - protein, 15 aa, Homo sapiens
MEDFNMESDSFEDFW

SEQ ID NO: 5595 - protein, 201 aa, Homo sapiens
MEDFNMESDSFEDFWKGEDLSNYSYSSTLPPFLLDAAPCEPESLEINKYFVVIIYALVFLLSLLGNSLVMLVILYSRVGRSVTDVYLLNLALADLLFALTLPIWAASKVNGWIFGTFLCKVVSLLKEVNFYSGILLLACISVDRYLAIVHATRTLTQKRYLVKFICLSIWGLSLLLALPVLLFRRTVYSSNVSPACYEDMG

SEQ ID NO: 5596 - protein, 136 aa, Homo sapiens
MEDFNMESDSFEDFWKGEDLSNYSYSSTLPPFLLDAAPCEPESLEINKYFVVIIYALVFLLSLLGNSLVMLVILYSRVGRSVTDVYLLNLALADLLFALTLPIWAASKVNGWIFGTFLCKVVSLLKEVNFYSGILL

SEQ ID NO: 5597 - protein, 352 aa, Homo sapiens
MEGISIYTSDNYTEEMGSGDYDSMKEPCFREENANFNKIFLPTIYSIIFLTGIVGNGLVILVMGYQKKLRSMTDKYRLHLSVADLLFVITLPFWAVDAVANWYFGNFLCKAVHVIYTVNLYSSVLILAFISLDRYLAIVHATNSQRPRKLLAEKVVYVGVWIPALLLTIPDFIFANVSEADDRYICDRFYPNDLWVVVFQFQHIMVGLILPGIVILSCYCIIISKLSHSKGHQKRKALKTTVILILAFFACWLPYYIGISIDSFILLEIIKQGCEFENTVHKWISITEALAFFHCCLNPILYAFLGAKFKTSAQHALTSVSRGSSLKILSKGKRGGHSSVSTESESSSFHSS

SEQ ID NO: 5598 - protein, 356 aa, Homo sapiens
MSIPLPLLQIYTSDNYTEEMGSGDYDSMKEPCFREENANFNKIFLPTIYSIIFLTGIVGNGLVILVMGYQKKLRSMTDKYRLHLSVADLLFVITLPFWAVDAVANWYFGNFLCKAVHVIYTVNLYSSVLILAFISLDRYLAIVHATNSQRPRKLLAEKVVYVGVWIPALLLTIPDFIFANVSEADDRYICDRFYPNDLWVVVFQFQHIMVGLILPGIVILSCYCIIISKLSHSKGHQKRKALKTTVILILAFFACWLPYYIGISIDSFILLEIIKQGCEFENTVHKWISITEALAFFHCCLNPILYAFLGAKFKTSAQHALTSVSRGSSLKILSKGKRGGHSSVSTESESSSFHSS

SEQ ID NO: 5599 - protein, 222 aa, Homo sapiens
MPWQTGTLGTSYARQSMSSTQSTSTAVSSSWIPALLLTIPDFIFANVSEADDRYICDRFYPNDLWVVVFQFQHIMVGLILPGIVILSCYCIIISKLSHSKGHQKRKALKTTVILILAFFACWLPYYIGISIDSFILLEIIKQGCEFENTVHKWISITEALAFFHCCLNPILYAFLGAKFKTSAQHALTSVSRGSSLKILSKGKRGGHSSVSTESESSSFHSS

SEQ ID NO: 5600 - protein, 943 aa, Homo sapiens
MTQRSIAGPICNLKFVTLLVALSSELPFLGAGVQLQDNGYNGLLIAINPQVPENQNLISNIKEMITEASFYLFNATKRRVFFRNIKILIPATWKANNNSKIKQESYEKANVIVTDWYGAHGDDPYTLQYRGCGKEGKYIHFTPNFLLNDNLTAGYGSRGRVFVHEWAHLRWGVFDEYNNDKPFYINGQNQIKVTRCSSDITGIFVCEKGPCPQENCIISKLFKEGCTFIYNSTQNATASIMFMQSLSSVVEFCNASTHNQEAPNLQNQMCSLRSAWDVITDSADFHHSFPMNGTELPPPPTFSLVQAGDKVVCLVLDVSSKMAEADRLLQLQQAAEFYLMQIVEIHTFVGIASFDSKGEIRAQLHQINSNDDRKLLVSYLPTTVSAKTDISICSGLKKGFEVVEKLNGKAYGSVMILVTSGDDKLLGNCLPTVLSSGSTIHSIALGSSAAPNLEELSRLTGGLKFFVPDISNSNSMIDAFSRISSGTGDIFQQHIQLESTGENVKPHHQLKNTVTVDNTVGNDTMFLVTWQASGPPEIILFDPDGRKYYTNNFITNLTFRTASLWIPGTAKPGHWTYTLNNTHHSLQALKVTVTSRASNSAVPPATVEAFVERDSLHFPHPVMIYANVKQGFYPILNATVTATVEPETGDPVTLRLLDDGAGADVIKNDGIYSRYFFSFAANGRYSLKVHVNHSPSISTPAHSIPGSHAMYVPGYTANGNIQMNAPRKSVGRNEEERKWGFSRVSSGGSFSVLGVPAGPHPDVFPPCKIIDLEAVKVEEELTLSWTAPGEDFDQGQATSYEIRMSKSLQNIQDDFNNAILVNTSKRNPQQAGIREIFTFSPQISTNGPEHQPNGETHESHRIYVAIRAMDRNSLQSAVSNIAQAPLFIPPNSDPVPARDYLILKGVLTAMGLIGIICLIIVVTHHTLSRKKRADKKENGTKLL

SEQ ID NO: 5601 - protein, 140 aa, Homo sapiens
MTQRSIAGPICNLKFVTLLVALSSELPFLGAGVQLQDNGYNGLLIAINPQVPENQNLISNIKEMITEASFYLFNATKRRVFFRNIKILIPATWKANNNSKIKQESYEKANVIVTDWYGAHGDDQGVEKRENTFISHLISY

SEQ ID NO: 5602 - protein, 410 aa, Homo sapiens
MNDEDYSTIYDTIQNERTYEVPDQPEENESPHYDDVHEYLRPENDLYATQLNTHEYDFVSVYTIKGEETSLASVQSEDRGYLLPDEIYSELQEAHPGEPQEDRGISMEGLYSSTQDQQLCAAELQENGSVMKEDLPSPSSFTIQHSKAFSTTKYSCYSDAEGLEEKEGAHMNPEIYLFVKAGIDGESIGNCPFSQRLFMILWLKGVVFNVTTVDLKRKPADLHNLAPGTHPPFLTFNGDVKTDVNKIEEFLEETLTPEKYPKLAAKHRESNTAGIDIFSKFSAYIKNTKQQNNAALERGLTKALKKLDDYLNTPLPEEIDANTCGEDKGSRRKFLDGDELTLADCNLLPKLHVVKIVAKKYRNYDIPAEMTGLWRYLKNAYARDEFTNTCAADSEIELAYADVAKRLSRS

SEQ ID NO: 5603 - protein, 251 aa, Homo sapiens
MTDSATANGDDRDPEIELFVKAGIDGESIGNCPFSQRLFMILWLKGVVFNVTTVDLKRKPADLHNLAPGTHPPFLTFNGDVKTDVNKIEEFLEETLTPEKYPKLAAKHRESNTAGIDIFSKFSAYIKNTKQQNNAALERGLTKALKKLDDYLNTPLPEEIDANTCGEDKGSRRKFLDGDELTLADCNLLPKLHVVKIVAKKYRNYDIPAEMTGLWRYLKNAYARDEFTNTCAADSEIELAYADVAKRLSRS

SEQ ID NO: 5604 - protein, 205 aa, Homo sapiens
MTDSATANGDDRDPEIELFVKAGIDGESIGNCPFSQRLFMILWLKGVVFNVTTVDLKRKPADLHNLAPGTHPPFLTFNGDVKTDVNKIEEFLEETLTPEKYPKLAAKHRESNTAGIDIFSKFSAYIKNTKQQNNAALERGLTKALKKLDDYLNTPLPEEIDANTCGEDKGSRRKFLDGDELTLADCNLLPKLHVVKEQVPLKGMI

SEQ ID NO: 5605 - protein, 1940 aa, Homo sapiens
MASGLGSPSPCSAGSEEEDMDALLNNSLPPPHPENEEDPEEDLSETETPKLKKKKKPKKPRDPKIPKSKRQKKERMLLCRQLGDSSGEGPEFVEEEEEVALRSDSEGSDYTPGKKKKKKLGPKKEKKSKSKRKEEEEEEDDDDDSKEPKSSAQLLEDWGMEDIDHVFSEEDYRTLTNYKAFSQFVRPLIAAKNPKIAVSKMMMVLGAKWREFSTNNPFKGSSGASVAAAAAAAVAVVESMVTATEVAPPPPPVEVPIRKAKTKEGKGPNARRKPKGSPRVPDAKKPKPKKVAPLKIKLGGFGSKRKRSSSEDDDLDVESDFDDASINSYSVSDGSTSRSSRSRKKLRTTKKKKKGEEEVTAVDGYETDHQDYCEVCQQGGEIILCDTCPRAYHMVCLDPDMEKAPEGKWSCPHCEKEGIQWEAKEDNSEGEEILEEVGGDLEEEDDHHMEFCRVCKDGGELLCCDTCPSSYHIHCLNPPLPEIPNGEWLCPRCTCPALKGKVQKILIWKWGQPPSPTPVPRPPDADPNTPSPKPLEGRPERQFFVKWQGMSYWHCSWVSELQLELHCQVMFRNYQRKNDMDEPPSGDFGGDEEKSRKRKNKDPKFAEMEERFYRYGIKPEWMMIHRILNHSVDKKGHVHYLIKWRDLPYDQASWESEDVEIQDYDLFKQSYWNHRELMRGEEGRPGKKLKKVKLRKLERPPETPTVDPTVKYERQPEYLDATGGTLHPYQMEGLNWLRFSWAQGTDTILADEMGLGKTVQTAVFLYSLYKEGHSKGPFLVSAPLSTIINWEREFEMWAPDMYVVTYVGDKDSRAIIRENEFSFEDNAIRGGKKASRMKKEASVKFHVLLTSYELITIDMAILGSIDWACLIVDEAHRLKNNQSKFFRVLNGYSLQHKLLLTGTPLQNNLEELFHLLNFLTPERFHNLEGFLEEFADIAKEDQIKKLHDMLGPHMLRRLKADVFKNMPSKTELIVRVELSPMQKKYYKYILTRNFEALNARGGGNQVSLLNVVMDLKKCCNHPYLFPVAAMEAPKMPNGMYDGSALIRASGKLLLLQKMLKNLKEGGHRVLIFSQMTKMLDLLEDFLEHEGYKYERIDGGITGNMRQEAIDRFNAPGAQQFCFLLSTRAGGLGINLATADTVIIYDSDWNPHNDIQAFSRAHRIGQNKKVMIYRFVTRASVEERITQVAKKKMMLTHLVVRPGLGSKTGSMSKQELDDILKFGTEELFKDEATDGGGDNKEGEDSSVIHYDDKAIERLLDRNQDETEDTELQGMNEYLSSFKVAQYVVREEEMGEEEEVEREIIKQEESVDPDYWEKLLRHHYEQQQEDLARNLGKGKRIRKQVNYNDGSQEDRGVCGRPRPPPMGRSTRAVGPAHLPSLPPDWQDDQSDNQSDYSVASEEGDEDFDERSEAPRRPSRKGLRNDKDKPLPPLLARVGGNIEVLGFNARQRKAFLNAIMRYGMPPQDAFTTQWLVRDLRGKSEKEFKAYVSLFMRHLCEPGADGAETFADGVPREGLSRQHVLTRIGVMSLIRKKVQEFEHVNGRWSMPELAEVEENKKMSQPGSPSPKTPTPSTPGDTQPNTPAPVPPAEDGIKIEENSLKEEESIEGEKEVKSTAPETAIECTQAPAPASEDEKVVVEPPEGEEKVEKAEVKERTEEPMETEPKGAADVEKVEEKSAIDLTPIVVEDKEEKKEEEEKKEVMLQNGETPKDLNDEKQKKNIKQRFMFNIADGGFTELHSLWQNEERAATVTKKTYEIWHRRHDYWLLAGIINHGYARWQDIQNDPRYAILNEPFKGEMNRGNFLEIKNKFLARRFKLLEQALVIEEQLRRAAYLNMSEDPSHPSMALNTRFAEVECLAESHQHLSKESMAGNKPANAVLHKVLKQLEELLSDMKADVTRLPATIARIPPVAVRLQMSERNILSRLANRAPEPTPQQVAQQQ

SEQ ID NO: 5606 - protein, 1912 aa, Homo sapiens
MASGLGSPSPCSAGSEEEDMDALLNNSLPPPHPENEEDPEEDLSETETPKLKKKKKPKKPRDPKIPKSKRQKKERMLLCRQLGDSSGEGPEFVEEEEEVALRSDSEGSDYTPGKKKKKKLGPKKEKKSKSKRKEEEEEEDDDDDSKEPKSSAQLLEDWGMEDIDHVFSEEDYRTLTNYKAFSQFVRPLIAAKNPKIAVSKMMMVLGAKWREFSTNNPFKGSSGASVAAAAAAAVAVVESMVTATEVAPPPPPVEVPIRKAKTKEGKGPNARRKPKGSPRVPDAKKPKPKKVAPLKIKLGGFGSKRKRSSSEDDDLDVESDFDDASINSYSVSDGSTSRSSRSRKKLRTTKKKKKGEEEVTAVDGYETDHQDYCEVCQQGGEIILCDTCPRAYHMVCLDPDMEKAPEGKWSCPHCEKEGIQWEAKEDNSEGEEILEEVGGDLEEEDDHHMEFCRVCKDGGELLCCDTCPSSYHIHCLNPPLPEIPNGEWLCPRCTCPALKGKVQKILIWKWGQPPSPTPVPRPPDADPNTPSPKPLEGRPERQFFVKWQGMSYWHCSWVSELQLELHCQVMFRNYQRKNDMDEPPSGDFGGDEEKSRKRKNKDPKFAEMEERFYRYGIKPEWMMIHRILNHSVDKKGHVHYLIKWRDLPYDQASWESEDVEIQDYDLFKQSYWNHRELMRGEEGRPGKKLKKVKLRKLERPPETPTVDPTVKYERQPEYLDATGGTLHPYQMEGLNWLRFSWAQGTDTILADEMGLGKTVQTAVFLYSLYKEGHSKGPFLVSAPLSTIINWEREFEMWAPDMYVVTYVGDKDSRAIIRENEFSFEDNAIRGGKKASRMKKEASVKFHVLLTSYELITIDMAILGSIDWACLIVDEAHRLKNNQSKFFRVLNGYSLQHKLLLTGTPLQNNLEELFHLLNFLTPERFHNLEGFLEEFADIAKEDQIKKLHDMLGPHMLRRLKADVFKNMPSKTELIVRVELSPMQKKYYKYILTRNFEALNARGGGNQVSLLNVVMDLKKCCNHPYLFPVAAMEAPKMPNGMYDGSALIRASGKLLLLQKMLKNLKEGGHRVLIFSQMTKMLDLLEDFLEHEGYKYERIDGGITGNMRQEAIDRFNAPGAQQFCFLLSTRAGGLGINLATADTVIIYDSDWNPHNDIQAFSRAHRIGQNKKVMIYRFVTRASVEERITQVAKKKMMLTHLVVRPGLGSKTGSMSKQELDDILKFGTEELFKDEATDGGGDNKEGEDSSVIHYDDKAIERLLDRNQDETEDTELQGMNEYLSSFKVAQYVVREEEMGEEEEVEREIIKQEESVDPDYWEKLLRHHYEQQQEDLARNLGKGKRIRKQVNYNDGSQEDRDWQDDQSDNQSDYSVASEEGDEDFDERSEAPRRPSRKGLRNDKDKPLPPLLARVGGNIEVLGFNARQRKAFLNAIMRYGMPPQDAFTTQWLVRDLRGKSEKEFKAYVSLFMRHLCEPGADGAETFADGVPREGLSRQHVLTRIGVMSLIRKKVQEFEHVNGRWSMPELAEVEENKKMSQPGSPSPKTPTPSTPGDTQPNTPAPVPPAEDGIKIEENSLKEEESIEGEKEVKSTAPETAIECTQAPAPASEDEKVVVEPPEGEEKVEKAEVKERTEEPMETEPKGAADVEKVEEKSAIDLTPIVVEDKEEKKEEEEKKEVMLQNGETPKDLNDEKQKKNIKQRFMFNIADGGFTELHSLWQNEERAATVTKKTYEIWHRRHDYWLLAGIINHGYARWQDIQNDPRYAILNEPFKGEMNRGNFLEIKNKFLARRFKLLEQALVIEEQLRRAAYLNMSEDPSHPSMALNTRFAEVECLAESHQHLSKESMAGNKPANAVLHKVLKQLEELLSDMKADVTRLPATIARIPPVAVRLQMSERNILSRLANRAPEPTPQQVAQQQ

SEQ ID NO: 5607 - protein, 1886 aa, Homo sapiens [sequence omitted]

SEQ ID NO: 5608 - protein, 1905 aa, Homo sapiens
MASGLGSPSPCSAGSEEEDMDALLNNSLPPPHPENEEDPEEDLSETETPKLKKKKKPKKPRDPKIPKSKRQKKELGDSSGEGPEFVEEEEEVALRSDSEGSDYTPGKKKKKKLGPKKEKKSKSKRKEEEEEEDDDDDSKEPKSSAQLLEDWGMEDIDHVFSEEDYRTLTNYKAFSQFVRPLIAAKNPKIAVSKMMMVLGAKWREFSTNNPFKGSSGASVAAAAAAAVAVVESMVTATEVAPPPPPVEVPIRKAKTKEGKGPNARRKPKGSPRVPDAKKPKPKKVAPLKIKLGGFGSKRKRSSSEDDDLDVESDFDDASINSYSVSDGSTSRSSRSRKKLRTTKKKKKGEEEVTAVDGYETDHQDYCEVCQQGGEIILCDTCPRAYHMVCLDPDMEKAPEGKWSCPHCEKEGIQWEAKEDNSEGEEILEEVGGDLEEEDDHHMEFCRVCKDGGELLCCDTCPSSYHIHCLNPPLPEIPNGEWLCPRCTCPALKGKVQKILIWKWGQPPSPTPVPRPPDADPNTPSPKPLEGRPERQFFVKWQGMSYWHCSWVSELQLELHCQVMFRNYQRKNDMDEPPSGDFGGDEEKSRKRKNKDPKFAEMEERFYRYGIKPEWMMIHRILNHSVDKKGHVHYLIKWRDLPYDQASWESEDVEIQDYDLFKQSYWNHRELMRGEEGRPGKKLKKVKLRKLERPPETPTVDPTVKYERQPEYLDATGGTLHPYQMEGLNWLRFSWAQGTDTILADEMGLGKTVQTAVFLYSLYKEGHSKGPFLVSAPLSTIINWEREFEMWAPDMYVVTYVGDKDSRAIIRENEFSFEDNAIRGGKKASRMKKEASVKFHVLLTSYELITIDMAILGSIDWACLIVDEAHRLKNNQSKFFRVLNGYSLQHKLLLTGTPLQNNLEELFHLLNFLTPERFHNLEGFLEEFADIAKEDQIKKLHDMLGPHMLRRLKADVFKNMPSKTELIVRVELSPMQKKYYKYILTRNFEALNARGGGNQVSLLNVVMDLKKCCNHPYLFPVAAMEAPKMPNGMYDGSALIRASGKLLLLQKMLKNLKEGGHRVLIFSQMTKMLDLLEDFLEHEGYKYERIDGGITGNMRQEAIDRFNAPGAQQFCFLLSTRAGGLGINLATADTVIIYDSDWNPHNDIQAFSRAHRIGQNKKVMIYRFVTRASVEERITQVAKKKMMLTHLVVRPGLGSKTGSMSKQELDDILKFGTEELFKDEATDGGGDNKEGEDSSVIHYDDKAIERLLDRNQDETEDTELQGMNEYLSSFKVAQYVVREEEMGEEEEVEREIIKQEESVDPDYWEKLLRHHYEQQQEDLARNLGKGKRIRKQVNYNDGSQEDRDWQDDQSDNQSDYSVASEEGDEDFDERSEAPRRPSRKGLRNDKDKPLPPLLARVGGNIEVLGFNARQRKAFLNAIMRYGMPPQDAFTTQWLVRDLRGKSEKEFKAYVSLFMRHLCEPGADGAETFADGVPREGLSRQHVLTRIGVMSLIRKKVQEFEHVNGRWSMPELAEVEENKKMSQPGSPSPKTPTPSTPGDTQPNTPAPVPPAEDGIKIEENSLKEEESIEGEKEVKSTAPETAIECTQAPAPASEDEKVVVEPPEGEEKVEKAEVKERTEEPMETEPKGAADVEKVEEKSAIDLTPIVVEDKEEKKEEEEKKEVMLQNGETPKDLNDEKQKKNIKQRFMFNIADGGFTELHSLWQNEERAATVTKKTYEIWHRRHDYWLLAGIINHGYARWQDIQNDPRYAILNEPFKGEMNRGNFLEIKNKFLARRFKLLEQALVIEEQLRRAAYLNMSEDPSHPSMALNTRFAEVECLAESHQHLSKESMAGNKPANAVLHKVLKQLEELLSDMKADVTRLPATIARIPPVAVRLQMSERNILSRLANRAPEPTPQQVAQQQ

SEQ ID NO: 5609 - protein, 1937 aa, Homo sapiens
MASGLGSPSPCSAGSEEEDMDALLNNSLPPPHPEDPEEDLSETETPKLKKKKKPKKPRDPKIPKSKRQKKERMLLCRQLGDSSGEGPEFVEEEEEVALRSDSEGSDYTPGKKKKKKLGPKKEKKSKSKRKEEEEEEDDDDDSKEPKSSAQLLEDWGMEDIDHVFSEEDYRTLTNYKAFSQFVRPLIAAKNPKIAVSKMMMVLGAKWREFSTNNPFKGSSGASVAAAAAAAVAVVESMVTATEVAPPPPPVEVPIRKAKTKEGKGPNARRKPKGSPRVPDAKKPKPKKVAPLKIKLGGFGSKRKRSSSEDDDLDVESDFDDASINSYSVSDGSTSRSSRSRKKLRTTKKKKKGEEEVTAVDGYETDHQDYCEVCQQGGEIILCDTCPRAYHMVCLDPDMEKAPEGKWSCPHCEKEGIQWEAKEDNSEGEEILEEVGGDLEEEDDHHMEFCRVCKDGGELLCCDTCPSSYHIHCLNPPLPEIPNGEWLCPRCTCPALKGKVQKILIWKWGQPPSPTPVPRPPDADPNTPSPKPLEGRPERQFFVKWQGMSYWHCSWVSELQLELHCQVMFRNYQRKNDMDEPPSGDFGGDEEKSRKRKNKDPKFAEMEERFYRYGIKPEWMMIHRILNHSVDKKGHVHYLIKWRDLPYDQASWESEDVEIQDYDLFKQSYWNHRELMRGEEGRPGKKLKKVKLRKLERPPETPTVDPTVKYERQPEYLDATGGTLHPYQMEGLNWLRFSWAQGTDTILADEMGLGKTVQTAVFLYSLYKEGHSKGPFLVSAPLSTIINWEREFEMWAPDMYVVTYVGDKDSRAIIRENEFSFEDNAIRGGKKASRMKKEASVKFHVLLTSYELITIDMAILGSIDWACLIVDEAHRLKNNQSKFFRVLNGYSLQHKLLLTGTPLQNNLEELFHLLNFLTPERFHNLEGFLEEFADIAKEDQIKKLHDMLGPHMLRRLKADVFKNMPSKTELIVRVELSPMQKKYYKYILTRNFEALNARGGGNQVSLLNVVMDLKKCCNHPYLFPVAAMEAPKMPNGMYDGSALIRASGKLLLLQKMLKNLKEGGHRVLIFSQMTKMLDLLEDFLEHEGYKYERIDGGITGNMRQEAIDRFNAPGAQQFCFLLSTRAGGLGINLATADTVIIYDSDWNPHNDIQAFSRAHRIGQNKKVMIYRFVTRASVEERITQVAKKKMMLTHLVVRPGLGSKTGSMSKQELDDILKFGTEELFKDEATDGGGDNKEGEDSSVIHYDDKAIERLLDRNQDETEDTELQGMNEYLSSFKVAQYVVREEEMGEEEEVEREIIKQEESVDPDYWEKLLRHHYEQQQEDLARNLGKGKRIRKQVNYNDGSQEDRGVCGRPRPPPMGRSTRAVGPAHLPSLPPDWQDDQSDNQSDYSVASEEGDEDFDERSEAPRRPSRKGLRNDKDKPLPPLLARVGGNIEVLGFNARQRKAFLNAIMRYGMPPQDAFTTQWLVRDLRGKSEKEFKAYVSLFMRHLCEPGADGAETFADGVPREGLSRQHVLTRIGVMSLIRKKVQEFEHVNGRWSMPELAEVEENKKMSQPGSPSPKTPTPSTPGDTQPNTPAPVPPAEDGIKIEENSLKEEESIEGEKEVKSTAPETAIECTQAPAPASEDEKVVVEPPEGEEKVEKAEVKERTEEPMETEPKGAADVEKVEEKSAIDLTPIVVEDKEEKKEEEEKKEVMLQNGETPKDLNDEKQKKNIKQRFMFNIADGGFTELHSLWQNEERAATVTKKTYEIWHRRHDYWLLAGIINHGYARWQDIQNDPRYAILNEPFKGEMNRGNFLEIKNKFLARRFKLLEQALVIEEQLRRAAYLNMSEDPSHPSMALNTRFAEVECLAESHQHLSKESMAGNKPANAVLHKVLKQLEELLSDMKADVTRLPATIARIPPVAVRLQMSERNILSRLANRAPEPTPQQVAQQQ

SEQ ID NO: 5610 - protein, 354 aa, Homo sapiens
MASGLGSPSPCSAGSEEEDMDALLNNSLPPPHPENEEDPEEDLSETETPKLKKKKKPKKPRDPKIPKSKRQKKERMLLCRQLGDSSGEGPEFVEEEEEVALRSDSEGSDYTPGKKKKKKLGPKKEKKSKSKRKEEEEEEDDDDDSKEPKSSAQLLEDWGMEDIDHVFSEEDYRTLTNYKAFSQFVRPLIAAKNPKIAVSKMMMVLGAKWREFSTNNPFKGSSGASVAAAAAAAVAVVESMVTATEVAPPPPPVEVPIRKAKTKEGKGPNARRKPKGSPRVPDAKKPKPKKVAPLKIKLGGFGSKRKRSSSEDDDLDVESDFDDASINSYSVSDGSTSRSSRSRKKLRTTKKKKK

SEQ ID NO: 5611 - protein, 354 aa, Homo sapiens; identical to SEQ ID NO: 5610

SEQ ID NO: 5612 - protein, 853 aa, Homo sapiens
MFLPHMNHLTLEQTFFSQVLPKTVKLFDDMMYELTSQARGLSSQNLEIQTTLRNILQTMVQLLGALTGCVQHICATQESIILENIQSLPSSVLHIIKSTFVHCKNSESVYSGCLHLVSDLLQALFKEAYSLQKQLMELLDMVCMDPLVDDNDDILNMVIVIHSLLDICSVISSMDHAFHANTWKFIIKQSLKHQSIIKSQLKHKDIITSLCEDILFSFHSCLQLAEQMTQSDAQDNADYRLFQKTLKLCRFFANSLLHYAKEFLPFLSDSCCTLHQLYLQIHSKFPPSLYATRISKAHQEEIAGAFLVTLDPLISQLLTFQPFMQVVLDSKLDLPCELQFPQCLLLVVVMDKLPSQPKEVQTLWCTDSQVSETTTRISLLKAVFYSFEQCSGELSLPVHLQGLKSKGKAEVAVTLYQHVCVHLCTFITSFHPSLFAELDAALLNAVLSANMITSLLAMDAWCFLARYGTAELCAHHVTIVAHLIKSCPGECYQLINLSILLKRLFFFMAPPHQLEFIQKFSPKEAENLPLWQHISFQALPPELREQTVHEVTTVGTAECRKWLSRSRTLGELESLNTVLSALLAVCNSAGEALDTGKQTAIIEVVSQLWAFLNIKQVADQPYVQQTFSLLLPLLGFFIQTLDPKLILQAVTLQTSLLKLELPDYVRLAMLDFVSSLGKLFIPEAIQDRILPNLSCMFALLLADRSWLLEQHTLEAFTQFAEGTNHEEIVPQCLSSEETKNKVVSFLEKTGFVDETEAAKVERVKQEKGIFWEPFANVTVEEAKRSSLQPYAKRARQEFPWEEEYRSALHTIAGALEATESLLQKGPAPAWLSMEMEALQERMDKLKRYIHTLG

SEQ ID NO: 5613 - protein, 853 aa, Homo sapiens; identical to SEQ ID NO: 5612

SEQ ID NO: 5614 - protein, 330 aa, Homo sapiens
MMYELTSQARGLSSQNLEIQTTLRNILQTMVQLLGALTGCVQHICATQESIILENIQSLPSSVLHIIKSTFVHCKNSESVYSGCLHLVSDLLQALFKEAYSLQKQLMELLDMVCMDPLVDDNDDILNMVIVIHSLLDICSVISSMDHAFHANTWKFIIKQSLKHQSIIKSQLKHKDIITSLCEDILFSFHSCLQLAEQMTQSDAQDNADYRLFQKTLKLCRFFANSLLHYAKEFLPFLSDSCCTLHQLYLQIHSKFPPSLYATRISKAHQEEIAGAFLVTLDPLISQLLTFQPFMQVVLDSKLGYLYSKPFSTVLSSVLVNSLYLFIYRD

SEQ ID NO: 5615 - protein, 348 aa, Homo sapiens
MSQEGAVPASAVPLEELSSWPEELCRRELPSVLPRLLSLSQHSDSWIEHIQILKIIVEMFLPHMNHLTLEQTFFSQVLPKTVKLFDDMMYELTSQARGLSSQNLEIQTTLRNILQTMVQLLGALTGCVQHICATQESIILENIQSLPSSVLHIIKSTFVHCKNSESVYSGCLHLVSDLLQALFKEAYSLQKQLMELLDMVCMDPLVDDNDDILNMVIVIHSLLDICSVISSMDHAFHANTWKFIIKQSLKHQSIIKSQLKHKDIITSLCEDILFSFHSCLQLAEQMTQSDAQDNADYRLFQKTLKLCRFFANSLLHYAKEFLPFLSDSCCTLHQLYLQIHRWSFALAV

SEQ ID NO: 5616 - protein, 699 aa, Homo sapiens
MLKLSGEGLRDSYHSRRDQIALKNLQSDVTEAKSDFTKETLASQNTKMISSIVISQMIDENKSRENRASLPLPCAIAQSRAHHAKQSLANRSGVNIHRAFALLPGRLGIPAPSDERGPEAELPPKEERPCGGPRRGFASITITARRVGPPARALVWGTAGDSLCPKCRAEDTLFQAPPALANGAHPGRHQRSFACTEFSRNSSVVRLKVPEAHTGLCERRKYWVTHADDKETSFSPDTPLSGKSPLVFSSCVHLRVSQQCPDSIYYVDKSLSVPIEPPQIASPKMHRSVLSLNLNCSSHRLTADGVDGLVNREPISEALKQELLEGDQDLVGQRWNPGLQESHLKETPSLRRVHLGTGACPWSGSFPLENTELANVGANQVTVRKGEKDHTTHCHASDHANQLSIHIPGWSYRAVHTKVFSGSSKRQQGEVCMTVSAPPVEQKPTRHFLPIGDSSPSDDCLSRDLSEPTERRHQSFLKPRILFPGFLCPLQDVCASLQEDNGVQIESKFPKGDYTCCDLVVKIKECKKSEDPTTPEPSPAAPSPAPRDGAGSPGLSEDCSESQQTPARSLTLQEALEVRKPQFISRSQERLKKLEHMVQQRKAQRKEDLRQKQSLLPIRTSKKQFTIPHPLSDNLFKPKERCISEKEMHMRSKRIYDNLPEVKKKKEEQRKRVILQSNRLRAEVFKKQLLDQLLQRNAV

SEQ ID NO: 5617 - protein, 652 aa, Homo sapiens
MISSIVISQMIDENKSRENRASLPLPCAIAQSRAHHAKQSLANRSGVNIHRAFALLPGRLGIPAPSDERGPEAELPPKEERPCGGPRRGFASITITARRVGPPARALVWGTAGDSLCPKCRAEDTLFQAPPALANGAHPGRHQRSFACTEFSRNSSVVRLKVPEAHTGLCERRKYWVTHADDKETSFSPDTPLSGKSPLVFSSCVHLRVSQQCPDSIYYVDKSLSVPIEPPQIASPKMHRSVLSLNLNCSSHRLTADGVDGLVNREPISEALKQELLEGDQDLVGQRWNPGLQESHLKETPSLRRVHLGTGACPWSGSFPLENTELANVGANQVTVRKGEKDHTTHCHASDHANQLSIHIPGWSYRAVHTKVFSGSSKRQQGEVCMTVSAPPVEQKPTRHFLPIGDSSPSDDCLSRDLSEPTERRHQSFLKPRILFPGFLCPLQDVCASLQEDNGVQIESKFPKGDYTCCDLVVKIKECKKSEDPTTPEPSPAAPSPAPRDGAGSPGLSEDCSESQQTPARSLTLQEALEVRKPQFISRSQERLKKLEHMVQQRKAQRKEDLRQKQSLLPIRTSKKQFTIPHPLSDNLFKPKERCISEKEMHMRSKRIYDNLPEVKKKKEEQRKRVILQSNRLRAEVFKKQLLDQLLQRNAV

SEQ ID NO: 5618 - protein, 383 aa, Homo sapiens
MISSIVISQMIDENKSRENRASLPLPCAIAQSRAHHAKQSLANRSGVNIHRAFALLPGRLGIPAPSDERGPEAELPPKEERPCGGPRRGFASITITARRVGPPARALVWGTAGDSLCPKCRAEDTLFQAPPALANGAHPGRHQRSFACTEFSRNSSVVRLKVPEAHTGLCERRKYWVTHADDKETSFSPDTPLSGKSPLVFSSCVHLRVSQQCPDSIYYVDKSLSVPIEPPQIASPKMHRSVLSLNLNCSSHRLTADGVDGLVNREPISEALKQELLEGDQDLVGQRWNPGLQESHLKETPSLRRVHLGTGACPWSGSFPLENTELANVGANQVTVRKGEKDHTTHCHASDHANQLSIHIPGWSYRADLLQEGQHKQLSMFQR

SEQ ID NO: 5619 - protein, 383 aa, Homo sapiens; identical to SEQ ID NO: 5618

SEQ ID NO: 5620 - protein, 242 aa, Homo sapiens
  VARIANT 1: note = MOD_RES - Any amino acid
XWSGSFPLENTELANVGANQVTVRKGEKDHTTHCHASDHANQLSIHIPGWSYRAGDYTCCDLVVKIKECKKSEDPTTPEPSPAAPSPAPRDGAGSPGLSEDCSESQQTPARSLTLQEALEVRKPQFISRSQERLKKLEHMVQQRKAQRKEDLRQKQSLLPIRTSKKQFTIPHPLSDNLFKPKERCISEKEMHMRSKRIYDNLPEVKKKKEEQRKRVILQSNRLRAEVFKKQLLDQLLQRNAV

SEQ ID NO: 5621 - protein, 662 aa, Homo sapiens
MLKLSGEGLRDSYHSRRDQIALKNLQSDVTEAKSDFTKETLASQNTKMISSIVISQMIDENKSRENRASLPLPCAIAQSRAHHAKQSLANRSGVNIHRAFALLPGRLGIPAPSDERGPEAELPPKEERPCGGPRRGFASITITARRVGPPARALVWGTAGDSLCPKCRAEDTLFQAPPALANGAHPGRHQRSFACTEFSRNSSVVRLKVPEAHTGLCERRKYWVTHADDKETSFSPDTPLSGKSPLVFSSCVHLRVSQQCPDSIYYVDKSLSVPIEPPQIASPKMHRSVLSLNLNCSSHRLTADGVDGLVNREPISEALKQELLEGDQDLVGQRWNPGLQESHLKETPSLRRVHLGTGACPWSGSFPLENTELANVGANQVTVRKGEKDHTTHCHASDHANQLSIHIPGWSYRAVHTKVFSGSSKRQQGEVCMTVSAPPVEQKPTRHFLPIGDSSPSDDCLSRDLSEPTERRHQSFLKPRILFPGFLCPLQDVCASLQEDNGVQIESKFPKGDYTCCDLVVKIKECKKSEDPTTPEPSPAAPSPAPRDGAGSPGLSEDCSESQQTPARSLTLQEALEVRKPQFISRSQERLKKLEHMVQQRKAQRKEDLRQKQSLLPIRTSKKQFTIPHPLSDNLFKPKERCISEKEMHMRSKRIYDNLPEV

SEQ ID NO: 5622 - protein, 602 aa, Homo sapiens
MLKLSGEGLRDSYHSRRDQIALKNLQSDVTEAKSDFTKETLASQNTKMISSIVISQMIDENKSRENRASLPLPCAIAQSRAHHAKQSLANRSGVNIHRAFALLPGRLGIPAPSDERGPEAELPPKEERPCGGPRRGFASITITARRVGPPARALVWGTAGDSLCPKCRAEDTLFQAPPALANGAHPGRHQRSFACTEFSRNSSVVRLKVPEAHTGLCERRKYWVTHADDKETSFSPDTPLSGKSPLVFSSCVHLRVSQQCPDSIYYVDKSLSVPIEPPQIASPKMHRSVLSLNLNCSSHRLTADGVDGLVNREPISEALKQELLEGDQDLVGQRWNPGLQESHLKETPSLRRVHLGTGACPWSGSFPLENTELANVGANQVTVRKGEKDHTTHCHASDHANQLSIHIPGWSYRAGDYTCCDLVVKIKECKKSEDPTTPEPSPAAPSPAPRDGAGSPGLSEDCSESQQTPARSLTLQEALEVRKPQFISRSQERLKKLEHMVQQRKAQRKEDLRQKQSLLPIRTSKKQFTIPHPLSDNLFKPKERCISEKEMHMRSKRIYDNLPEVKKKKEEQRKRVILQSNRLRAEVFKKQLLDQLLQRNAV

SEQ ID NO: 5623 - protein, 796 aa, Homo sapiens
MQHSGIPTKTHPQGYAARYTETAVHRTFQIKTFSTELKNHVMVMDFVKSNWFPSQRRAKVCIIHMCQGLKTAEQTASRYEIHSRLFSSPKDHSAWERNESLSNAGLRDSYHSRRDQIALKNLQSDVTEAKSDFTKETLASQNTKMISSIVISQMIDENKSRENRASLPLPCAIAQSRAHHAKQSLANRSGVNIHRAFALLPGRLGIPAPSDERGPEAELPPKEERPCGGPRRGFASITITARRVGPPARALVWGTAGDSLCPKCRAEDTLFQAPPALANGAHPGRHQRSFACTEFSRNSSVVRLKVPEAHTGLCERRKYWVTHADDKETSFSPDTPLSGKSPLVFSSCVHLRVSQQCPDSIYYVDKSLSVPIEPPQIASPKMHRSVLSLNLNCSSHRLTADGVDGLVNREPISEALKQELLEGDQDLVGQRWNPGLQESHLKETPSLRRVHLGTGACPWSGSFPLENTELANVGANQVTVRKGEKDHTTHCHASDHANQLSIHIPGWSYRAVHTKVFSGSSKRQQGEVCMTVSAPPVEQKPTRHFLPIGDSSPSDDCLSRDLSEPTERRHQSFLKPRILFPGFLCPLQDVCASLQEDNGVQIESKFPKGDYTCCDLVVKIKECKKSEDPTTPEPSPAAPSPAPRDGAGSPGLSEDCSESQQTPARSLTLQEALEVRKPQFISRSQERLKKLEHMVQQRKAQRKEDLRQKQSLLPIRTSKKQFTIPHPLSDNLFKPKERCISEKEMHMRSKRIYDNLPEVKKKKEEQRKRVILQSNRLRAEVFKKQLLDQLLQRNAV

SEQ ID NO: 5624 - protein, 261 aa, Homo sapiens
MSTTTCQVVAFLLSILGLAGCIAATGMDMWSTQDLYDNPVTSVFQYEGLWRSCVRQSSGFTECRPYFTILGLPAMLQAVRALMIVGIVLGAIGLLVSIFALKCIRIGSMEDSAKANMTLTSGIMFIVSGLCAIAGVSVFANMLVTNFWMSTANMYTGMGGMVQTVQTRYTFGAALFVGWVAGGLTLIGGVMMCIACRGLAPEETNYKAVSYHASGHSVAYKPGGFKASTGFGSNTKNKKIYDGGARTEDEVQSYPSKHDYV

SEQ ID NO: 5625 - protein, 261 aa, Homo sapiens
MAVTACQGLGFVVSLIGIAGIIAATCMDQWSTQDLYNNPVTAVFNYQGLWRSCVRESSGFTECRGYFTLLGLPAMLQAVRALMIVGIVLGAIGLLVSIFALKCIRIGSMEDSAKANMTLTSGIMFIVSGLCAIAGVSVFANMLVTNFWMSTANMYTGMGGMVQTVQTRYTFGAALFVGWVAGGLTLIGGVMMCIACRGLAPEETNYKAVSYHASGHSVAYKPGGFKASTGFGSNTKNKKIYDGGARTEDEVQSYPSKHDYV

SEQ ID NO: 5626 - protein, 250 aa, Homo sapiens
MSTTTCQVVAFLLSILGLAGCIAATGMDMWSTQDLYDNPVTSVFQYEGLWRSCVRQSSGFTECRPYFTILGLPAMLQAVRALMIVAIFALKCIRIGSMEDSAKANMTLTSGIMFIVSGLCAIAGVSVFANMLVTNFWMSTANMYTGMGGMVQTVQTRYTFGAALFVGWVAGGLTLIGGVMMCIACRGLAPEETNYKAVSYHASGHSVAYKPGGFKASTGFGSNTKNKKIYDGGARTEDEVQSYPSKHDYV

SEQ ID NO: 5627 - protein, 999 aa, Homo sapiens
MGPAPLPLLLGLFLPALWRRAITEAREEAKPYPLFPGPFPGSLQTDHTPLLSLPHASGYQPALMFSPTQPGRPHTGNVAIPQVTSVESKPLPPLAFKHTVGHIILSEHKGVKFNCSISVPNIYQDTTISWWKDGKELLGAHHAITQFYPDDEVTAIIASFSITSVQRSDNGSYICKMKINNEEIVSDPIYIEVQGLPHFTKQPESMNVTRNTAFNLTCQAVGPPEPVNIFWVQNSSRVNEQPEKSPSVLTVPGLTEMAVFSCEAHNDKGLTVSKGVQINIKAIPSPPTEVSIRNSTAHSILISWVPGFDGYSPFRNCSIQVKEADPLSNGSVMIFNTSALPHLYQIKQLQALANYSIGVSCMNEIGWSAVSPWILASTTEGAPSVAPLNVTVFLNESSDNVDIRWMKPPTKQQDGELVGYRISHVWQSAGISKELLEEVGQNGSRARISVQVHNATCTVRIAAVTRGGVGPFSDPVKIFIPAHGWVDYAPSSTPAPGNADPVLIIFGCFCGFILIGLILYISLAIRKRVQETKFGNAFTEEDSELVVNYIAKKSFCRRAIELTLHSLGVSEELQNKLEDVVIDRNLLILGKILGEGEFGSVMEGNLKQEDGTSLKVAVKTMKLDNSSQREIEEFLSEAACMKDFSHPNVIRLLGVCIEMSSQGIPKPMVILPFMKYGDLHTYLLYSRLETGPKHIPLQTLLKFMVDIALGMEYLSNRNFLHRDLAARNCMLRDDMTVCVADFGLSKKIYSGDYYRQGRIAKMPVKWIAIESLADRVYTSKSDVWAFGVTMWEIATRGMTPYPGVQNHEMYDYLLHGHRLKQPEDCLDELYEIMYSCWRTDPLDRPTFSVLRLQLEKLLESLPDVRNQADVIYVNTQLLESSEGLAQGSTLAPLDLNIDPDSIIASCTPRAAISVVTAEVHDSKPHEGRYILNGGSEEWEDLTSAPSAAVTAEKNSVLPGERLVRNGVSWSHSSMLPLGSSLPDELLFADDSSEGSEVLM

SEQ ID NO: 5628 - protein, 556 aa, Homo sapiens
MKPPTKQQDGELVGYRISHVWQSAGISKELLEEVGQNGSRARISVQVHNATCTVRIAAVTRGGVGPFSDPVKIFIPAHGESYTHAQIARNLHKVRPAYISLTICSSLLQASVSHIFQTMTGLLVSTRLGRLCPLFNSGAWQRRSCAHHLWLLLWILIGLILYISLAIRKRVQETKFGNAFTEEDSELVVNYIAKKSFCRRAIELTLHSLGVSEELQNKLEDVVIDRNLLILGKILGEGEFGSVMEGNLKQEDGTSLKVAVKTMKLDNSSQREIEEFLSEAACMKDFSHPNVIRLLGTSEKCRWVAKRALLICSVPKEKISGVDKNCLQIHIPLQTLLKFMVDIALGMEYLSNRNFLHRDLAARNCMLRDDMTVCVADFGLSKKIYSGDYYRQGRIAKMPVKWIAIESLADRVYTSKSDVWAFGVTMWEIATRGMTPYPGVQNHEMYDYLLHGHRLKQPTAWMNCDQVGMCRGVEPTDTPAQEPFLMWEIVYECTLAGEPIPDRPTFSVLRLQLEKLLESLPDVRNQADVIYVNTQLLESSEGLALHPCSTGLEHRP

SEQ ID NO: 5629 - protein, 823 aa, Homo sapiens
MKINNEEIVSDPIYIEVQGLPHFTKQPESMNVTRNTAFNLTCQAVGPPEPVNIFWVQNSSRVNEQPEKSPSVLTVPGLTEMAVFSCEAHNDKGLTVSKGVQINIKAIPSPPTEVSIRNSTAHSILISWVPGFDGYSPFRNCSIQVKEADPLSNGSVMIFNTSALPHLYQIKQLQALANYSIGVSCMNEIGWSAVSPWILASTTEGAPSVAPLNVTVFLNESSDNVDIRWMKPPTKQQDGELVGYRISHVWQSAGISKELLEEVGQNGSRARISVQVHNATCTVRIAAVTRGGVGPFSDPVKIFIPAHGWVDYAPSSTPAPGNADPVLIIFGCFCGFILIGLILYISLAIRKRVQETKFGNAFTEEDSELVVNYIAKKSFCRRAIELTLHSLGVSEELQNKLEDVVIDRNLLILGKILGEGEFGSVMEGNLKQEDGTSLKVAVKTMKLDNSSQREIEEFLSEAACMKDFSHPNVIRLLGVCIEMSSQGIPKPMVILPFMKYGDLHTYLLYSRLETGPKHIPLQTLLKFMVDIALGMEYLSNRNFLHRDLAARNCMLRDDMTVCVADFGLSKKIYSGDYYRQGRIAKMPVKWIAIESLADRVYTSKSDVWAFGVTMWEIATRGMTPYPGVQNHEMYDYLLHGHRLKQPEDCLDELYEIMYSCWRTDPLDRPTFSVLRLQLEKLLESLPDVRNQADVIYVNTQLLESSEGLAQGSTLAPLDLNIDPDSIIASCTPRAAISVVTAEVHDSKPHEGRYILNGGSEEWEDLTSAPSAAVTAEKNSVLPGERLVRNGVSWSHSSMLPLGSSLPDELLFADDSSEGSEVLM

SEQ ID NO: 5630 - protein, 999 aa, Homo sapiens; identical to SEQ ID NO: 5627

SEQ ID NO: 5631 - protein, 166 aa, Homo sapiens
MASGVAVSDGVIKVFNDMKVRKSSTPEEVKKRKKAVLFCLSEDKKNIILEEGKEILVGDVGQTVDDPYATFVKMLPDKDCRYALYDATYETKESKKEDLVFIFWAPESAPLKSKMIYASSKDAIKKKLTGIKHELQANCYEEVKDRCTLAEKLGGSAVISLEGKPL

SEQ ID NO: 5632 - protein, 166 aa, Homo sapiens; identical to SEQ ID NO: 5631

SEQ ID NO: 5633 - protein, 91 aa, Homo sapiens
MASGVAVSDGVIKVFNDMKVRKSSTPEEVKKRKKAVLFCLSEDKKNIILEEGKEILVGDVGQTVDDPYATFVKMLPDKDCRYALYDATYET

SEQ ID NO: 5634 - protein, 1366 aa, Homo sapiens
MLSFVDTRTLLLLAVTLCLATCQSLQEETVRKGPAGDRGPRGERGPPGPPGRDGEDGPTGPPGPPGPPGPPGLGGNFAAQYDGKGVGLGPGPMGLMGPRGPPGAAGAPGPQGFQGPAGEPGEPGQTGPAGARGPAGPPGKAGEDGHPGKPGRPGERGVVGPQGARGFPGTPGLPGFKGIRGHNGLDGLKGQPGAPGVKGEPGAPGENGTPGQTGARGLPGERGRVGAPGPAGARGSDGSVGPVGPAGPIGSAGPPGFPGAPGPKGEIGAVGNAGPAGPAGPRGEVGLPGLSGPVGPPGNPGANGLTGAKGAAGLPGVAGAPGLPGPRGIPGPVGAAGATGARGLVGEPGPAGSKGESGNKGEPGSAGPQGPPGPSGEEGKRGPNGEAGSAGPPGPPGLRGSPGSRGLPGADGRAGVMGPPGSRGASGPAGVRGPNGDAGRPGEPGLMGPRGLPGSPGNIGPAGKEGPVGLPGIDGRPGPIGPAGARGEPGNIGFPGPKGPTGDPGKNGDKGHAGLAGARGAPGPDGNNGAQGPPGPQGVQGGKGEQGPPGPPGFQGLPGPSGPAGEVGKPGERGLHGEFGLPGPAGPRGERGPPGESGAAGPTGPIGSRGPSGPPGPDGNKGEPGVVGAVGTAGPSGPSGLPGERGAAGIPGGKGEKGEPGLRGEIGNPGRDGARGAPGAVGAPGPAGATGDRGEAGAAGPAGPAGPRGSPGERGEVGPAGPNGFAGPAGAAGQPGAKGERGAKGPKGENGVVGPTGPVGAAGPAGPNGPPGPAGSRGDGGPPGMTGFPGAAGRTGPPGPSGISGPPGPPGPAGKEGLRGPRGDQGPVGRTGEVGAVGPPGFAGEKGPSGEAGTAGPPGTPGPQGLLGAPGILGLPGSRGERGLPGVAGAVGEPGPLGIAGPPGARGPPGAVGSPGVNGAPGEAGRDGNPGNDGPPGRDGQPGHKGERGYPGNIGPVGAAGAPGPHGPVGPAGKHGNRGETGPSGPVGPAGAVGPRGPSGPQGIRGDKGEPGEKGPRGLPGLKGHNGLQGLPGIAGHHGDQGAPGSVGPAGPRGPAGPSGPAGKDGRTGHPGTVGPAGIRGPQGHQGPAGPPGPPGPPGPPGVSGGGYDFGYDGDFYRADQPRSAPSLRPKDYEVDATLKSLNNQIETLLTPEGSRKNPARTCRDLRLSHPEWSSGYYWIDPNQGCTMDAIKVYCDFSTGETCIRAQPENIPAKNWYRSSKDKKHVWLGETINAGSQFEYNVEGVTSKEMATQLAFMRLLANYASQNITYHCKNSIAYMDEETGNLKKAVILQGSNDVELVAEGNSRFTYTVLVDGCSKKTNEWGKTIIEYKTNKPSRLPFLDIAPLDIGGADQEFFVDIGPVCFK

SEQ ID NO: 5635 - protein, 1367 aa, Homo sapiens
MLSFVDTRTLLLLAVTLCLATCQCTLGGQTLSKFPPYLHIERSEQGPPGPPGRDGEDGPTGPPGPPGPPGPPGLGGNFAAQYDGKGVGLGPGPMGLMGPRGPPGAAGAPGPQGFQGPAGEPGEPGQTGPAGARGPAGPPGKAGEDGHPGKPGRPGERGVVGPQGARGFPGTPGLPGFKGIRGHNGLDGLKGQPGAPGVKGEPGAPGENGTPGQTGARGLPGERGRVGAPGPAGARGSDGSVGPVGPAGPIGSAGPPGFPGAPGPKGEIGAVGNAGPAGPAGPRGEVGLPGLSGPVGPPGNPGANGLTGAKGAAGLPGVAGAPGLPGPRGIPGPVGAAGATGARGLVGEPGPAGSKGESGNKGEPGSAGPQGPPGPSGEEGKRGPNGEAGSAGPPGPPGLRGSPGSRGLPGADGRAGVMGPPGSRGASGPAGVRGPNGDAGRPGEPGLMGPRGLPGSPGNIGPAGKEGPVGLPGIDGRPGPIGPAGARGEPGNIGFPGPKGPTGDPGKNGDKGHAGLAGARGAPGPDGNNGAQGPPGPQGVQGGKGEQGPPGPPGFQGLPGPSGPAGEVGKPGERGLHGEFGLPGPAGPRGERGPPGESGAAGPTGPIGSRGPSGPPGPDGNKGEPGVVGAVGTAGPSGPSGLPGERGAAGIPGGKGEKGEPGLRGEIGNPGRDGARGAPGAVGAPGPAGATGDRGEAGAAGPAGPAGPRGSPGERGEVGPAGPNGFAGPAGAAGQPGAKGERGAKGPKGENGVVGPTGPVGAAGPAGPNGPPGPAGSRGDGGPPGMTGFPGAAGRTGPPGPSGISGPPGPPGPAGKEGLRGPRGDQGPVGRTGEVGAVGPPGFAGEKGPSGEAGTAGPPGTPGPQGLLGAPGILGLPGSRGERGLPGVAGAVGEPGPLGIAGPPGARGPPGAVGSPGVNGAPGEAGRDGNPGNDGPPGRDGQPGHKGERGYPGNIGPVGAAGAPGPHGPVGPAGKHGNRGETGPSGPVGPAGAVGPRGPSGPQGIRGDKGEPGEKGPRGLPGLKGHNGLQGLPGIAGHHGDQGAPGSVGPAGPRGPAGPSGPAGKDGRTGHPGTVGPAGIRGPQGHQGPAGPPGPPGPPGPPGVSGGGYDFGYDGDFYRADQPRSAPSLRPKDYEVDATLKSLNNQIETLLTPEGSRKNPARTCRDLRLSHPEWSSGYYWIDPNQGCTMDAIKVYCDFSTGETCIRAQPENIPAKNWYRSSKDKKHVWLGETINAGSQFEYNVEGVTSKEMATQLAFMRLLANYASQNITYHCKNSIAYMDEETGNLKKAVILQGSNDVELVAEGNSRFTYTVLVDGCSKKTNEWGKTIIEYKTNKPSRLPFLDIAPLDIGGADQEFFVDIGPVCFK

SEQ ID NO: 5636 - protein, 1466 aa, Homo sapiens
MMSFVQKGSWLLLALLHPTIILAQQEAVEGGCSHLGQSYADRDVWKPEPCQICVCDSGSVLCDDIICDDQELDCPNPEIPFGECCAVCPQPPTAPTRPPNGQGPQGPKGDPGPPGIPGRNGDPGIPGQPGSPGSPGPPGICESCPTGPQNYSPQYDSYDVKSGVAVGGLAGYPGPAGPPGPPGPPGTSGHPGSPGSPGYQGPPGEPGQAGPSGPPGPPGAIGPSGPAGKDGESGRPGRPGERGLPGPPGIKGPAGIPGFPGMKGHRGFDGRNGEKGETGAPGLKGENGLPGENGAPGPMGPRGAPGERGRPGLPGAAGARGNDGARGSDGQPGPPGPPGTAGFPGSPGAKGEVGPAGSPGSNGAPGQRGEPGPQGHAGAQGPPGPPGINGSPGGKGEMGPAGIPGAPGLMGARGPPGPAGANGAPGLRGGAGEPGKNGAKGEPGPRGERGEAGIPGVPGAKGEDGKDGSPGEPGANGLPGAAGERGAPGFRGPAGPNGIPGEKGPAGERGAPGPAGPRGAAGEPGRDGVPGGPGMRGMPGSPGGPGSDGKPGPPGSQGESGRPGPPGPSGPRGQPGVMGFPGPKGNDGAPGKNGERGGPGGPGPQGPPGKNGETGPQGPPGPTGPGGDKGDTGPPGPQGLQGLPGTGGPPGENGKPGEPGPKGDAGAPGAPGGKGDAGAPGERGPPGLAGAPGLRGGAGPPGPEGGKGAAGPPGPPGAAGTPGLQGMPGERGGLGSPGPKGDKGEPGGPGADGVPGKDGPRGPTGPIGPPGPAGQPGDKGEGGAPGLPGIAGPRGSPGERGETGPPGPAGFPGAPGQNGEPGGKGERGAPGEKGEGGPPGVAGPPGGSGPAGPPGPQGVKGERGSPGGPGAAGFPGARGLPGPPGSNGNPGPPGPSGSPGKDGPPGPAGNTGAPGSPGVSGPKGDAGQPGEKGSPGAQGPPGAPGPLGIAGITGARGLAGPPGMPGPRGSPGPQGVKGESGKPGANGLSGERGPPGPQGLPGLAGTAGEPGRDGNPGSDGLPGRDGSPGGKGDRGENGSPGAPGAPGHPGPPGPVGPAGKSGDRGESGPAGPAGAPGPAGSRGAPGPQGPRGDKGETGERGAAGIKGHRGFPGNPGAPGSPGPAGQQGAIGSPGPAGPRGPVGPSGPPGKDGTSGHPGPIGPPGPRGNRGERGSEGSPGHPGQPGPPGPPGAPGPCCGGVGAAAIAGIGGEKAGGFAPYYGDEPMDFKINTDEIMTSLKSVNGQIESLISPDGSRKNPARNCRDLKFCHPELKSGEYWVDPNQGCKLDAIKVFCNMETGETCISANPLNVPRKHWWTDSSAEKKHVWFGESMDGGFQFSYGNPELPEDVLDVHLAFLRLLSSRASQNITYHCKNSIAYMDQASGNVKKALKLMGSNEGEFKAEGNSKFTYTVLEDGCTKHTGEWSKTVFEYRTRKAVRLPIVDIAPYDIGGPDQEFGVDVGPVCFL

SEQ ID NO: 5637 - protein, 1163 aa, Homo sapiens
MMSFVQKGSWLLLALLHPTIILAQQEAVEGGCSHLGQSYADRDVWKPEPCQICVCDSGSVLCDDIICDDQELDCPNPEIPFGECCAVCPQPPTAPTRPPNGQGPQGPKGDPGPPGIPGRNGDPGIPGQPGSPGSPGPPGICESCPTGPQNYSPQYDSYDVKSGVAVGGLAGYPGPAGPPGPPGPPGTSGHPGSPGSPGYQGPPGEPGQAGPSGPPGPPGAIGPSGPAGKDGESGRPGRPGERGLPGPPGIKGPAGIPGFPGMKGHRGFDGRNGEKGETGAPGLKGENGLPGENGAPGPMGPRGAPGERGRPGLPGAAGARGNDGARGSDGQPGPPGPPGTAGFPGSPGAKGEVGPAGSPGSNGAPGQRGEPGPQGHAGAQGPPGPPGINGSPGGKGEMGPAGIPGAPGLMGARGPPGPAGANGAPGLRGGAGEPGKNGAKGEPGPRGERGEAGIPGVPGAKGEDGKDGSPGEPGANGLPGAAGERGAPGFRGPAGPNGIPGEKGPAGERGAPGPAGPRGAAGEPGRDGVPGGPGMRGMPGSPGGPGSDGKPGPPGSQGESGRPGPPGPSGPRGQPGVMGFPGPKGNDGAPGKNGERGGPGGPGPQGPPGKNGETGPQGPPGPTGPGGDKGDTGPPGPQGLQGLPGTGGPPGENGKPGEPGPKGDAGAPGAPGGKGDAGAPGERGPPGLAGAPGLRGGAGPPGPEGGKGAAGPPGPPGAAGTPGLQGMPGERGGLGSPGPKGDKGEPGGPGADGVPGKDGPRGPTGPIGPPGPAGQPGDKGEGGAPGLPGIAGPRGSPGERGETGPPGPAGFPGAPGQNGEPGGKGERGAPGEKGEGGPPGLFGPPGKDGTSGHPGPIGPPGPRGNRGERGSEGSPGHPGQPGPPGPPGAPGPCCGGVGAAAIAGIGGEKAGGFAPYYGDEPMDFKINTDEIMTSLKSVNGQIESLISPDGSRKNPARNCRDLKFCHPELKSGEYWVDPNQGCKLDAIKVFCNMETGETCISANPLNVPRKHWWTDSSAEKKHVWFGESMDGGFQFSYGNPELPEDVLDVHLAFLRLLSSRASQNITYHCKNSIAYMDQASGNVKKALKLMGSNEGEFKAEGNSKFTYTVLEDGCTKHTGEWSKTVFEYRTRKAVRLPIVDIAPYDIGGPDQEFGVDVGPVCFL

SEQ ID NO: 5638 - protein, 1712 aa, Homo sapiens
MGRDQRAVAGPALRRWLLLGTVTVGFLAQSVLAGVKKFDVPCGGRDCSGGCQCYPEKGGRGQPGPVGPQGYNGPPGLQGFPGLQGRKGDKGERGAPGVTGPKGDVGARGVSGFPGADGIPGHPGQGGPRGRPGYDGCNGTQGDSGPQGPPGSEGFTGPPGPQGPKGQKGEPYALPKEERDRYRGEPGEPGLVGFQGPPGRPGHVGQMGPVGAPGRPGPSSDESFKNKLKNKGLNYYTVNSMQGDVGQPGPNGIPSDTLHPIIAPTGVTFHPDQYKGPVGWRGRPWVAGISLKGEEGIMGFPGLRGYPGLSGEKGSPGQKGSRGLDGYQGPDGPRGPKGEAGDPGPPGLPAYSPHPSLAKGARGDPGFPGAQGEPGSQGEPGDPGLPGPPGLSIGDGDQRRGLPGEMGPKGFIGDPGIPALYGGPPGPDGKRGPPGPPGLPGPPGPDGFLFGLKGAKGRAGFPGLPGSPGARGPKGWKGDAGECRCTEGDEAIKGLPGLPGPKGFAGINGEPGRKGDRGDPGQHGLPGFPGLKGVPGNIGAPGPKGAKGDSRTITTKGERGQPGVPGVPGMKGDDGSPGRDGLDGFPGLPGPPGDGIKGPPGDPGYPGIPGTKGTPGEMGPPGLGLPGLKGQRGFPGDAGLPGPPGFLGPPGPAGTPGQIDCDTDVKRAVGGDRQEAIQPGCIGGPKGLPGLPGPPGPTGAKGLRGIPGFAGADGGPGPRGLPGDAGREGFPGPPGFIGPRGSKGAVGLPGPDGSPGPIGLPGPDGPPGERGLPGEVLGAQPGPRGDAGVPGQPGLKGLPGDRGPPGFRGSQGMPGMPGLKGQPGLPGPSGQPGLYGPPGLHGFPGAPGQEGPLGLPGIPGREGLPGDRGDPGDTGAPGPVGMKGLSGDRGDAGFTGEQGHPGSPGFKGIDGMPGTPGLKGDRGSPGMDGFQGMPGLKGRPGFPGSKGEAGFFGIPGLKGLAGEPGFKGSRGDPGPPGPPPVILPGMKDIKGEKGDEGPMGLKGYLGAKGIQGMPGIPGLSGIPGLPGRPGHIKGVKGDIGVPGIPGLPGFPGVAGPPGITGFPGFIGSRGDKGAPGRAGLYGEIGATGDFGDIGDTINLPGRPGLKGERGTTGIPGLKGFFGEKGTEGDIGFPGITGVTGVQGPPGLKGQTGFPGLTGPPGSQGELGRIGLPGGKGDDGWPGAPGLPGFPGLRGIRGLHGLPGTKGFPGSPGSDIHGDPGFPGPPGERGDPGEANTLPGPVGVPGQKGDQGAPGERGPPGSPGLQGFPGITPPSNISGAPGDKGAPGIFGLKGYRGPPGPPGSAALPGSKGDTGNPGAPGTPGTKGWAGDSGPQGRPGVFGLPGEKGPRGEQGFMGNTGPTGAVGDRGPKGPKGDPGFPGAPGTVGAPGIAGIPQKIAVQPGTVGPQGRRGPPGAPGEMGPQGPPGEPGFRGAPGKAGPQGRGGVSAVPGFRGDEGPIGHQGPIGQEGAPGRPGSPGLPGMPGRSVSIGYLLVKHSQTDQEPMCPVGMNKLWSGYSLLYFEGQEKAHNQDLGLAGSCLARFSTMPFLYCNPGDVCYYASRNDKSYWLSTTAPLPMMPVAEDEIKPYISRCSVCEAPAIAIAVHSQDVSIPHCPAGWRSLWIGYSFLMHTAAGDEGGGQSLVSPGSCLEDFRATPFIECNGGRGTCHYYANKYSFWLTTIPEQSFQGSPSADTLKAGLIRTHISRCQVCMKNL

SEQ ID NO: 5639 - protein, 1712 aa, Homo sapiens
MGRDQRAVAGPALRRWLLLGTVTVGFLAQSVLAGVKKFDVPCGGRDCSGGCQCYPEKGGRGQPGPVGPQGYNGPPGLQGFPGLQGRKGDKGERGAPGVTGPKGDVGARGVSGFPGADGIPGHPGQGGPRGRPGYDGCNGTQGDSGPQGPPGSEGFTGPPGPQGPKGQKGEPYALPKEERDRYRGEPGEPGLVGFQGPPGRPGHVGQMGPVGAPGRPGPPGPPGPKGQQGNRGLGFYGVKGEKGDVGQPGPNGIPSDTLHPIIAPTGVTFHPDQYKGEKGSEGEPGIRGISLKGEEGIMGFPGLRGYPGLSGEKGSPGQKGSRGLDGYQGPDGPRGPKGEAGDPGPPGLPAYSPHPSLAKGARGDPGFPGAQGEPGSQGEPGDPGLPGPPGLSIGDGDQRRGLPGEMGPKGFIGDPGIPALYGGPPGPDGKRGPPGPPGLPGPPGPDGFLFGLKGAKGRAGFPGLPGSPGARGPKGWKGDAGECRCTEGDEAIKGLPGLPGPKGFAGINGEPGRKGDRGDPGQHGLPGFPGLKGVPGNIGAPGPKGAKGDSRTITTKGERGQPGVPGVPGMKGDDGSPGRDGLDGFPGLPGPPGDGIKGPPGDPGYPGIPGTKGTPGEMGPPGLGLPGLKGQRGFPGDAGLPGPPGFLGPPGPAGTPGQIDCDTDVKRAVGGDRQEAIQPGCIGGPKGLPGLPGPPGPTGAKGLRGIPGFAGADGGPGPRGLPGDAGREGFPGPPGFIGPRGSKGAVGLPGPDGSPGPIGLPGPDGPPGERGLPGEVLGAQPGPRGDAGVPGQPGLKGLPGDRGPPGFRGSQGMPGMPGLKGQPGLPGPSGQPGLYGPPGLHGFPGAPGQEGPLGLPGIPGREGLPGDRGDPGDTGAPGPVGMKGLSGDRGDAGFTGEQGHPGSPGFKGIDGMPGTPGLKGDRGSPGMDGFQGMPGLKGRPGFPGSKGEAGFFGIPGLKGLAGEPGFKGSRGDPGPPGPPPVILPGMKDIKGEKGDEGPMGLKGYLGAKGIQGMPGIPGLSGIPGLPGRPGHIKGVKGDIGVPGIPGLPGFPGVAGPPGITGFPGFIGSRGDKGAPGRAGLYGEIGATGDFGDIGDTINLPGRPGLKGERGTTGIPGLKGFFGEKGTEGDIGFPGITGVTGVQGPPGLKGQTGFPGLTGPPGSQGELGRIGLPGGKGDDGWPGAPGLPGFPGLRGIRGLHGLPGTKGFPGSPGSDIHGDPGFPGPPGERGDPGEANTLPGPVGVPGQKGDQGAPGERGPPGSPGLQGFPGITPPSNISGAPGDKGAPGIFGLKGYRGPPGPPGSAALPGSKGDTGNPGAPGTPGTKGWAGDSGPQGRPGVFGLPGEKGPRGEQGFMGNTGPTGAVGDRGPKGPKGDPGFPGAPGTVGAPGIAGIPQKIAVQPGTVGPQGRRGPPGAPGEMGPQGPPGEPGFRGAPGKAGPQGRGGVSAVPGFRGDEGPIGHQGPIGQEGAPGRPGSPGLPGMPGRSVSIGYLLVKHSQTDQEPMCPVGMNKLWSGYSLLYFEGQEKAHNQDLGLAGSCLARFSTMPFLYCNPGDVCYYASRNDKSYWLSTTAPLPMMPVAEDEIKPYISRCSVCEAPAIAIAVHSQDVSIPHCPAGWRSLWIGYSFLMHTAAGDEGGGQSLVSPGSCLEDFRATPFIECNGGRGTCHYYANKYSFWLTTIPEQSFQGSPSADTLKAGLIRTHISRCQVCMKNL

SEQ ID NO: 5640 - protein, 105 aa, Homo sapiens
MGRDQRAVAGPALRRWLLLGTVTVGFLAQSVLAGVKKFDVPCGGRDCSGGCQCYPEKGGRGQPGPVGPQGYNGPPGLQGFPGLQGRKGDKGERGAPGVTGPKGDV

SEQ ID NO: 5641 - protein, 1498 aa, Homo sapiens
MSARTAPRPQVLLLPLLLVLLAAAPAASKGCVCKDKGQCFCDGAKGEKGEKGFPGPPGSPGQKGFTGPEGLPGPQGPKSFRAIPSYSGGKSLQGISGLPGFSGSPGLPGTPGNTGPYGLVGVPGCSGSKGEQGFPGLPGTLGYPGIPGIHNLKIFKGAPAKEEDIELDAKGDPGLPGAPGPQGLPGPPGFPGPVGPPGPPGFFGFPGAMGPRGPKSFVLSSRISTKGEKGVKGLTGPPGPPGTVIVTLTGPDNRTDLKGEKGDKGAMGEPGPPGPSGLPGESYGSEKGAPGDPGLQGKPGKDGVPGFPGSEGVKGNRGFPGLMGEDGIKEEKRDVAIVSFSSKTEYYDTYQEKGDEGTPGPPGPRGARGPQGKNKFRCIPGSQGSSRPGLRGAPGWPGLKGSKGERGRPGKDAMGTPGSPGCAGSPGLPGSPGPPGPPGDIVFRKGPPGDHGLPGYLGSPGIPGVDGPKGEPGLLCTQCPYIPGPPGLPGLPGLHGVKGIPGRQGAAGLKGSPGSPGNTGLPGFPGFPGAQGDPGLKGEKGETLQPEGQVGVPGDPGLRGQPGRKGLDGIPGTPGVKGLPGPKGELALSGEKGDQGPPGDPGSPGSPGPAGPAGPPGYGPQGEPGLQGTQGVPGAPGPPGEAGPRGELSVSTPVPGPPGPPGPPGHPGPQGPPGIPGSLGKCGDPGLPGPDGEPGIPGIGFPGPPGPKGDQGFPGTKGSLGCPGKMGEPGLPGKPGLPGAKGEPAVAMPGGPGTPGFPGERGNSGEHGEIGLPGLPGLPGTPGNEGLDGPRGDPGQPGPPGEQGPPGRCIEGPRGAQGLPGLNGLKGQQGRRGKTGPKGDPGIPGLDRSGFPGETGSPGIPGHQGEMGPLGQRGYPGNPGILGPPGEDGVIGMMGFPGAIGPPGPPGNPGTPGQRGSPGIPGVKGQRGTPGAKGEQGDKGNPGPSEISHVIGDKGEPGLKGFAGNPGEKGNRGVPGMPGLKGLKGLPGPAGPPGPRGDLGSTGNPGEPGLRGIPGSMGNMGMPGSKGKRGTLGFPGRAGRPGLPGIHGLQGDKGEPGYSEGTRPGPPGPTGDPGLPGDMGKKGEMGQPGPPGHLGPAGPEGAPGSPGSPGLPGKPGPHGDLGFKGIKGLLGPPGIRGPPGLPGFPGSPGPMGIRGDQGRDGIPGPAGEKGETGLLRAPPGPRGNPGAQGAKGDRGAPGFPGLPGRKGAMGDAGPRGPTGIEGFPGPPGLPGAIIPGQTGNRGPPGSRGSPGAPGPPGPPGSHVIGIKGDKGSMGHPGPKGPPGTAGDMGPPGRLGAPGTPGLPGPRGDPGFQGFPGVKGEKGNPGFLGSIGPPGPIGPKGPPGVRGDPGTLKIISLPGSPGPPGTPGEPGMQGEPGPPGPPGNLGPCGPRGKPGKDGKPGTPGPAGEKGNKGSKGEPGPAGSDGLPGLKGKRGDSGSPATWTTRGFVFTRHSQTTAIPSCPEGTVPLYSGFSFLFVQGNQRAHGQDLDALFVKVLRSP

SEQ ID NO: 5642 - protein, 1637 aa, Homo sapiens
MSARTAPRPQVLLLPLLLVLLAAAPAASKGCVCKDKGQCFCDGAKGEKGEKGFPGPPGSPGQKGFTGPEGLPGPQGPKSFRAIPSYSGGKSLQGISGLPGFSGSPGLPGTPGNTGPYGLVGVPGCSGSKGEQGFPGLPGTLGYPGIPGIHNLKIFKGAPAKEEDIELDAKGDPGLPGAPGPQGLPGPPGFPGPVGPPGPPGFFGFPGAMGPRGPKSFVLSSRISTKGEKGVKGLTGPPGPPGTVIVTLTGPDNRTDLKGEKGDKGAMGEPGPPGPSGLPGESYGSEKGAPGDPGLQGKPGKDGVPGFPGSEGVKGNRGFPGLMGEDGIKEEKRDVAIVSFSSKTEYYDTYQEKGDEGTPGPPGPRGARGPQGKNKFRCIPGSQGSSRPGLRGAPGWPGLKGSKGERGRPGKDAMGTPGSPGCAGSPGLPGSPGPPGPPGDIVFRKGPPGDHGLPGYLGSPGIPGVDGPKGEPGLLCTQCPYIPGPPGLPGLPGLHGVKGIPGRQGAAGLKGSPGSPGNTGLPGFPGFPGAQGDPGLKGEKGETLQPEGQVGVPGDPGLRGQPGRKGLDGIPGTPGVKGLPGPKGELALSGEKGDQGPPGDPGSPGSPGPAGPAGPPGYGPQGEPGLQGTQGVPGAPGPPGEAGPRGELSVSTPVPGPPGPPGPPGHPGPQGPPGIPGSLGKCGDPGLPGPDGEPGIPGIGFPGPPGPKGDQGFPGTKGSLGCPGKMGEPGLPGKPGLPGAKGEPAVAMPGGPGTPGFPGERGNSGEHGEIGLPGLPGLPGTPGNEGLDGPRGDPGQPGPPGEQGPPGRCIEGPRGAQGLPGLNGLKGQQGRRGKTGPKGDPGIPGLDRSGFPGETGSPGIPGHQGEMGPLGQRGYPGNPGILGPPGEDGVIGMMGFPGAIGPPGPPGNPGTPGQRGSPGIPGVKGQRGTPGAKGEQGDKGNPGPSEISHVIGDKGEPGLKGFAGNPGEKGNRGVPGMPGLKGLKGLPGPAGPPGPRGDLGSTGNPGEPGLRGIPGSMGNMGMPGSKGKRGTLGFPGRAGRPGLPGIHGLQGDKGEPGYSEGTRPGPPGPTGDPGLPGDMGKKGEMGQPGPPGHLGPAGPEGAPGSPGSPGLPGKPGPHGDLGFKGIKGLLGPPGIRGPPGLPGFPGSPGPMGIRGDQGRDGIPGPAGEKGETGLLRAPPGPRGNPGAQGAKGDRGAPGFPGLPGRKGAMGDAGPRGPTGIEGFPGPPGLPGAIIPGQTGNRGPPGSRGSPGAPGPPGPPGSHVIGIKGDKGSMGHPGPKGPPGTAGDMGPPGRLGAPGTPGLPGPRGDPGFQGFPGVKGEKGNPGFLGSIGPPGPIGPKGPPGVRGDPGTLKIISLPGSPGPPGTPGEPGMQGEPGPPGPPGNLGPCGPRGKPGKDGKPGTPGPAGEKGNKGSKGEPGPAGSDGLPGLKGKRGDSGSPATWTTRGFVFTRHSQTTAIPSCPEGTVPLYSGFSFLFVQGNQRAHGQDLGTLGSCLQRFTTMPFLFCNVNDVCNFASRNDYSYWLSTPALMPMNMAPITGRALEPYISRCTVCEGPAIAIAVHSQTTDIPPCPHGWISLWKGFSFIMKAYSINCESWGIRKNNKSLSGVHEEKTLKLKKTAELLFFILKNKVMTEHAVI

SEQ ID NO: 5643 - protein, 1494 aa, Homo sapiens
MSARTAPRPQVLLLPLLLVLLAAAPAASKGCVCKDKGQCFCDGAKGEKGEKGFPGPPGSPGQKGFTGPEGLPGPQGPKSFRAIPSYSGGKSLQGISGLPGFSGSPGLPGTPGNTGPYGLVGVPGCSGSKGEQGFPGLPGTLGYPGIPGIHNLKIFKGAPAKEEDIELDAKGDPGLPGAPGPQGLPGPPGFPGPVGPPGPPGFFGFPGAMGPRGPKSFVLSSRISTKGEKGVKGLTGPPGPPGTVIVTLTGPDNRTDLKGEKGDKGAMGEPGPPGPSGLPGESYGSEKGAPGDPGLQGKPGKDGVPGFPGSEGVKGNRGFPGLMGEDGIKEEKRDVAIVSFSSKTEYYDTYQEKGDEGTPGPPGPRGARGPQGKNKFRCIPGSQGSSRPGLRGAPGWPGLKGSKGERGRPGKDAMGTPGSPGCAGSPGLPGSPGPPGPPGDIVFRKGPPGDHGLPGYLGSPGIPGVDGPKGEPGLLCTQCPYIPGPPGLPGLPGLHGVKGIPGRQGAAGLKGSPGSPGNTGLPGFPGFPGAQGDPGLKGEKGETLQPEGQVGVPGDPGLRGQPGRKGLDGIPGTPGVKGLPGPKGELALSGEKGDQGPPGDPGSPGSPGPAGPAGPPGYGPQGEPGLQGTQGVPGAPGPPGEAGPRGELSVSTPVPGPPGPPGPPGHPGPQGPPGIPGSLGKCGDPGLPGPDGEPGIPGIGFPGPPGPKGDQGFPGTKGSLGCPGKMGEPGLPGKPGLPGAKGEPAVAMPGGPGTPGFPGERGNSGEHGEIGLPGLPGLPGTPGNEGLDGPRGDPGQPGPPGEQGPPGRCIEGPRGAQGLPGLNGLKGQQGRRGKTGPKGDPGIPGLDRSGFPGETGSPGIPGHQGEMGPLGQRGYPGNPGILGPPGEDGVIGMMGFPGAIGPPGPPGNPGTPGQRGSPGIPGVKGQRGTPGAKGEQGDKGNPGPSEISHVIGDKGEPGLKGFAGNPGEKGNRGVPGMPGLKGLKGLPGPAGPPGPRGDLGSTGNPGEPGLRGIPGSMGNMGMPGSKGKRGTLGFPGRAGRPGLPGIHGLQGDKGEPGYSEGTRPGPPGPTGDPGLPGDMGKKGEMGQPGPPGHLGPAGPEGAPGSPGSPGLPGKPGPHGDLGFKGIKGLLGPPGIRGPPGLPGFPGSPGPMGIRGDQGRDGIPGPAGEKGETGLLRAPPGPRGNPGAQGAKGDRGAPGFPGLPGRKGAMGDAGPRGPTGIEGFPGPPGLPGAIIPGQTGNRGPPGSRGSPGAPGPPGPPGSHVIGIKGDKGSMGHPGPKGPPGTAGDMGPPGRLGAPGTPGLPGPRGDPGFQGFPGVKGEKGNPGFLGSIGPPGPIGPKGPPGVRGDPGTLKIISLPGSPGPPGTPGEPGMQGEPGPPGPPGNLGPCGPRGKPGKDGKPGTPGPAGEKGNKGSKGEPGPAGSDGLPGLKGKRGDSGSPATWTTRGFVFTRHSQTTAIPSCPEGTVPLYSGFSFLFVQGNQRAHGQDLESLFHQL

SEQ ID NO: 5644 - protein, 1424 aa, Homo sapiens
MSARTAPRPQVLLLPLLLVLLAAAPAASKGCVCKDKGQCFCDGAKGEKGEKGFPGPPGSPGQKGFTGPEGLPGPQGPKSFRAIPSYSGGKSLQGISGLPGFSGSPGLPGTPGNTGPYGLVGVPGCSGSKGEQGFPGLPGTLGYPGIPGIHNLKIFKGAPAKEEDIELDAKGDPGLPGAPGPQGLPGPPGFPGPVGPPGPPGFFGFPGAMGPRGPKSFVLSSRISTKGEKGVKGLTGPPGPPGTVIVTLTGPDNRTDLKGEKGDKGAMGEPGPPGPSGLPGESYGSEKGAPGDPGLQGKPGKDGVPGFPGSEGVKGNRGFPGLMGEDGIKEEKRDVAIVSFSSKTEYYDTYQEKGDEGTPGPPGPRGARGPQGKNKFRCIPGSQGSSRPGLRGAPGWPGLKGSKGERGRPGKDAMGTPGSPGCAGSPGLPGSPGPPGPPGDIVFRKGPPGDHGLPGYLGSPGIPGVDGPKGEPGLLCTQCPYIPGPPGLPGLPGLHGVKGIPGRQGAAGLKGSPGSPGNTGLPGFPGFPGAQGDPGLKGEKGETLQPEGQVGVPGDPGLRGQPGRKGLDGIPGTPGVKGLPGPKGELALSGEKGDQGPPGDPGSPGSPGPAGPAGPPGYGPQGEPGLQGTQGVPGAPGPPGEAGPRGELSVSTPVPGPPGPPGPPGHPGPQGPPGIPGSLGKCGDPGLPGPDGEPGIPGIGFPGPPGPKGDQGFPGTKGSLGCPGKMGEPGLPGKPGLPGAKGEPAVAMPGGPGTPGFPGERGNSGEHGEIGLPGLPGLPGTPGNEGLDGPRGDPGQPGPPGEQGPPGRCIEGPRGAQGLPGLNGLKGQQGRRGKTGPKGDPGIPGLDRSGFPGETGSPGIPGHQGEMGPLGQRGYPGNPGILGPPGEDGVIGMMGFPGAIGPPGPPGNPGTPGQRGSPGIPGVKGQRGTPGAKGEQGDKGNPGPSEISHVIGDKGEPGLKGFAGNPGEKGNRGVPGMPGLKGLKGLPGPAGPPGPRGDLGSTGNPGEPGLRGIPGSMGNMGMPGSKGKRGTLGFPGRAGRPGLPGIHGLQGDKGEPGYSEGTRPGPPGPTGDPGLPGDMGKKGEMGQPGPPGHLGPAGPEGAPGSPGSPGLPGKPGPHGDLGFKGIKGLLGPPGIRGPPGLPGFPGSPGPMGIRGDQGRDGIPGPAGEKGETGLLRAPPGPRGNPGAQGAKGDRGAPGFPGLPGRKGAMGDAGPRGPTGIEGFPGPPGLPGAIIPGQTGNRGPPGSRGSPGAPGPPGPPGSHVIGIKGDKGSMGHPGPKGPPGTAGDMGPPGRLGAPGTPGLPGPRGDPGFQGFPGVKGEKGNPGFLGSIGPPGPIGPKGPPGVRGDPGTLKIISLPGSPGPPGTPGEPGMQGEPGPPGPPGNLGPCGPRGKPGKDGKPGTPGPAGEKGNKGSKGEPESLFHQL

SEQ ID NO: 5645 - protein, 1670 aa, Homo sapiens
MSARTAPRPQVLLLPLLLVLLAAAPAASKGCVCKDKGQCFCDGAKGEKGEKGFPGPPGSPGQKGFTGPEGLPGPQGPKGFPGLPGLTGSKGVRGISGLPGFSGSPGLPGTPGNTGPYGLVGVPGCSGSKGEQGFPGLPGTLGYPGIPGAAGLKGQKGAPAKEEDIELDAKGDPGLPGAPGPQGLPGPPGFPGPVGPPGPPGFFGFPGAMGPRGPKGHMGERVIGHKGERGVKGLTGPPGPPGTVIVTLTGPDNRTDLKGEKGDKGAMGEPGPPGPSGLPGESYGSEKGAPGDPGLQGKPGKDGVPGFPGSEGVKGNRGFPGLMGEDGIKGQKGDIGPPGFRGPTEYYDTYQEKGDEGTPGPPGPRGARGPQGPSGPPGVPGSPGSSRPGLRGAPGWPGLKGSKGERGRPGKDAMGTPGSPGCAGSPGLPGSPGPPGPPGDIVFRKGPPGDHGLPGYLGSPGIPGVDGPKGEPGLLCTQCPYIPGPPGLPGLPGLHGVKGIPGRQGAAGLKGSPGSPGNTGLPGFPGFPGAQGDPGLKGEKGETLQPEGQVGVPGDPGLRGQPGRKGLDGIPGTPGVKGLPGPKGELALSGEKGDQGPPGDPGSPGSPGPAGPAGPPGYGPQGEPGLQGTQGVPGAPGPPGEAGPRGELSVSTPVPGPPGPPGPPGHPGPQGPPGIPGSLGKCGDPGLPGPDGEPGIPGIGFPGPPGPKGDQGFPGTKGSLGCPGKMGEPGLPGKPGLPGAKGEPAVAMPGGPGTPGFPGERGNSGEHGEIGLPGLPGLPGTPGNEGLDGPRGDPGQPGPPGEQGPPGRCIEGPRGAQGLPGLNGLKGQQGRRGKTGPKGDPGIPGLDRSGFPGETGSPGIPGHQGEMGPLGQRGYPGNPGILGPPGEDGVIGMMGFPGAIGPPGPPGNPGTPGQRGSPGIPGVKGQRGTPGAKGEQGDKGNPGPSEISHVIGDKGEPGLKGFAGNPGEKGNRGVPGMPGLKGLKGLPGPAGPPGPRGDLGSTGNPGEPGLRGIPGSMGNMGMPGSKGKRGTLGFPGRAGRPGLPGIHGLQGDKGEPGYSEGTRPGPPGPTGDPGLPGDMGKKGEMGQPGPPGHLGPAGPEGAPGSPGSPGLPGKPGPHGDLGFKGIKGLLGPPGIRGPPGLPGFPGSPGPMGIRGDQGRDGIPGPAGEKGETGLLRAPPGPRGNPGAQGAKGDRGAPGFPGLPGRKGAMGDAGPRGPTGIEGFPGPPGLPGAIIPGQTGNRGPPGSRGSPGAPGPPGPPGSHVIGIKGDKGSMGHPGPKGPPGTAGDMGPPGRLGAPGTPGLPGPRGDPGFQGFPGVKGEKGNPGFLGSIGPPGPIGPKGPPGVRGDPGTLKIISLPGSPGPPGTPGEPGMQGEPGPPGPPGNLGPCGPRGKPGKDGKPGTPGPAGEKGNKGSKGEPGPAGSDGLPGLKGKRGDSGSPATWTTRGFVFTRHSQTTAIPSCPEGTVPLYSGFSFLFVQGNQRAHGQDLGTLGSCLQRFTTMPFLFCNVNDVCNFASRNDYSYWLSTPALMPMNMAPITGRALEPYISRCTVCEGPAIAIAVHSQTTDIPPCPHGWISLWKGFSFIMFTSAGSEGTGQALASPGSCLEEFRASPFLECHGRGTCNYYSNSYSFWLASLNPERMFRKPIPSTVKAGELEKIISRCQVCMKKRH

SEQ ID NO: 5646 - protein, 1499 aa, Homo sapiens
MMANWAEARPLLILIVLLGQFVSIKAQEEDEDEGYGEEIACTQNGQMYLNRDIWKPAPCQICVCDNGAILCDKIECQDVLDCADPVTPPGECCPVCSQTPGGGNTNFGRGRKGQKGEPGLVPVVTGIRGRPGPAGPPGSQGPRGERGPKGRPGPRGPQGIDGEPGVPGQPGAPGPPGHPSHPGPDGLSRPFSAQMAGLDEKSGLGSQVGLMPGSVGPVGPRGPQGLQGQQGGAGPTGPPGEPGDPGPMGPIGSRGPEGPPGKPGEDGEPGRNGNPGEVGFAGSPGARGFPGAPGLPGLKGHRGHKGLEGPKGEVGAPGSKGEAGPTGPMGAMGPLGPRGMPGERGRLGPQGAPGQRGAHGMPGKPGPMGPLGIPGSSGFPGNPGMKGEAGPTGARGPEGPQGQRGETGPPGPVGSPGLPGAIGTDGTPGAKGPTGSPGTSGPPGSAGPPGSPGPQGSTGPQGIRGQPGDPGVPGFKGEAGPKGEPGPHGIQGPIGPPGEEGKRGPRGDPGTVGPPGPVGERGAPGNRGFPGSDGLPGPKGAQGERGPVGSSGPKGSQGDPGRPGEPGLPGARGLTGNPGVQGPEGKLGPLGAPGEDGRPGPPGSIGIRGQPGSMGLPGPKGSSGDPGKPGEAGNAGVPGQRGAPGKDGEVGPSGPVGPPGLAGERGEQGPPGPTGFQGLPGPPGPPGEGGKPGDQGVPGDPGAVGPLGPRGERGNPGERGEPGITGLPGEKGMAGGHGPDGPKGSPGPSGTPGDTGPPGLQGMPGERGIAGTPGPKGDRGGIGEKGAEGTAGNDGARGLPGPLGPPGPAGPTGEKGEPGPRGLVGPPGSRGNPGSRGENGPTGAVGFAGPQGPDGQPGVKGEPGEPGQKGDAGSPGPQGLAGSPGPHGPNGVPGLKGGRGTQGPPGATGFPGSAGRVGPPGPAGAPGPAGPLGEPGKEGPPGLRGDPGSHGRVGDRGPAGPPGGPGDKGDPGEDGQPGPDGPPGPAGTTGQRGIVGMPGQRGERGMPGLPGPAGTPGKVGPTGATGDKGPPGPVGPPGSNGPVGEPGPEGPAGNDGTPGRDGAVGERGDRGDPGPAGLPGSQGAPGTPGPVGAPGDAGQRGDPGSRGPIGPPGRAGKRGLPGPQGPRGDKGDHGDRGDRGQKGHRGFTGLQGLPGPPGPNGEQGSAGIPGPFGPRGPPGPVGPSGKEGNPGPLGPIGPPGVRGSVGEAGPEGPPGEPGPPGPPGPPGHLTAALGDIMGHYDESMPDPLPEFTEDQAAPDDKNKTDPGVHATLKSLSSQIETMRSPDGSKKHPARTCDDLKLCHSAKQSGEYWIDPNQGSVEDAIKVYCNMETGETCISANPSSVPRKTWWASKSPDNKPVWYGLDMNRGSQFAYGDHQSPNTAITQMTFLRLLSKEASQNITYICKNSVGYMDDQAKNLKKAVVLKGANDLDIKAEGNIRFRYIVLQDTCSKRNGNVGKTVFEYRTQNVARLPIIDLAPVDVGGTDQEFGVEIGPVCFV

SEQ ID NO: 5647 - protein, 1139 aa, Homo sapiens
LPGRRHRLGPPGSQGPRGERGPKGRPGPRGPQGIDGEPGVPGQPGAPGGAGPTGPPGEPGDPGPMGPIGSRGPEGPPGKPGEDGEPGRNGNPGEVGFAGSPGARGFPGAPGLPGLKGHRGHKGLEGPKGEVGAPGSKGEAGPTGPRGDPGTVGPPGPVGERGAPGNRGFPGSDGLPGPKGAQGERGPVGSSGPKGSQGDPGRPGEPGLPGARGLTGNPGVQGPEGKLGPLGAPGEDGRPGPPGSIGIRGQPGSMGLPGPKGSSGDPGKPGEAGNAGVPGQRGAPGKDGEVGPSGPVGPPGLAGERGEQGPPGPTGFQGLPGPPGPPGEGGKPGDQGVPGDPGAVGPLGPRGERGNPGERGEPGITGLPGEKGMAGGHGPDGPKGSPGPSGTPGDTGPPGLQGMPGERGIAGTPGPKGDRGGIGEKGAEGTAGNDGARGLPGPLGPPGPAGPTGEKGEPGPRGLVGPPGSRGNPGSRGENGPTGAVGFAGPQGPDGQPGVKGEPGEPGQKGDAGSPGPQGLAGSPGPHGPNGVPGLKGGRGTQGPPGATGFPGSAGRVGPPGPAGAPGPAGPLGEPGKEGPPGLRGDPGSHGRVGDRGPAGPPGGPGDKGDPGEDGQPGPDGPPGPAGTTGQRGIVGMPGQRGERGMPGLPGPAGTPGKVGPTGATGDKGPPGPVGPPGSNGPVGEPGPEGPAGNDGTPGRDGAVGERGDRGDPGPAGLPGSQGAPGTPGPVGAPGDAGQRGDPGSRGPIGPPGRAGKRGLPGPQGPRGDKGDHGDRGDRGQKGHRGFTGLQGLPGPPGPNGEQGSAGIPGPFGPRGPPGPVGPSGKEGNPGPLGPIGPPGVRGSVGEAGPEGPPGEPGPPGPPGPPGHLTAALGDIMGHYDESMPDPLPEFTEDQAAPDDKNKTDPGVHATLKSLSSQIETMRSPDGSKKHPARTCDDLKLCHSAKQSGEYWIDPNQGSVEDAIKVYCNMETGETCISANPSSVPRKTWWASKSPDNKPVWYGLDMNRGSQFAYGDHQSPNTAITQMTFLRLLSKEASQNITYICKNSVGYMDDQAKNLKKAVVLKGANDLDIKAEGNIRFRYIVLQDTCSKRNGNVGKTVFEYRTQNVARLPIIDLAPVDVGGTDQEFGVEIGPVCFV

SEQ ID NO: 5648 - protein, 1767 aa, Homo sapiens
MEPWSSRWKTKRWLWDFTVTTLALTFLFQAREVRGAAPVDVLKALDFHNSPEGISKTTGFCTNRKNSKGSDTAYRVSKQAQLSAPTKQLFPGGTFPEDFSILFTVKPKKGIQSFLLSIYNEHGIQQIGVEVGRSPVFLFEDHTGKPAPEDYPLFRTVNIADGKWHRVAISVEKKTVTMIVDCKKKTTKPLDRSERAIVDTNGITVFGTRILDEEVFEGDIQQFLITGDPKAAYDYCEHYSPDCDSSAPKAAQAQEPQIDEANIVDDFQEYNYGTMESYQTEAPRHVSGTNEPNPVEEIFTEEYLTGEDYDSQRKNSEDTLYENKEIDGRDSDLLVDGDLGEYDFYEYKEYEDKPTSPPNEEFGPGVPAETDITETSINGHGAYGEKGQKGEPAVVEPGMLVEGPPGPAGPAGIMGPPGLQGPTGPPGDPGDRGPPGRPGLPGADGLPGPPGTMLMLPFRYGGDGSKGPTISAQEAQAQAILQQARIALRGPPGPMGLTGRPGPVGGPGSSGAKGESGDPGPQGPRGVQGPPGPTGKPGKRGRPGADGGRGMPGEPGAKGDRGFDGLPGLPGDKGHRGERGPQGPPGPPGDDGMRGEDGEIGPRGLPGEAGPRGLLGPRGTPGAPGQPGMAGVDGPPGPKGNMGPQGEPGPPGQQGNPGPQGLPGPQGPIGPPGEKGPQGKPGLAGLPGADGPPGHPGKEGQSGEKGALGPPGPQGPIGYPGPRGVKGADGVRGLKGSKGEKGEDGFPGFKGDMGLKGDRGEVGQIGPRGEDGPEGPKGRAGPTGDPGPSGQAGEKGKLGVPGLPGYPGRQGPKGSTGFPGFPGANGEKGARGVAGKPGPRGQRGPTGPRGSRGARGPTGKPGPKGTSGGDGPPGPPGERGPQGPQGPVGFPGPKGPPGPPGKDGLPGHPGQRGETGFQGKTGPPGPGGVVGPQGPTGETGPIGERGHPGPPGPPGEQGLPGAAGKEGAKGDPGPQGISGKDGPAGLRGFPGERGLPGAQGAPGLKGGEGPQGPPGPVGSPGERGSAGTAGPIGLPGRPGPQGPPGPAGEKGAPGEKGPQGPAGRDGVQGPVGLPGPAGPAGSPGEDGDKGEIGEPGQKGSKGDKGENGPPGPPGLQGPVGAPGIAGGDGEPGPRGQQGMFGQKGDEGARGFPGPPGPIGLQGLPGPPGEKGENGDVGPMGPPGPPGPRGPQGPNGADGPQGPPGSVGSVGGVGEKGEPGEAGNPGPPGEAGVGGPKGERGEKGEAGPPGAAGPPGAKGPPGDDGPKGNPGPVGFPGDPGPPGEPGPAGQDGVGGDKGEDGDPGQPGPPGPSGEAGPPGPPGKRGPPGAAGAEGRQGEKGAKGEAGAEGPPGKTGPVGPQGPAGKPGPEGLRGIPGPVGEQGLPGAAGQDGPPGPMGPPGLPGLKGDPGSKGEKGHPGLIGLIGPPGEQGEKGDRGLPGTQGSPGAKGDGGIPGPAGPLGPPGPPGLPGPQGPKGNKGSTGPAGQKGDSGLPGPPGSPGPPGEVIQPLPILSSKKTRRHTEGMQADADDNILDYSDGMEEIFGSLNSLKQDIEHMKFPMGTQTNPARTCKDLQLSHPDFPDGEYWIDPNQGCSGDSFKVYCNFTSGGETCIYPDKKSEGVRISSWPKEKPGSWFSEFKRGKLLSYLDVEGNSINMVQMTFLKLLTASARQNFTYHCHQSAAWYDVSSGSYDKALRFLGSNDEEMSYDNNPFIKTLYDGCASRKGYEKTVIEINTPKIDQVPIVDVMINDFGDQNQKFGFEVGPVCFLG

SEQ ID NO: 5649 - protein, 1818 aa, Homo sapiens
MEPWSSRWKTKRWLWDFTVTTLALTFLFQAREVRGAAPVDVLKALDFHNSPEGISKTTGFCTNRKNSKGSDTAYRVSKQAQLSAPTKQLFPGGTFPEDFSILFTVKPKKGIQSFLLSIYNEHGIQQIGVEVGRSPVFLFEDHTGKPAPEDYPLFRTVNIADGKWHRVAISVEKKTVTMIVDCKKKTTKPLDRSERAIVDTNGITVFGTRILDEEVFEGDIQQFLITGDPKAAYDYCEHYSPDCDSSAPKAAQAQEPQIDEKKKSNFKKKMRTVATKSKEKSKKFTPPKSEKFSSKKKKSYQASAKAKLGVKANIVDDFQEYNYGTMESYQTEAPRHVSGTNEPNPVEEIFTEEYLTGEDYDSQRKNSEDTLYENKEIDGRDSDLLVDGDLGEYDFYEYKEYEDKPTSPPNEEFGPGVPAETDITETSINGHGAYGEKGQKGEPAVVEPGMLVEGPPGPAGPAGIMGPPGLQGPTGPPGDPGDRGPPGRPGLPGADGLPGPPGTMLMLPFRYGGDGSKGPTISAQEAQAQAILQQARIALRGPPGPMGLTGRPGPVGGPGSSGAKGESGDPGPQGPRGVQGPPGPTGKPGKRGRPGADGGRGMPGEPGAKGDRGFDGLPGLPGDKGHRGERGPQGPPGPPGDDGMRGEDGEIGPRGLPGEAGPRGLLGPRGTPGAPGQPGMAGVDGPPGPKGNMGPQGEPGPPGQQGNPGPQGLPGPQGPIGPPGEKGPQGKPGLAGLPGADGPPGHPGKEGQSGEKGALGPPGPQGPIGYPGPRGVKGADGVRGLKGSKGEKGEDGFPGFKGDMGLKGDRGEVGQIGPRGEDGPEGPKGRAGPTGDPGPSGQAGEKGKLGVPGLPGYPGRQGPKGSTGFPGFPGANGEKGARGVAGKPGPRGQRGPTGPRGSRGARGPTGKPGPKGTSGGDGPPGPPGERGPQGPQGPVGFPGPKGPPGPPGKDGLPGHPGQRGETGFQGKTGPPGPGGVVGPQGPTGETGPIGERGHPGPPGPPGEQGLPGAAGKEGAKGDPGPQGISGKDGPAGLRGFPGERGLPGAQGAPGLKGGEGPQGPPGPVGSPGERGSAGTAGPIGLPGRPGPQGPPGPAGEKGAPGEKGPQGPAGRDGVQGPVGLPGPAGPAGSPGEDGDKGEIGEPGQKGSKGDKGENGPPGPPGLQGPVGAPGIAGGDGEPGPRGQQGMFGQKGDEGARGFPGPPGPIGLQGLPGPPGEKGENGDVGPMGPPGPPGPRGPQGPNGADGPQGPPGSVGSVGGVGEKGEPGEAGNPGPPGEAGVGGPKGERGEKGEAGPPGAAGPPGAKGPPGDDGPKGNPGPVGFPGDPGPPGEPGPAGQDGVGGDKGEDGDPGQPGPPGPSGEAGPPGPPGKRGPPGAAGAEGRQGEKGAKGEAGAEGPPGKTGPVGPQGPAGKPGPEGLRGIPGPVGEQGLPGAAGQDGPPGPMGPPGLPGLKGDPGSKGEKGHPGLIGLIGPPGEQGEKGDRGLPGTQGSPGAKGDGGIPGPAGPLGPPGPPGLPGPQGPKGNKGSTGPAGQKGDSGLPGPPGSPGPPGEVIQPLPILSSKKTRRHTEGMQADADDNILDYSDGMEEIFGSLNSLKQDIEHMKFPMGTQTNPARTCKDLQLSHPDFPDGEYWIDPNQGCSGDSFKVYCNFTSGGETCIYPDKKSEGVRISSWPKEKPGSWFSEFKRGKLLSYLDVEGNSINMVQMTFLKLLTASARQNFTYHCHQSAAWYDVSSGSYDKALRFLGSNDEEMSYDNNPFIKTLYDGCASRKGYEKTVIEINTPKIDQVPIVDVMINDFGDQNQKFGFEVGPVCFLG

SEQ ID NO: 5650 - protein, 1026 aa, Homo sapiens
MVSEVSRDLKVKREKLVKLAQEGKMALKDPKVEQAQLETQVLQVKQEKRENLEFQDYQDIQEDKVQRISDVIGSTGFPGFPGANGEKGARGVAGKPGPRGQRGPTGPRGSRGARGPTGKPGPKGTSGGDGPPGPPGERGPQGPQGPVGFPGPKGPPGPPGKDGLPGHPGQRGETGFQGKTGPPGPGGVVGPQGPTGETGPIGERGHPGPPGPPGEQGLPGAAGKEGAKGDPGPQGISGKDGPAGLRGFPGERGLPGAQGAPGLKGGEGPQGPPGPVGSPGERGSAGTAGPIGLPGRPGPQGPPGPAGEKGAPGEKGPQGPAGRDGVQGPVGLPGPAGPAGSPGEDGDKGEIGEPGQKGSKGDKGENGPPGPPGLQGPVGAPGIAGGDGEPGPRGQQGMFGQKGDEGARGFPGPPGPIGLQGLPGPPGEKGENGDVGPMGPPGPPGPRGPQGPNGADGPQGPPGSVGSVGGVGEKGEPGEAGNPGPPGEAGVGGPKGERGEKGEAGPPGAAGPPGAKGPPGDDGPKGNPGPVGFPGDPGPPGEPGPAGQDGVGGDKGEDGDPGQPGPPGPSGEAGPPGPPGKRGPPGAAGAEGRQGEKGAKGEAGAEGPPGKTGPVGPQGPAGKPGPEGLRGIPGPVGEQGLPGAAGQDGPPGPMGPPGLPGLKGDPGSKGEKGHPGLIGLIGPPGEQGEKGDRGLPGTQGSPGAKGDGGIPGPAGPLGPPGPPGLPGPQGPKGNKGSTGPAGQKGDSGLPGPPGSPGPPGEVIQPLPILSSKKTRRHTEGMQADADDNILDYSDGMEEIFGSLNSLKQDIEHMKFPMGTQTNPARTCKDLQLSHPDFPDGEYWIDPNQGCSGDSFKVYCNFTSGGETCIYPDKKSEGVRISSWPKEKPGSWFSEFKRGKLLSYLDVEGNSINMVQMTFLKLLTASARQNFTYHCHQSAAWYDVSSGSYDKALRFLGSNDEEMSYDNNPFIKTLYDGCASRKGYEKTVIEINTPKIDQVPIVDVMINDFGDQNQKFGFEVGPVCFLG

SEQ ID NO: 5651 - protein, 1806 aa, Homo sapiens
MEPWSSRWKTKRWLWDFTVTTLALTFLFQAREVRGAAPVDVLKALDFHNSPEGISKTTGFCTNRKNSKGSDTAYRVSKQAQLSAPTKQLFPGGTFPEDFSILFTVKPKKGIQSFLLSIYNEHGIQQIGVEVGRSPVFLFEDHTGKPAPEDYPLFRTVNIADGKWHRVAISVEKKTVTMIVDCKKKTTKPLDRSERAIVDTNGITVFGTRILDEEVFEGDIQQFLITGDPKAAYDYCEHYSPDCDSSAPKAAQAQEPQIDEYAPEDIIEYDYEYGEAEYKEAESVTEGPTVTEETIAQTEANIVDDFQEYNYGTMESYQTEAPRHVSGTNEPNPVEEIFTEEYLTGEDYDSQRKNSEDTLYENKEIDGRDSDLLVDGDLGEYDFYEYKEYEDKPTSPPNEEFGPGVPAETDITETSINGHGAYGEKGQKGEPAVVEPGMLVEGPPGPAGPAGIMGPPGLQGPTGPPGDPGDRGPPGRPGLPGADGLPGPPGTMLMLPFRYGGDGSKGPTISAQEAQAQAILQQARIALRGPPGPMGLTGRPGPVGGPGSSGAKGESGDPGPQGPRGVQGPPGPTGKPGKRGRPGADGGRGMPGEPGAKGDRGFDGLPGLPGDKGHRGERGPQGPPGPPGDDGMRGEDGEIGPRGLPGEAGPRGLLGPRGTPGAPGQPGMAGVDGPPGPKGNMGPQGEPGPPGQQGNPGPQGLPGPQGPIGPPGEKGPQGKPGLAGLPGADGPPGHPGKEGQSGEKGALGPPGPQGPIGYPGPRGVKGADGVRGLKGSKGEKGEDGFPGFKGDMGLKGDRGEVGQIGPRGEDGPEGPKGRAGPTGDPGPSGQAGEKGKLGVPGLPGYPGRQGPKGSTGFPGFPGANGEKGARGVAGKPGPRGQRGPTGPRGSRGARGPTGKPGPKGTSGGDGPPGPPGERGPQGPQGPVGFPGPKGPPGPPGKDGLPGHPGQRGETGFQGKTGPPGPGGVVGPQGPTGETGPIGERGHPGPPGPPGEQGLPGAAGKEGAKGDPGPQGISGKDGPAGLRGFPGERGLPGAQGAPGLKGGEGPQGPPGPVGSPGERGSAGTAGPIGLPGRPGPQGPPGPAGEKGAPGEKGPQGPAGRDGVQGPVGLPGPAGPAGSPGEDGDKGEIGEPGQKGSKGDKGENGPPGPPGLQGPVGAPGIAGGDGEPGPRGQQGMFGQKGDEGARGFPGPPGPIGLQGLPGPPGEKGENGDVGPMGPPGPPGPRGPQGPNGADGPQGPPGSVGSVGGVGEKGEPGEAGNPGPPGEAGVGGPKGERGEKGEAGPPGAAGPPGAKGPPGDDGPKGNPGPVGFPGDPGPPGEPGPAGQDGVGGDKGEDGDPGQPGPPGPSGEAGPPGPPGKRGPPGAAGAEGRQGEKGAKGEAGAEGPPGKTGPVGPQGPAGKPGPEGLRGIPGPVGEQGLPGAAGQDGPPGPMGPPGLPGLKGDPGSKGEKGHPGLIGLIGPPGEQGEKGDRGLPGTQGSPGAKGDGGIPGPAGPLGPPGPPGLPGPQGPKGNKGSTGPAGQKGDSGLPGPPGSPGPPGEVIQPLPILSSKKTRRHTEGMQADADDNILDYSDGMEEIFGSLNSLKQDIEHMKFPMGTQTNPARTCKDLQLSHPDFPDGEYWIDPNQGCSGDSFKVYCNFTSGGETCIYPDKKSEGVRISSWPKEKPGSWFSEFKRGKLLSYLDVEGNSINMVQMTFLKLLTASARQNFTYHCHQSAAWYDVSSGSYDKALRFLGSNDEEMSYDNNPFIKTLYDGCASRKGYEKTVIEINTPKIDQVPIVDVMINDFGDQNQKFGFEVGPVCFLG

SEQ ID NO: 5652 - protein, 1690 aa, Homo sapiens
MEPWSSRWKTKRWLWDFTVTTLALTFLFQAREVRGAAPVDVLKALDFHNSPEGISKTTGFCTNRKNSKGSDTAYRVSKQAQLSAPTKQLFPGGTFPEDFSILFTVKPKKGIQSFLLSIYNEHGIQQIGVEVGRSPVFLFEDHTGKPAPEDYPLFRTVNIADGKWHRVAISVEKKTVTMIVDCKKKTTKPLDRSERAIVDTNGITVFGTRILDEEVFEGDIQQFLITGDPKAAYDYCEHYSPDCDSSAPKAAQAQEPQIDEYAPEDIIEYDYEYGEAEYKEAESVTEGPTVTEETIAQTEINGHGAYGEKGQKGEPAVVEPGMLVEGPPGPAGPAGIMGPPGLQGPTGPPGDPGDRGPPGRPGLPGADGLPGPPGTMLMLPFRYGGDGSKGPTISAQEAQAQAILQQARIALRGPPGPMGLTGRPGPVGGPGSSGAKGESGDPGPQGPRGVQGPPGPTGKPGKRGRPGADGGRGMPGEPGAKGDRGFDGLPGLPGDKGHRGERGPQGPPGPPGDDGMRGEDGEIGPRGLPGEAGPRGLLGPRGTPGAPGQPGMAGVDGPPGPKGNMGPQGEPGPPGQQGNPGPQGLPGPQGPIGPPGEKGPQGKPGLAGLPGADGPPGHPGKEGQSGEKGALGPPGPQGPIGYPGPRGVKGADGVRGLKGSKGEKGEDGFPGFKGDMGLKGDRGEVGQIGPRGEDGPEGPKGRAGPTGDPGPSGQAGEKGKLGVPGLPGYPGRQGPKGSTGFPGFPGANGEKGARGVAGKPGPRGQRGPTGPRGSRGARGPTGKPGPKGTSGGDGPPGPPGERGPQGPQGPVGFPGPKGPPGPPGKDGLPGHPGQRGETGFQGKTGPPGPGGVVGPQGPTGETGPIGERGHPGPPGPPGEQGLPGAAGKEGAKGDPGPQGISGKDGPAGLRGFPGERGLPGAQGAPGLKGGEGPQGPPGPVGSPGERGSAGTAGPIGLPGRPGPQGPPGPAGEKGAPGEKGPQGPAGRDGVQGPVGLPGPAGPAGSPGEDGDKGEIGEPGQKGSKGDKGENGPPGPPGLQGPVGAPGIAGGDGEPGPRGQQGMFGQKGDEGARGFPGPPGPIGLQGLPGPPGEKGENGDVGPMGPPGPPGPRGPQGPNGADGPQGPPGSVGSVGGVGEKGEPGEAGNPGPPGEAGVGGPKGERGEKGEAGPPGAAGPPGAKGPPGDDGPKGNPGPVGFPGDPGPPGEPGPAGQDGVGGDKGEDGDPGQPGPPGPSGEAGPPGPPGKRGPPGAAGAEGRQGEKGAKGEAGAEGPPGKTGPVGPQGPAGKPGPEGLRGIPGPVGEQGLPGAAGQDGPPGPMGPPGLPGLKGDPGSKGEKGHPGLIGLIGPPGEQGEKGDRGLPGTQGSPGAKGDGGIPGPAGPLGPPGPPGLPGPQGPKGNKGSTGPAGQKGDSGLPGPPGSPGPPGEVIQPLPILSSKKTRRHTEGMQADADDNILDYSDGMEEIFGSLNSLKQDIEHMKFPMGTQTNPARTCKDLQLSHPDFPDGEYWIDPNQGCSGDSFKVYCNFTSGGETCIYPDKKSEGVRISSWPKEKPGSWFSEFKRGKLLSYLDVEGNSINMVQMTFLKLLTASARQNFTYHCHQSAAWYDVSSGSYDKALRFLGSNDEEMSYDNNPFIKTLYDGCASRKGYEKTVIEINTPKIDQVPIVDVMINDFGDQNQKFGFEVGPVCFLG

SEQ ID NO: 5653 - protein, 1519 aa, Homo sapiens
MAPYPCGCHILLLLFCCLAAARANLLNLNWLWFNNEDTSHAATTIPEPQGPLPVQPTADTTTHVTPRNGSTEPATAPGSPEPPSELLEDGQDTPTSAESPDAPEENIAGVGAEILNVAKGIRSFVQLWNDTVPTESLARAETLVLETPVGPLALAGPSSTPQENGTTLWPSRGIPSSPGAHTTEAGTLPAPTPSPPSLGRPWAPLTGPSVPPPSSERISEEVGLLQLLGDPPPQQVTQTDDPDVGLAYVFGPDANSGQVARYHFPSLFFRDFSLLFHIRPATEGPGVLFAITDSAQAMVLLGVKLSGVQDGHQDISLLYTEPGAGQTHTAASFRLPAFVGQWTHLALSVAGGFVALYVDCEEFQRMPLARSSRGLELEPGAGLFVAQAGGADPDKFQGVIAELKVRRDPQVSPMHCLDEEGDDSDGASGDSGSGLGDARELLREETGAALKPRLPAPPPVTTPPLAGGSSTEDSRSEEVEEQTTVASLGAQTLPGSDSVSTWDGSVRTPGGRVKEGGLKGQKGEPGVPGPPGRAGPPGSPCLPGPPGLPCPVSPLGPAGPALQTVPGPQGPPGPPGRDGTPGRDGEPGDPGEDGKPGDTGPQGFPGTPGDVGPKGDKGDPGVGERGPPGPQGPPGPPGPSFRHDKLTFIDMEGSGFGGDLEALRGPRGFPGPPGPPGVPGLPGEPGRFGVNSSDVPGPAGLPGVPGREGPPGFPGLPGPPGPPGREGPPGRTGQKGSLGEAGAPGHKGSKGAPGPAGARGESGLAGAPGPAGPPGPPGPPGPPGPGLPAGFDDMEGSGGPFWSTARSADGPQGPPGLPGLKGDPGVPGLPGAKGEVGADGVPGFPGLPGREGIAGPQGPKGDRGSRGEKGDPGKDGVGQPGLPGPPGPPGPVVYVSEQDGSVLSVPGPEGRPGFAGFPGPAGPKGNLGSKGERGSPGPKGEKGEPGSIFSPDGGALGPAQKGAKGEPGFRGPPGPYGRPGYKGEIGFPGRPGRPGMNGLKGEKGEPGDASLGFGMRGMPGPPGPPGPPGPPGTPVYDSNVFAESSRPGPPGLPGNQGPPGPKGAKGEVGPPGPPGQFPFDFLQLEAEMKGEKGDRGDAGQKGERGEPGGGGFFGSSLPGPPGPPGPPGPRGYPGIPGPKGESIRGQPGPPGPQGPPGIGYEGRQGPPGPPGPPGPPSFPGPHRQTISVPGPPGPPGPPGPPGTMGASSGVRLWATRQAMLGQVHEVPEGWLIFVAEQEELYVRVQNGFRKVQLEARTPLPRGTDNEVAALQPPVVQLHDSNPYPRREHPHPTARPWRADDILASPPRLPEPQPYPGAPHHSSYVHLRPARPTSPPAHSHRDFQPVLHLVALNSPLSGGMRGIRGADFQCFQQARAVGLAGTFRAFLSSRLQDLYSIVRRADRAAVPIVNLKDELLFPSWEALFSGSEGPLKPGARIFSFDGKDVLRHPTWPQKSVWHGSDPNGRRLTESYCETWRTEAPSATGQASSLLGGRLLGQSAASCHHAYIVLCIENSFMTASK

SEQ ID NO: 5654 - protein, 1754 aa, Homo sapiens
MAPYPCGCHILLLLFCCLAAARANLLNLNWLWFNNEDTSHAATTIPEPQGPLPVQPTADTTTHVTPRNGSTEPATAPGSPEPPSELLEDGQDTPTSAESPDAPEENIAGVGAEILNVAKGIRSFVQLWNDTVPTESLARAETLVLETPVGPLALAGPSSTPQENGTTLWPSRGIPSSPGAHTTEAGTLPAPTPSPPSLGRPWAPLTGPSVPPPSSGRASLSSLLGGAPPWGSLQDPDSQGLSPAAAAPSQQLQRPDVRLRTPLLHPLVMGSLGKHAAPSAFSSGLPGALSQVAVTTLTRDSGAWVSHVANSVGPGLANNSALLGADPEAPAGRCLPLPPSLPVCGHLGISRFWLPNHLHHESGEQVRAGARAWGGLLQTHCHPFLAWFFCLLLVPPCGSVPPPAPPPCCQFCEALQDACWSRLGGGRLPVACASLPTQEDGYCVLIGPAAERISEEVGLLQLLGDPPPQQVTQTDDPDVGLAYVFGPDANSGQVARYHFPSLFFRDFSLLFHIRPATEGPGVLFAITDSAQAMVLLGVKLSGVQDGHQDISLLYTEPGAGQTHTAASFRLPAFVGQWTHLALSVAGGFVALYVDCEEFQRMPLARSSRGLELEPGAGLFVAQAGGADPDKFQGVIAELKVRRDPQVSPMHCLDEEGDDSDGASGDSGSGLGDARELLREETGAALKPRLPAPPPVTTPPLAGGSSTEDSRSEEVEEQTTVASLGAQTLPGSDSVSTWDGSVRTPGGRVKEGGLKGQKGEPGVPGPPGRAGPPGSPCLPGPPGLPCPVSPLGPAGPALQTVPGPQGPPGPPGRDGTPGRDGEPGDPGEDGKPGDTGPQGFPGTPGDVGPKGDKGDPGVGERGPPGPQGPPGPPGPSFRHDKLTFIDMEGSGFGGDLEALRGPRGFPGPPGPPGVPGLPGEPGRFGVNSSDVPGPAGLPGVPGREGPPGFPGLPGPPGPPGREGPPGRTGQKGSLGEAGAPGHKGSKGAPGPAGARGESGLAGAPGPAGPPGPPGPPGPPGPGLPAGFDDMEGSGGPFWSTARSADGPQGPPGLPGLKGDPGVPGLPGAKGEVGADGVPGFPGLPGREGIAGPQGPKGDRGSRGEKGDPGKDGVGQPGLPGPPGPPGPVVYVSEQDGSVLSVPGPEGRPGFAGFPGPAGPKGNLGSKGERGSPGPKGEKGEPGSIFSPDGGALGPAQKGAKGEPGFRGPPGPYGRPGYKGEIGFPGRPGRPGMNGLKGEKGEPGDASLGFGMRGMPGPPGPPGPPGPPGTPVYDSNVFAESSRPGPPGLPGNQGPPGPKGAKGEVGPPGPPGQFPFDFLQLEAEMKGEKGDRGDAGQKGERGEPGGGGFFGSSLPGPPGPPGPPGPRGYPGIPGPKGESIRGQPGPPGPQGPPGIGYEGRQGPPGPPGPPGPPSFPGPHRQTISVPGPPGPPGPPGPPGTMGASSGVRLWATRQAMLGQVHEVPEGWLIFVAEQEELYVRVQNGFRKVQLEARTPLPRGTDNEVAALQPPVVQLHDSNPYPRREHPHPTARPWRADDILASPPRLPEPQPYPGAPHHSSYVHLRPARPTSPPAHSHRDFQPVLHLVALNSPLSGGMRGIRGADFQCFQQARAVGLAGTFRAFLSSRLQDLYSIVRRADRAAVPIVNLKDELLFPSWEALFSGSEGPLKPGARIFSFDGKDVLRHPTWPQKSVWHGSDPNGRRLTESYCETWRTEAPSATGQASSLLGGRLLGQSAASCHHAYIVLCIENSFMTASK

SEQ ID NO: 5655 - protein, 1339 aa, Homo sapiens
MAPRCPWPWPRRRRLLDVLAPLVLLLGVRAASAEPERISEEVGLLQLLGDPPPQQVTQTDDPDVGLAYVFGPDANSGQVARYHFPSLFFRDFSLLFHIRPATEGPGVLFAITDSAQAMVLLGVKLSGVQDGHQDISLLYTEPGAGQTHTAASFRLPAFVGQWTHLALSVAGGFVALYVDCEEFQRMPLARSSRGLELEPGAGLFVAQAGGADPDKFQGVIAELKVRRDPQVSPMHCLDEEGDDSDGASGDSGSGLGDARELLREETGAALKPRLPAPPPVTTPPLAGGSSTEDSRSEEVEEQTTVASLGAQTLPGSDSVSTWDGSVRTPGGRVKEGGLKGQKGEPGVPGPPGRAGPPGSPCLPGPPGLPCPVSPLGPAGPALQTVPGPQGPPGPPGRDGTPGRDGEPGDPGEDGKPGDTGPQGFPGTPGDVGPKGDKGDPGVGERGPPGPQGPPGPPGPSFRHDKLTFIDMEGSGFGGDLEALRGPRGFPGPPGPPGVPGLPGEPGRFGVNSSDVPGPAGLPGVPGREGPPGFPGLPGPPGPPGREGPPGRTGQKGSLGEAGAPGHKGSKGAPGPAGARGESGLAGAPGPAGPPGPPGPPGPPGPGLPAGFDDMEGSGGPFWSTARSADGPQGPPGLPGLKGDPGVPGLPGAKGEVGADGVPGFPGLPGREGIAGPQGPKGDRGSRGEKGDPGKDGVGQPGLPGPPGPPGPVVYVSEQDGSVLSVPGPEGRPGFAGFPGPAGPKGNLGSKGERGSPGPKGEKGEPGSIFSPDGGALGPAQKGAKGEPGFRGPPGPYGRPGYKGEIGFPGRPGRPGMNGLKGEKGEPGDASLGFGMRGMPGPPGPPGPPGPPGTPVYDSNVFAESSRPGPPGLPGNQGPPGPKGAKGEVGPPGPPGQFPFDFLQLEAEMKGEKGDRGDAGQKGERGEPGGGGFFGSSLPGPPGPPGPPGPRGYPGIPGPKGESIRGQPGPPGPQGPPGIGYEGRQGPPGPPGPPGPPSFPGPHRQTISVPGPPGPPGPPGPPGTMGASSGVRLWATRQAMLGQVHEVPEGWLIFVAEQEELYVRVQNGFRKVQLEARTPLPRGTDNEVAALQPPVVQLHDSNPYPRREHPHPTARPWRADDILASPPRLPEPQPYPGAPHHSSYVHLRPARPTSPPAHSHRDFQPVLHLVALNSPLSGGMRGIRGADFQCFQQARAVGLAGTFRAFLSSRLQDLYSIVRRADRAAVPIVNLKDELLFPSWEALFSGSEGPLKPGARIFSFDGKDVLRHPTWPQKSVWHGSDPNGRRLTESYCETWRTEAPSATGQASSLLGGRLLGQSAASCHHAYIVLCIENSFMTASK

SEQ ID NO: 5656 - protein, 1339 aa, Homo sapiens
MAPRCPWPWPRRRRLLDVLAPLVLLLGVRAASAEPERISEEVGLLQLLGDPPPQQVTQTDDPDVGLAYVFGPDANSGQVARYHFPSLFFRDFSLLFHIRPATEGPGVLFAITDSAQAMVLLGVKLSGVQDGHQDISLLYTEPGAGQTHTAASFRLPAFVGQWTHLALSVAGGFVALYVDCEEFQRMPLARSSRGLELEPGAGLFVAQAGGADPDKFQGVIAELKVRRDPQVSPMHCLDEEGDDSDGASGDSGSGLGDARELLREETGAALKPRLPAPPPVTTPPLAGGSSTEDSRSEEVEEQTTVASLGAQTLPGSDSVSTWDGSVRTPGGRVKEGGLKGQKGEPGVPGPPGRAGPPGSPCLPGPPGLPCPVSPLGPAGPALQTVPGPQGPPGPPGRDGTPGRDGEPVSPHVPPSPGDTGPQGFPGTPGDVGPKGDKGDPGVGERGPPGPQGPPGPPGPSFRHDKLTFIDMEGSGFGGDLEALRGPRGFPGPPGPPGVPGLPGEPGRFGVNSSDVPGPAGLPGVPGREGPPGFPGLPGPPGPPGREGPPGRTGQKGSLQGAGAPGVQGSKGAPGPAGARGESGLAGAPGPAGPPGPPGPPGPPGPGLPAGFDDMEGSGGPFWSTARSADGPQEPPALHGIGGDPGVPGLPGAKGEVGADGVPGFPGLPGREGIAGPQGPKGDRGSRGEKGDPGKDGVGQPGLPGPPGPPGPVVYVSEQDGSVLSVPGPEGRPGFAGFPGPAGPKGNLGSKGERGSPGPKGEKGEPGSIFSPDGGALGPAQKGAKGEPGFRGPPGPYGRPGYKGEIGFPGRPGRPGMNGLKGEKGEPGDASLGFGMRGMPGPPGPPGPPGPPGTPVYDSNVFAESSRPGPPGLPGNQGPPGPKGAKGEVGPPGPPGQFPFDFLQLEAEMKGEKGDRGDAGQKGERGEPGGGGFFGSSLPGPPGPPGPPGPRGYPGIPGPKGESIRGQPGPPGPQGPPGIGYEGRQGPPGPPGPPGPPSFPGPHRQTISVPGPPGPPGPPGPPGTMGASSGVRLWATRQAMLGQVHEVPEGWLIFVAEQEELYVRVQNGFRKVQLEARTPLPRGTDNEVAALQPPVVQLHDSNPYPRREHPHPTARPWRADDILASPPRLPEPQPYPGAPHHSSYVHLRPARPTSPPAHSHRDFQPVLHLVALNSPLSGGMRGIRGADFQCFQQARAVGLAGTFRAFLSSRLQDLYSIVRRADRAAVPIVNLKDELLFPSWEALFSGSEGPLKPGARIFSFDGKDVLRHPTWPQKSVWHGSDPNGRRLTESYCETWRTEAPSATGQASSLLGGRLLGQSAASCHHAYIVLCIENSFMTASK

SEQ ID NO: 5657 - protein, 1754 aa, Homo sapiens
MAPYPCGCHILLLLFCCLAAARANLLNLNWLWFNNEDTSHAATTIPEPQGPLPVQPTADTTTHVTPRNGSTEPATAPGSPEPPSELLEDGQDTPTSAESPDAPEENIAGVGAEILNVAKGIRSFVQLWNDTVPTESLARAETLVLETPVGPLALAGPSSTPQENGTTLWPSRGIPSSPGAHTTEAGTLPAPTPSPPSLGRPWAPLTGPSVPPPSSGRASLSSLLGGAPPWGSLQDPDSQGLSPAAAAPSQQLQRPDVRLRTPLLHPLVMGSLGKHAAPSAFSSGLPGALSQVAVTTLTRDSGAWVSHVANSVGPGLANNSALLGADPEAPAGRCLPLPPSLPVCGHLGISRFWLPNHLHHESGEQVRAGARAWGGLLQTHCHPFLAWFFCLLLVPPCGSVPPPAPPPCCQFCEALQDACWSRLGGGRLPVACASLPTQEDGYCVLIGPAAERISEEVGLLQLLGDPPPQQVTQTDDPDVGLAYVFGPDANSGQVARYHFPSLFFRDFSLLFHIRPATEGPGVLFAITDSAQAMVLLGVKLSGVQDGHQDISLLYTEPGAGQTHTAASFRLPAFVGQWTHLALSVAGGFVALYVDCEEFQRMPLARSSRGLELEPGAGLFVAQAGGADPDKFQGVIAELKVRRDPQVSPMHCLDEEGDDSDGASGDSGSGLGDARELLREETGAALKPRLPAPPPVTTPPLAGGSSTEDSRSEEVEEQTTVASLGAQTLPGSDSVSTWDGSVRTPGGRVKEGGLKGQKGEPGVPGPPGRAGPPGSPCLPGPPGLPCPVSPLGPAGPALQTVPGPQGPPGPPGRDGTPGRDGEPVSPHVPPSPGDTGPQGFPGTPGDVGPKGDKGDPGVGERGPPGPQGPPGPPGPSFRHDKLTFIDMEGSGFGGDLEALRGPRGFPGPPGPPGVPGLPGEPGRFGVNSSDVPGPAGLPGVPGREGPPGFPGLPGPPGPPGREGPPGRTGQKGSLQGAGAPGVQGSKGAPGPAGARGESGLAGAPGPAGPPGPPGPPGPPGPGLPAGFDDMEGSGGPFWSTARSADGPQGPPGLPGLKGDPGVPGLPGAKGEVGADGVPGFPGLPGREGIAGPQGPKGDRGSRGEKGDPGKDGVGQPGLPGPPGPPGPVVYVSEQDGSVLSVPGPEGRPGFAGFPGPAGPKGNLGSKGERGSPGPKGEKGEPGSIFSPDGGALGPAQKGAKGEPGFRGPPGPYGRPGYKGEIGFPGRPGRPGMNGLKGEKGEPGDASLGFGMRGMPGPPGPPGPPGPPGTPVYDSNVFAESSRPGPPGLPGNQGPPGPKGAKGEVGPPGPPGQFPFDFLQLEAEMKGEKGDRGDAGQKGERGEPGGGGFFGSSLPGPPGPPGPPGPRGYPGIPGPKGESIRGQPGPPGPQGPPGIGYEGRQGPPGPPGPPGPPSFPGPHRQTISVPGPPGPPGPPGPPGTMGASSGVRLWATRQAMLGQVHEVPEGWLIFVAEQEELYVRVQNGFRKVQLEARTPLPRGTDNEVAALQPPVVQLHDSNPYPRREHPHPTARPWRADDILASPPRLPEPQPYPGAPHHSSYVHLRPARPTSPPAHSHRDFQPVLHLVALNSPLSGGMRGIRGADFQCFQQARAVGLAGTFRAFLSSRLQDLYSIVRRADRAAVPIVNLKDELLFPSWEALFSGSEGPLKPGARIFSFDGKDVLRHPTWPQKSVWHGSDPNGRRLTESYCETWRTEAPSATGQASSLLGGRLLGQSAASCHHAYIVLCIENSFMTASK

SEQ ID NO: 5658 - protein, 540 aa, Homo sapiens
MGPGERAGGGGDAGKGNAAGGGGGGRSATTAGSRAVSALCLLLSVGSAAACLLLGVQAAALQGRVAALEEERELLRRAGPPGALDAWAEPHLERLLREKLDGLAKIRTAREAPSECVCPPGPPGRRGKPGRRGDPGPPGQSGRDGYPGPLGLDGKPGLPGPKGEKGAPGDFGPRGDQGQDGAAGPPGPPGPPGARGPPGDTGKDGPRGAQGPAGPKGEPGQDGEMGPKGPPGPKGEPGVPGKKGDDGTPSQPGPPGPKGEPGSMGPRGENGVDGAPGPKGEPGHRGTDGAAGPRGAPGLKGEQGDTVVIDYDGRILDALKGPPGPQGPPGPPGIPGAKGELGLPGAPGIDGEKGPKGQKGDPGEPGPAGLKGEAGEMGLSGLPGADGLKGEKGESASDSLQESLAQLIVEPGPPGPPGPPGPMGLQGIQGPKGLDGAKGEKGASGERGPSGLPGPVGPPGLIGLPGTKGEKGRPGEPGLDGFPGPRGEKGDRSERGEKGERGVPGRKGVKGQKGEPGPPGLDQPCPVGPDGLPVPGCWHK

SEQ ID NO: 5659 - protein, 309 aa, Homo sapiens
MESRSGIQAGVRCRDLGSLQPPPLALKQFSSLSLPSSWDYRRLPPRCGFLFEVSETTNPPAGTNSRHTLTVKLDGLAKIRTAREAPSECVCPPGPPGRRGKPGRRGDPGPPGPLGLDGKPGLPGPKGEKGAPGDFGPRGDQGQDGAAGPPGPPGPPGARGPPGDTGKDGPRGAQGPAGPKGEPGQDGEMGPKGPPGPKGEPGVPGKKGDDGTPSQPGPPGPKGEPGSMGPRGENGVDGAPGPKGEPGHRGTDGAAGPRGDVRDPGLGSVSSCSQRLASSSKKNGSEPPPGCAGCPRPQGRAGRHSGDRL

SEQ ID NO: 5660 - protein, 554 aa, Homo sapiens
MTAPGAAGRCPPTTWLGSLLLLVCLLASRSITEEVSEYCSHMIGSGHLQSLQRLIDSQMETSCQITFEFVDQEQLKDPVCYLKKAFLLVQDIMEDTMRFRDNTPNAIAIVQLQELSLRLKSCFTKDYEEHDKACVRTFYETPLQLLEKVKNVFNETKNLLDKDWNIFSKNCNNSFAECSSQDVVTKPDCNCLYPKAIPSSDPASVSPHQPLAPSMAPVAGLTWEDSEGTEGSSLLPGEQPLHTVDPGSAKQRPPRSTCQSFEPPETPVVKDSTIGGSPQPRPSVGAFNPGMEDILDSAMGTNWVPEEASGEASEIPVPQGTELSPSRPGGGSMQTEPARPSNFLSASSPLPASAKGQQPADVTGTALPRVGPVRPTGQDWNHTPQKTDHPSALLRDPPEPGSPRISSLRPQGLSNPSTLSAQPQLSRSHSSGSVLPLGELEGRRSTRDRRSPAEPEGGPASEGAARPLPRFNSVPLTDTGHERQSEGSFSPQLQESVFHLLVPSVILVLLAVGGLLFYRWRRRSHQEPQRADSPLEQPEGSPLTQDDRQVELPV

SEQ ID NO: 5661 - protein, 438 aa, Homo sapiens
MTAPGAAGRCPPTTWLGSLLLLVCLLASRSITEEVSEYCSHMIGSGHLQSLQRLIDSQMETSCQITFEFVDQEQLKDPVCYLKKAFLLVQDIMEDTMRFRDNTPNAIAIVQLQELSLRLKSCFTKDYEEHDKACVRTFYETPLQLLEKVKNVFNETKNLLDKDWNIFSKNCNNSFAECSSQDVVTKPDCNCLYPKAIPSSDPASVSPHQPLAPSMAPVAGLTWEDSEGTEGSSLLPGEQPLHTVDPGSAKQRPPRSTCQSFEPPETPVVKDSTIGGSPQPRPSVGAFNPGMEDILDSAMGTNWVPEEASGEASEIPVPQGTELSPSRPGGGSMQTEPARPSNFLSASSPLPASAKGQQPADVTGHERQSEGSFSPQLQESVFHLLVPSVILVLLAVGGLLFYRWRRRSHQEPQRADSPLEQPEGSPLTQDDRQVELPV

SEQ ID NO: 5662 - protein, 119 aa, Homo sapiens
MTAPGAAGRCPPTTWLGSLLLLVCLLASRSITEEVSEYCSHMIGSGHLQSLQRLIDSQMETSCQITFEFVDQEQLKDPVCYLKKAFLLVQDIMEDTMRFRDNTPNAIAIVQLQELSLRL

SEQ ID NO: 5663 - protein, 438 aa, Homo sapiens; identical to SEQ ID NO: 5661

SEQ ID NO: 5664 - protein, 554 aa, Homo sapiens; identical to SEQ ID NO: 5660

SEQ ID NO: 5665 - protein, 256 aa, Homo sapiens
MTAPGAAGRCPPTTWLGSLLLLVCLLASRSITEEVSEYCSHMIGSGHLQSLQRLIDSQMETSCQITFEFVDQEQLKDPVCYLKKAFLLVQDIMEDTMRFRDNTPNAIAIVQLQELSLRLKSCFTKDYEEHDKACVRTFYETPLQLLEKVKNVFNETKNLLDKDWNIFSKNCNNSFAECSSQGHERQSEGSFSPQLQESVFHLLVPSVILVLLAVGGLLFYRWRRRSHQEPQRADSPLEQPEGSPLTQDDRQVELPV

SEQ ID NO: 5666 - protein, 275 aa, Homo sapiens
GSPGMAGALCAGHIAGLYGDRGLVPSTRREERGGRKTWQTGAARPQGGARGAGGPWHPDRHPRPKETRGNLGPLETPARWATQGPAAPSEPIPGIKGTKGSPGNIKDQPRPAFSAIRRNPNGGQRGHSTRSSPTRKNRTRTTPADSSALYPATTTSPSRCCPSGKSACPSSPPQGARSDAPWASVTPPTRGSSRWCQGAWCFSCSRVTRSGLKKTPKRVTFTRALRPTASSAASSSSHLPEPGKDPLPHPPLWLPCSACKMGALLLQLLKGGGWL

SEQ ID NO: 5667 - protein, 245 aa, Homo sapiens
MEGPRGWLVLCVLAISLASMVTEDLCRAPDGKKGEAGRPGRRGRPGLKGEQGEPGAPGIRTGIQGLKGDQGEPGPSGNPGKVGYPGPSGPLGARGIPGIKGTKGSPGNIKDQPRPAFSAIRRNPPMGGNVVIFDTVITNQEEPYQNHSGRFVCTVPGYYYFTFQVLSQWEICLSIVSSSRGQVRRSLGFCDTTNKGLFQVVSGGMVLQLQQGDQVWVEKDPKKGHIYQGSEADSVFSGFLIFPSA

SEQ ID NO: 5668 - protein, 245 aa, Homo sapiens; identical to SEQ ID NO: 5667

SEQ ID NO: 5669 - protein, 221 aa, Homo sapiens
MEGPRGWLVLCVLAISLASMVTEDLCRAPDGKKGEAGRPGRRGRPGLKGEQGEPGAPGIRTGIQGLKGDQGEPGPSGNPGKVGYPGPSGPLGARGIPGIKGTKGSPGNIKDQPRPAFSAIRRNPPMGGNVVIFDTVITNQEEPYQNHSGRFVCTVPGYYYFTFQVLSQWEICLSIVSSSRGQVRRSLGFCDTTNKGLFQVVSGGMVLQLQQGDQVWVEKDP

SEQ ID NO: 5670 - protein, 349 aa, Homo sapiens
MTAASMGPVRVAFVVLLALCSRPAVGQNCSGPCRCPDEPAPRCPAGVSLVLDGCGCCRVCAKQLGELCTERDPCDPHKGLFCHFGSPANRKIGVCTAKDGAPCIFGGTVYRSGESFQSSCKYQCTCLDGAVGCMPLCSMDVRLPSPDCPFPRRVKLPGKCCEEWVCDEPKDQTVVGPALAAYRLEDTFGPDPTMIRANCLVQTTEWSACSKTCGMGISTRVTNDNASCRLEKQSRLCMVRPCEADLEENIKKGKKCIRTPKISKPIKFELSGCTSMKTYRAKFCGVCTDGRCCTPHRTTTLPVEFKCPDGEVMKKNMMFIKTCACHYNCPGDNDIFESLYYRKMYGDMA

SEQ ID NO: 5671 - protein, 745 aa, Homo sapiens
MERPPGLRPGAGGPWEMRERLGTGGFGNVCLYQHRELDLKIAIKSCRLELSTKNRERWCHEIQIMKKLNHANVVKACDVPEELNILIHDVPLLAMEYCSGGDLRKLLNKPENCCGLKESQILSLLSDIGSGIRYLHENKIIHRDLKPENIVLQDVGGKIIHKIIDLGYAKDVDQGSLCTSFVGTLQYLAPELFENKPYTATVDYWSFGTMVFECIAGYRPFLHHLQPFTWHEKIKKKDPKCIFACEEMSGEVRFSSHLPQPNSLCSLVVEPMENWLQLMLNWDPQQRGGPVDLTLKQPRCFVLMDHILNLKIVHILNMTSAKIISFLLPPDESLHSLQSRIERETGINTGSQELLSETGISLDPRKPASQCVLDGVRGCDSYMVYLFDKSKTVYEGPFASRSLSDCVNYIVQDSKIQLPIIQLRKVWAEAVHYVSGLKEDYSRLFQGQRAAMLSLLRYNANLTKMKNTLISASQQLKAKLEFFHKSIQLDLERYSEQMTYGISSEKMLKAWKEMEEKAIHYAEVGVIGYLEDQIMSLHAEIMELQKSPYGRRQGDLMESLEQRAIDLYKQLKHRPSDHSYSDSTEMVKIIVHTVQSQDRVLKELFGHLSKLLGCKQKIIDLLPKVEVALSNIKEADNTVMFMQGKRQKEIWHLLKIACTQSSARSLVGSSLEGAVTPQTSAWLPPTSAEHDHSLSCVVTPQDGETSAQMIEENLNCLGHLSTIIHEANEEQGNSMMNLDWSWLTE

SEQ ID NO: 5672 - protein, 550 aa, Homo sapiens
MWKASAGHAVSIAQDDAGADDWETDPDFVNDVSEKEQRWGAKTVQGSGHQEHINIHKLRENVFQEHQTLKEKELETGPKASHGYGGKFGVEQDRMDKSAVGHEYQSKLSKHCSQVDSVRGFGGKFGVQMDRVDQSAVGFEYQGKTEKHASQKDYSSGFGGKYGVQADRVDKSAVGFDYQGKTEKHESQRDYSKGFGGKYGIDKDKVDKSAVGFEYQGKTEKHESQKDYVKGFGGKFGVQTDRQDKCALGWDHQEKLQLHESQKDYKTGFGGKFGVQSERQDSAAVGFDYKEKLAKHESQQDYSKGFGGKYGVQKDRMDKNASTFEDVTQVSSAYQKTVPVEAVTSKTSNIRANFENLAKEKEQEDRRKAEAERAQRMAKERQEQEEARRKLEEQARAKTQTPPVSPAPQPTEERLPSSPVYEDAASFKAELSYRGPVSGTEPEPVYSMEAADYREASSQQGLAYATEAVYESAEAPGHYPAEDSTYDEYENDLGITAVALYDYQAAGDDEISFDPDDIITNIEMIDDGWWRGVCKGRYGLFPANYVELRQ

SEQ ID NO: 5673 - protein, 513 aa, Homo sapiens
MWKASAGHAVSIAQDDAGADDWETDPDFVNDVSEKEQRWGAKTVQGSGHQEHINIHKLRENVFQEHQTLKEKELETGPKASHGYGGKFGVEQDRMDKSAVGHEYQSKLSKHCSQVDSVRGFGGKFGVQMDRVDQSAVGFEYQGKTEKHASQKDYSSGFGGKYGVQADRVDKSAVGFDYQGKTEKHESQRDYSKGFGGKYGIDKDKVDKSAVGFEYQGKTEKHESQKDYVKGFGGKFGVQTDRQDKCALGWDHQEKLQLHESQKDYSKGFGGKYGVQKDRMDKNASTFEDVTQVSSAYQKTVPVEAVTSKTSNIRANFENLAKEKEQEDRRKAEAERAQRMAKERQEQEEARRKLEEQARAKTQTPPVSPAPQPTEERLPSSPVYEDAASFKAELSYRGPVSGTEPEPVYSMEAADYREASSQQGLAYATEAVYESAEAPGHYPAEDSTYDEYENDLGITAVALYDYQAAGDDEISFDPDDIITNIEMIDDGWWRGVCKGRYGLFPANYVELRQ

SEQ ID NO: 5674 - protein, 634 aa, Homo sapiens
MWKASAGHAVSIAQDDAGADDWETDPDFVNDVSEKEQRWGAKTVQGSGHQEHINIHKLRENVFQEHQTLKEKELETGPKASHGYGGKFGVEQDRMDKSAVGHEYQSKLSKHCSQVDSVRGFGGKFGVQMDRVDQSAVGFEYQGKTEKHASQKDYSSGFGGKYGVQADRVDKSAVGFDYQGKTEKHESQRDYSKGFGGKYGIDKDKVDKSAVGFEYQGKTEKHESQKDYVKGFGGKFGVQTDRQDKCALGWDHQEKLQLHESQKDYSKGFGGKYGVQKDRMDKNASTFEDVTQVSSAYQKTVPVEAVTSKTSNIRANFENLAKEKEQEDRRKAEAERAQRMAKERQEQEEARRKLEEQARAKTQTPPVSPAPQPTEERLPSSPVYEDAASFKAELSYRGPVSGTEPEPVYSMEAADYREASSQQGLAYATEAVYESAEAPGHYPAEDSTYDEYENDLGITAVALYDYQAAGDDEISFDPDDIITNIEMIDDGWWRGVCKGRFRELAFSCVRVALVPIKCSRDLPGQARGLRSALWRVGRKDCPRRGASSRVSLLGRRGLGLMEVNPELSHPEHRSCHVRWEICLCHTVTARRIRKLISFLRSREAGPVPSCSQVGGVSFQKVTWKCLGTWVPECP

SEQ ID NO: 5675 - protein, 314 aa, Homo sapiens
MDKNASTFEDVTQVSSAYQKTVPVEAVTSKTSNIRANFENLAKEKEQEDRRKAEAERAQRMAKERQEQEEARRKLEEQARAKTQTPPVSPAPQPTEERLPSSPVYEDAASFKAELSYRGPVSGTEPEPVYSMEAADYREASSQQGLAYATEAVYESAEAPGHYPAEDSTYDEYENDLGITAVALYDYQAAGDDEISFDPDDIITNIEMIDDGWWRGVCKGRFRELAFSCVRVALVPIKCSRDLPGQARGLRSALWRVGRKDCPRRGASSRVSLLGRRGLGLMEVNPELSHPEHRSCHVRWEICLCHTVTARRIR

SEQ ID NO: 5676 - protein, 586 aa, Homo sapiens
MGVNAVHWFRKGLRLHDNPALKECIQGADTIRCVYILDPWFAGSSNVGINRWRFLLQCLEDLDANLRKLNSRLFVIRGQPADVFPRLFKEWNITKLSIEYDSEPFGKERDAAIKKLATEAGVEVIVRISHTLYDLDKIIELNGGQPPLTYKRFQTLISKMEPLEIPVETITSEVIEKCTTPLSDDHDEKYGVPSLEELGFDTDGLSSAVWPGGETEALTRLERHLERKAWVANFERPRMNANSLLASPTGLSPYLRFGCLSCRLFYFKLTDLYKKVKKNSSPPLSLYGQLLWREFFYTAATNNPRFDKMEGNPICVQIPWDKNPEALAKWAEGRTGFPWIDAIMTQLRQEGWIHHLARHAVACFLTRGDLWISWEEGMKVFEELLLDADWSINAGSWMWLSCSSFFQQFFHCYCPVGFGRRTDPNGDYIRRYLPVLRGFPAKYIYDPWNAPEGIQKVAKCLIGVNYPKPMVNHAEASRLNIERMKQIYQQLSRYRGLGLLASVPSNPNGNGGFMGYSAENIPGCSSSGSCSQGSGILHYAHGDSQQTHLLKQGRSSMGTGLSGGKRPSQEEDTQSIGPKVQRQSTN

SEQ ID NO: 5677 - protein, 193 aa, Homo sapiens
MLEVGCGCLVVPFFNFFHCYCPVGFGRRTDPNGDYIRRYLPVLRGFPAKYIYDPWNAPEGIQKVAKCLIGVNYPKPMVNHAEASRLNIERMKQIYQQLSRYRGLGLLASVPSNPNGNGGFMGYSAENIPGCSSSGSCSQGSGILHYAHGDSQQTHLLKQGRSSMGTGLSGGKRPSQEEDTQSIGPKVQRQSTN

SEQ ID NO: 5678 - protein, 440 aa, Homo sapiens
MGSSHLLNKGLPLGVRPPIMNGPLHPRPLVALLDGRDCTVEMPILKDVATVAFCDAQSTQEIHEKVLNEAVGALMYHTITLTREDLEKFKALRIIVRIGSGFDNIDIKSAGDLGIAVCNVPAASVEETADSTLCHILNLYRRATWLHQALREGTRVQSVEQIREVASGAARIRGETLGIIGLGRVGQAVALRAKAFGFNVLFYDPYLSDGVERALGLQRVSTLQDLLFHSDCVTLHCGLNEHNHHLINDFTVKQMRQGAFLVNTARGGLVDEKALAQALKEGRIRGAALDVHESEPFSFSQGPLKDAPNLICTPHAAWYSEQASIEMREEAAREIRRAITGRIPDSLKNCVNKDHLTAATHWASMDPAVVHPELNGAAYRYPPGVVGVAPTGIPAAVEGIVPSAMSLSHGLPPVAHPPHAPSPGQTVKPEADRDHASDQL

SEQ ID NO: 5679 - protein, 429 aa, Homo sapiens
MSGVRPPIMNGPLHPRPLVALLDGRDCTVEMPILKDVATVAFCDAQSTQEIHEKVLNEAVGALMYHTITLTREDLEKFKALRIIVRIGSGFDNIDIKSAGDLGIAVCNVPAASVEETADSTLCHILNLYRRATWLHQALREGTRVQSVEQIREVASGAARIRGETLGIIGLGRVGQAVALRAKAFGFNVLFYDPYLSDGVERALGLQRVSTLQDLLFHSDCVTLHCGLNEHNHHLINDFTVKQMRQGAFLVNTARGGLVDEKALAQALKEGRIRGAALDVHESEPFSFSQGPLKDAPNLICTPHAAWYSEQASIEMREEAAREIRRAITGRIPDSLKNCVNKDHLTAATHWASMDPAVVHPELNGAAYRYPPGVVGVAPTGIPAAVEGIVPSAMSLSHGLPPVAHPPHAPSPGQTVKPEADRDHASDQL

SEQ ID NO: 5680 - protein, 145 aa, Homo sapiens
MSGVRPPIMNGPLHPRPLVALLDGRDCTVEMPILKDVATVAFCDAQSTQEIHEKVLNEAVGALMYHTITLTREDLEKFKALRIIVRIGSGFDNIDIKSAGDLGIAVCNVPAASVEETADSTLCHILNLYRRATWLHQALREGTRV

SEQ ID NO: 5681 - protein, 171 aa, Homo sapiens
MSGVRPPIMNGPLHPRPLVALLDGRDCTVEMPILKDVATVAFCDAQSTQEIHEKVLNEAVGALMYHTITLTREDLEKFKALRIIVRIGSGFDNIDIKSAGDLGIAVCNVPAASVEETADSTLCHILNLYRRATWLHQALREGTRVQSVEQIREVASGAARIRGETLGIIGL

SEQ ID NO: 5682 - protein, 985 aa, Homo sapiens
MPVPSRHINIGRSQSWDAAGWYEGPWENAESLRPLGRRSSLTYGTAEGTWFEPNHRPQDAALPVAAEPYLYREAVYNSVAARKGSTPDFTFYDSRQAVMSGRSPLLPREYYSDPSGAARVPKEPPLYRDPGVSRPVPSYGVLGSRTSWDPMQGRSPALQDAGHLYRDPGGKMIPQGRQTQSRAASPGRYGREQPDTRYGAEVPAYPLSQVFSDISERPIDPAPARQVAPTCLVVDPSSAAAPEGSTGVAPGALNRGYGPARESIPSKMAYETYEADLSTFQGPGGKRTVLPEFLAFLRAEGLAEATLGALLQQGFDSPAVLATLEDADIKSVAPNLGQARVLSRLANSCRTEMQLRRQDRGGPLPRARSSSFSHRSELLHGDLASLGAAAPLQTASPRAGDPARRPSSAPSQHLLETAATYSAPGVGTHAPHFPSNSGYSSPTPCALTARLSPTYPLQAGVALTNPGPSNPLHPGPRTAYSTAYTVPMELLKRERNVAASPLPSPHGSPQVLRKPGAPLGPSTLPPASQSLHTPHSPYQKVARRTGAPIIVSTMLAPEPSIRPQIMNGPLHPRPLVALLDGRDCTVEMPILKDLATVAFCDAQSTQEIHEKVLNEAVGAMMYHTITLTREDLEKFKALRVIVRIGSGYDNVDIKAAGELGIAVCNIPSAAVEETADSTICHILNLYRRNTWLYQALREGTRVQSVEQIREVASGAARIRGETLGLIGFGRTGQAVAVRAKAFGFSVIFYDPYLQDGIERSLGVQRVYTLQDLLYQSDCVSLHCNLNEHNHHLINDFTIKQMRQGAFLVNAARGGLVDEKALAQALKEGRIRGAALDVHESEPFSFAQGPLKDAPNLICTPHTAWYSEQASLEMREAAATEIRRAITGRIPESLRNCVNKEFFVTSAPWSVIDQQAIHPELNGATYRYPPGIVGVAPGGLPAAMEGIIPGGIPVTHNLPTVAHPSQAPSPNQPTKHGDNREHPNEQ

SEQ ID NO: 5683 - protein, 445 aa, Homo sapiens
MALVDKHKVKRQRLDRICEGIRPQIMNGPLHPRPLVALLDGRDCTVEMPILKDLATVAFCDAQSTQEIHEKVLNEAVGAMMYHTITLTREDLEKFKALRVIVRIGSGYDNVDIKAAGELGIAVCNIPSAAVEETADSTICHILNLYRRNTWLYQALREGTRVQSVEQIREVASGAARIRGETLGLIGFGRTGQAVAVRAKAFGFSVIFYDPYLQDGIERSLGVQRVYTLQDLLYQSDCVSLHCNLNEHNHHLINDFTIKQMRQGAFLVNAARGGLVDEKALAQALKEGRIRGAALDVHESEPFSFAQGPLKDAPNLICTPHTAWYSEQASLEMREAAATEIRRAITGRIPESLRNCVNKEFFVTSAPWSVIDQQAIHPELNGATYRYPPGIVGVAPGGLPAAMEGIIPGGIPVTHNLPTVAHPSQAPSPNQPTKHGDNREHPNEQ

SEQ ID NO: 5684 - protein, 445 aa, Homo sapiens; identical to SEQ ID NO: 5683

SEQ ID NO: 5685 - protein, 445 aa, Homo sapiens; identical to SEQ ID NO: 5683

SEQ ID NO: 5686 - skipped

SEQ ID NO: 5687 - protein, 445 aa, Homo sapiens; identical to SEQ ID NO: 5683

SEQ ID NO: 5688 - protein, 776 aa, Homo sapiens
MSSTRSQNPHGLKQIGLDQIWDDLRAGIQQVYTRQSMAKSRYMELYTHVYNYCTSVHQSNQARGAGVPPSKSKKGQTPGGAQFVGLELYKRLKEFLKNYLTNLLKDGEDLMDESVLKFYTQQWEDYRFSSKVLNGICAYLNRHWVRRECDEGRKGIYEIYSLALVTWRDCLFRPLNKQVTNAVLKLIEKERNGETINTRLISGVVQSYVELGLNEDDAFAKGPTLTVYKESFESQFLADTERFYTRESTEFLQQNPVTEYMKKAEARLLEEQRRVQVYLHESTQDELARKCEQVLIEKHLEIFHTEFQNLLDADKNEDLGRMYNLVSRIQDGLGELKKLLETHIHNQGLAAIEKCGEAALNDPKMYVQTVLDVHKKYNALVMSAFNNDAGFVAALDKACGRFINNNAVTKMAQSSSKSPELLARYCDSLLKKSSKNPEEAELEDTLNQVMVVFKYIEDKDVFQKFYAKMLAKRLVHQNSASDDAEASMISKLKQACGFEYTSKLQRMFQDIGVSKDLNEQFKKHLTNSEPLDLDFSIQVLSSGSWPFQQSCTFALPSELERSYQRFTAFYASRHSGRKLTWLYQLSKGELVTNCFKNRYTLQASTFQMAILLQYNTEDAYTVQQLTDSTQIKMDILAQVLQILLKSKLLVLEDENANVDEVELKPDTLIKLYLGYKNKKLRVNINVPMKTEQKQEQETTHKNIEEDRKLLIQAAIVRIMKMRKVLKHQQLLGEVLTQLSSRFKPRVPVIKKCIDILIEKEYLERVDGEKDTYSYLA

SEQ ID NO: 5689 - protein, 776 aa, Homo sapiens; identical to SEQ ID NO: 5688

SEQ ID NO: 5690 - protein, 703 aa, Homo sapiens
MSSTRSQNPHGLKQIGLDQIWDDLRAGIQQVYTRQSMAKSRYMELYTQQWEDYRFSSKVLNGICAYLNRHWVRRECDEGRKGIYEIYSLALVTWRDCLFRPLNKQVTNAVLKLIEKERNGETINTRLISGVVQSYVELGLNEDDAFAKGPTLTVYKESFESQFLADTERFYTRESTEFLQQNPVTEYMKKAEARLLEEQRRVQVYLHESTQDELARKCEQVLIEKHLEIFHTEFQNLLDADKNEDLGRMYNLVSRIQDGLGELKKLLETHIHNQGLAAIEKCGEAALNDPKMYVQTVLDVHKKYNALVMSAFNNDAGFVAALDKACGRFINNNAVTKMAQSSSKSPELLARYCDSLLKKSSKNPEEAELEDTLNQVMVVFKYIEDKDVFQKFYAKMLAKRLVHQNSASDDAEASMISKLKQACGFEYTSKLQRMFQDIGVSKDLNEQFKKHLTNSEPLDLDFSIQVLSSGSWPFQQSCTFALPSELERSYQRFTAFYASRHSGRKLTWLYQLSKGELVTNCFKNRYTLQASTFQMAILLQYNTEDAYTVQQLTDSTQIKMDILAQVLQILLKSKLLVLEDENANVDEVELKPDTLIKLYLGYKNKKLRVNINVPMKTEQKQEQETTHKNIEEDRKLLIQAAIVRIMKMRKVLKHQQLLGEVLTQLSSRFKPRVPVIKKCIDILIEKEYLERVDGEKDTYSYLA

SEQ ID NO: 5691 - protein, 607 aa, Homo sapiens
MELYTHVYNYCTSVHQSNQARGAGVPPSKSKKGQTPGGAQFVGLELYKRLKEFLKNYLTNLLKDGEDLMDESVLKFYTQQWEDYRFSSKVLNGICAYLNRHWVRRECDEGRKGIYEIYSLALVTWRDCLFRPLNKQVTNAVLKLIEKERNGETINTRLISGVVQSYVELGLNEDDAFAKGPTLTVYKESFESQFLADTERFYTRESTEFLQQNPVTEYMKKAEARLLEEQRRVQVYLHESTQDELARKCEQVLIEKHLEIFHTEFQNLLDADKNEDLGRMYNLVSRIQDGLGELKKLLETHIHNQGLAAIEKCGEAALNDPKMYVQTVLDVHKKYNALVMSAFNNDAGFVAALDKACGRFINNNAVTKMAQSSSKSPELLARYCDSLLKKSSKNPEEAELEDTLNQVMVVFKYIEDKDVFQKFYAKMLAKRLVHQNSASDDAEASMISKLKQACGFEYTSKLQRMFQDIGVSKDLNEQFKKHLTNSEPLDLDFSIQVLSSGSWPFQQSCTFALPSELERSYQRFTAFYASRHSGRKLTWLYQLSKGELVTNCFKNRYTLQASTFQMAILLQYNTEDAYTVQQLTDSTQIKMDILAQVLQILLKSKLL

SEQ ID NO: 5692 - protein, 706 aa, Homo sapiens
MSLKPRVVDFDETWNKLLTTIKAVVMLEYVERATWNDRFSDIYALCVAYPEPLGERLYTETKIFLENHVRHLHKRVLESEEQVLVMYHRYWEEYSKGADYMDCLYRYLNTQFIKKNKLTEADLQYGYGGVDMNEPLMEIGELALDMWRKLMVEPLQAILIRMLLREIKNDRGGEDPNQKVIHGVINSFVHVEQYKKKFPLKFYQEIFESPFLTETGEYYKQEASNLLQESNCSQYMEKVLGRLKDEEIRCRKYLHPSSYTKVIHECQQRMVADHLQFLHAECHNIIRQEKKNDMANMYVLLRAVSTGLPHMIQELQNHIHDEGLRATSNLTQENMPTLFVESVLEVHGKFVQLINTVLNGDQHFMSALDKALTSVVNYREPKSVCKAPELLAKYCDNLLKKSAKGMTENEVEDRLTSFITVFKYIDDKDVFQKFYARMLAKRLIHGLSMSMDSEEAMINKLKQACGYEFTSKLHRMYTDMSVSADLNNKFNNFIKNQDTVIDLGISFQIYVLQAGAWPLTQAPSSTFAIPQELEKSVQMFELFYSQHFSGRKLTWLHYLCTGEVKMNYLGKPYVAMVTTYQMAVLLAFNNSETVSYKELQDSTQMNEKELTKTIKSLLDVKMINHDSEKEDIDAESSFSLNMNFSSKRTKFKITTSMQKDTPQVISQSRARFNPSISMIKKCIEVLIDKQYIERSQASADEYSYVA

SEQ ID NO: 5693 - protein, 706 aa, Homo sapiens; identical to SEQ ID NO: 5692

SEQ ID NO: 5694 - protein, 745 aa, Homo sapiens
MSLKPRVVDFDETWNKLLTTIKAVVMLEYVERATWNDRFSDIYALCVAYPEPLGERLYTETKIFLENHVRHLHKRVLESEEQVLVMYHRYWEEYSKGADYMDCLYRYLNTQFIKKNKLTEADLQYGYGGVDMNEPLMEIGELALDMWRKLMVEPLQAILIRMLLREIKNDRGGEDPNQKVIHGVINSFVHVEQYKKKFPLKFYQEIFESPFLTETGEYYKQEASNLLQESNCSQYMEKVLGRLKDEEIRCRKYLHPSSYTKVIHECQQRMVADHLQFLHAECHNIIRQEKKNDMANMYVLLRAVSTGLPHMIQELQNHIHDEGLRATSNLTQENMPTLFVESVLEVHGKFVQLINTVLNGDQHFMSALDKALTSVVNYREPKSVCKAPELLAKYCDNLLKKSAKGMTENEVEDRLTSFITVFKYIDDKDVFQKFYARMLAKRLIHGLSMSMDSEEAMINKLKQACGYEFTSKLHRMYTDMSVSADLNNKFNNFIKNQDTVIDLGISFQIYVLQAGAWPLTQAPSSTFAIPQELEKSVQMFELFYSQHFSGRKLTWLHYLCTGEVKMNYLGKPYVAMVTTYQMAVLLAFNNSETVSYKELQDSTQMNEKELTKTIKSLLDVKMINHDSEKEDIDAESSFSLNMNFSSKRTKFKITTSMQKDTPQEMEQTRSAVDEDRKMYLQAAIVRIMKARKVLRHNALIQEVISQSRARFNPSISMIKKCIEVLIDKQYIERSQASADEYSYVA

SEQ ID NO: 5695 - protein, 745 aa, Homo sapiens; identical to SEQ ID NO: 5694

SEQ ID NO: 5696 - protein, 745 aa, Homo sapiens; identical to SEQ ID NO: 5694

SEQ ID NO: 5697 - protein, 688 aa, Homo sapiens
MLYVWPILNPLEKDFIQKLRFFWKIMFGICIRYWEEYSKGADYMDCLYRYLNTQFIKKNKLTEADLQYGYGGVDMNEPLMEIGELALDMWRKLMVEPLQAILIRMLLREIKNDRGGEDPNQKVIHGVINSFVHVEQYKKKFPLKFYQEIFESPFLTETGEYYKQEASNLLQESNCSQYMEKVLGRLKDEEIRCRKYLHPSSYTKVIHECQQRMVADHLQFLHAECHNIIRQEKKNDMANMYVLLRAVSTGLPHMIQELQNHIHDEGLRATSNLTQENMPTLFVESVLEVHGKFVQLINTVLNGDQHFMSALDKALTSVVNYREPKSVCKAPELLAKYCDNLLKKSAKGMTENEVEDRLTSFITVFKYIDDKDVFQKFYARMLAKRLIHGLSMSMDSEEAMINKLKQACGYEFTSKLHRMYTDMSVSADLNNKFNNFIKNQDTVIDLGISFQIYVLQAGAWPLTQAPSSTFAIPQELEKSVQMFELFYSQHFSGRKLTWLHYLCTGEVKMNYLGKPYVAMVTTYQMAVLLAFNNSETVSYKELQDSTQMNEKELTKTIKSLLDVKMINHDSEKEDIDAESSFSLNMNFSSKRTKFKITTSMQKDTPQEMEQTRSAVDEDRKMYLQAAIVRIMKARKVLRHNALIQEVISQSRARFNPSISMIKKCIEVLIDKQYIERSQASADEYSYVA

SEQ ID NO: 5698 - protein, 216 aa, Homo sapiens
MSLKPRVVDFDETWNKLLTTIKAVVMLEYVERATWNDRFSDIYALCVAYPEPLGERLYTETKIFLENHVRHLHKRVLESEEQVLVMYHRYWEEYSKGADYMDCLYRYLNTQFIKKNKLTEADLQYGYGGVDMNEPLMEIGELALDMWRKLMVEPLQAILIRMLLREIKNDRGGEDPNQKVIHGVINSFVHVEQYKKKFPLKFYQEIFESPFLTETG

SEQ ID NO: 5699 - protein, 764 aa, Homo sapiens
MYRVTWSTFWLRFQHYTCTMSLKPRVVDFDETWNKLLTTIKAVVMLEYVERATWNDRFSDIYALCVAYPEPLGERLYTETKIFLENHVRHLHKRVLESEEQVLVMYHRYWEEYSKGADYMDCLYRYLNTQFIKKNKLTEADLQYGYGGVDMNEPLMEIGELALDMWRKLMVEPLQAILIRMLLREIKNDRGGEDPNQKVIHGVINSFVHVEQYKKKFPLKFYQEIFESPFLTETGEYYKQEASNLLQESNCSQYMEKVLGRLKDEEIRCRKYLHPSSYTKVIHECQQRMVADHLQFLHAECHNIIRQEKKNDMANMYVLLRAVSTGLPHMIQELQNHIHDEGLRATSNLTQENMPTLFVESVLEVHGKFVQLINTVLNGDQHFMSALDKALTSVVNYREPKSVCKAPELLAKYCDNLLKKSAKGMTENEVEDRLTSFITVFKYIDDKDVFQKFYARMLAKRLIHGLSMSMDSEEAMINKLKQACGYEFTSKLHRMYTDMSVSADLNNKFNNFIKNQDTVIDLGISFQIYVLQAGAWPLTQAPSSTFAIPQELEKSVQMFELFYSQHFSGRKLTWLHYLCTGEVKMNYLGKPYVAMVTTYQMAVLLAFNNSETVSYKELQDSTQMNEKELTKTIKSLLDVKMINHDSEKEDIDAESSFSLNMNFSSKRTKFKITTSMQKDTPQEMEQTRSAVDEDRKMYLQAAIVRIMKARKVLRHNALIQEVISQSRARFNPSISMIKKCIEVLIDKQYIERSQASADEYSYVA

SEQ ID NO: 5700 - protein, 768 aa, Homo sapiens
MSNLSKGTGSRKDTKMRIRAFPMTMDEKYVNSIWDLLKNAIQEIQRKNNSGLSFEELYRNAYTMVLHKHGEKLYTGLREVVTEHLINKVREDVLNSLNNNFLQTLNQAWNDHQTAMVMIRDILMYMDRVYVQQNNVENVYNLGLIIFRDQVVRYGCIRDHLRQTLLDMIARERKGEVVDRGAIRNACQMLMILGLEGRSVYEEDFEAPFLEMSAEFFQMESQKFLAENSASVYIKKVEARINEEIERVMHCLDKSTEEPIVKVVERELISKHMKTIVEMENSGLVHMLKNGKTEDLGCMYKLFSRVPNGLKTMCECMSSYLREQGKALVSEEGEGKNPVDYIQGLLDLKSRFDRFLLESFNNDRLFKQTIAGDFEYFLNLNSRSPEYLSLFIDDKLKKGVKGLTEQEVETILDKAMVLFRFMQEKDVFERYYKQHLARRLLTNKSVSDDSEKNMISKLKTECGCQFTSKLEGMFRDMSISNTTMDEFRQHLQATGVSLGGVDLTVRVLTTGYWPTQSATPKCNIPPAPRHAFEIFRRFYLAKHSGRQLTLQHHMGSADLNATFYGPVKKEDGSEVGVGGAQVTGSNTRKHILQVSTFQMTILMLFNNREKYTFEEIQQETDIPERELVRALQSLACGKPTQRVLTKEPKSKEIENGHIFTVNDQFTSKLHRVKIQTVAAKQGESDPERKETRQKVDDDRKHEIEAAIVRIMKSRKKMQHNVLVAEVTQQLKARFLPSPVVIKKRIEGLIEREYLARTPEDRKVYTYVA

SEQ ID NO: 5701 - protein, 702 aa, Homo sapiens
MSNLSKGTGSRKDTKMRIRAFPVREDVLNSLNNNFLQTLNQAWNDHQTAMVMIRDILMYMDRVYVQQNNVENVYNLGLIIFRDQVVRYGCIRDHLRQTLLDMIARERKGEVVDRGAIRNACQMLMILGLEGRSVYEEDFEAPFLEMSAEFFQMESQKFLAENSASVYIKKVEARINEEIERVMHCLDKSTEEPIVKVVERELISKHMKTIVEMENSGLVHMLKNGKTEDLGCMYKLFSRVPNGLKTMCECMSSYLREQGKALVSEEGEGKNPVDYIQGLLDLKSRFDRFLLESFNNDRLFKQTIAGDFEYFLNLNSRSPEYLSLFIDDKLKKGVKGLTEQEVETILDKAMVLFRFMQEKDVFERYYKQHLARRLLTNKSVSDDSEKNMISKLKTECGCQFTSKLEGMFRDMSISNTTMDEFRQHLQATGVSLGGVDLTVRVLTTGYWPTQSATPKCNIPPAPRHAFEIFRRFYLAKHSGRQLTLQHHMGSADLNATFYGPVKKEDGSEVGVGGAQVTGSNTRKHILQVSTFQMTILMLFNNREKYTFEEIQQETDIPERELVRALQSLACGKPTQRVLTKEPKSKEIENGHIFTVNDQFTSKLHRVKIQTVAAKQGESDPERKETRQKVDDDRKHEIEAAIVRIMKSRKKMQHNVLVAEVTQQLKARFLPSPVVIKKRIEGLIEREYLARTPEDRKVYTYVA

SEQ ID NO: 5702 - protein, 744 aa, Homo sapiens
MDEKYVNSIWDLLKNAIQEIQRKNNSGLSFEELYRNAYTMVLHKHGEKLYTGLREVVTEHLINKVREDVLNSLNNNFLQTLNQAWNDHQTAMVMIRDILMYMDRVYVQQNNVENVYNLGLIIFRDQVVRYGCIRDHLRQTLLDMIARERKGEVVDRGAIRNACQMLMILGLEGRSVYEEDFEAPFLEMSAEFFQMESQKFLAENSASVYIKKVEARINEEIERVMHCLDKSTEEPIVKVVERELISKHMKTIVEMENSGLVHMLKNGKTEDLGCMYKLFSRVPNGLKTMCECMSSYLREQGKALVSEEGEGKNPVDYIQGLLDLKSRFDRFLLESFNNDRLFKQTIAGDFEYFLNLNSRSPEYLSLFIDDKLKKGVKGLTEQEVETILDKAMVLFRFMQEKDVFERYYKQHLARRLLTNKSVSDDSEKNMISKLKTECGCQFTSKLEGMFRDMSISNTTMDEFRQHLQATGVSLGGVDLTVRVLTTGYWPTQSATPKCNIPPAPRHAFEIFRRFYLAKHSGRQLTLQHHMGSADLNATFYGPVKKEDGSEVGVGGAQVTGSNTRKHILQVSTFQMTILMLFNNREKYTFEEIQQETDIPERELVRALQSLACGKPTQRVLTKEPKSKEIENGHIFTVNDQFTSKLHRVKIQTVAAKQGESDPERKETRQKVDDDRKHEIEAAIVRIMKSRKKMQHNVLVAEVTQQLKARFLPSPVVIKKRIEGLIEREYLARTPEDRKVYTYVA

SEQ ID NO: 5703 - protein, 744 aa, Homo sapiens; identical to SEQ ID NO: 5702

SEQ ID NO: 5704 - protein, 465 aa, Homo sapiens
METGFPAIMYPGSFIGGWGEEYLSWEGPGLPDFVFQQQPVESEAMHCSNPKSGVVLATVARGPDACQILTRAPLGQDPPQRTVLGLLTANGQYRRTCGQGITRIRCYSGSENAFPPAGKKALPDCGVQEPPKQGFDIYMDELEQGDRDSCSVREGMAFEDVYEVDTGTLKSDLHFLLDFNTVSPMLVDSSLLSQSEDISSLGTDVINVTEYAEEIYQYLREAEIRHRPKAHYMKKQPDITEGMRTILVDWLVEVGEEYKLRAETLYLAVNFLDRFLSCMSVLRGKLQLVGTAAMLLASKYEEIYPPEVDEFVYITDDTYTKRQLLKMEHLLLKVLAFDLTVPTTNQFLLQYLRRQGVCVRTENLAKYVAELSLLEADPFLKYLPSLIAAAAFCLANYTVNKHFWPETLAAFTGYSLSEIVPCLSELHKAYLDIPHRPQQAIREKYKASKYLCVSLMEPPAVLLLQ

SEQ ID NO: 5705 - protein, 464 aa, Homo sapiens
METGFPAIMYPGSFIGGWGEEYLSWEGPGLPDFVFQQPVESEAMHCSNPKSGVVLATVARGPDACQILTRAPLGQDPPQRTVLGLLTANGQYRRTCGQGITRIRCYSGSENAFPPAGKKALPDCGVQEPPKQGFDIYMDELEQGDRDSCSVREGMAFEDVYEVDTGTLKSDLHFLLDFNTVSPMLVDSSLLSQSEDISSLGTDVINVTEYAEEIYQYLREAEIRHRPKAHYMKKQPDITEGMRTILVDWLVEVGEEYKLRAETLYLAVNFLDRFLSCMSVLRGKLQLVGTAAMLLASKYEEIYPPEVDEFVYITDDTYTKRQLLKMEHLLLKVLAFDLTVPTTNQFLLQYLRRQGVCVRTENLAKYVAELSLLEADPFLKYLPSLIAAAAFCLANYTVNKHFWPETLAAFTGYSLSEIVPCLSELHKAYLDIPHRPQQAIREKYKASKYLCVSLMEPPAVLLLQ

SEQ ID NO: 5706 - protein, 421 aa, Homo sapiens
MHCSNPKSGVVLATVARGPDACQILTRAPLGQDPPQRTVLGLLTANGQYRRTCGQGITRIRCYSGSENAFPPAGKKALPDCGVQEPPKQGFDIYMDELEQGDRDSCSVREGMAFEDVYEVDTGTLKSDLHFLLDFNTVSPMLVDSSLLSQSEDISSLGTDVINVTEYAEEIYQYLREAEIRHRPKAHYMKKQPDITEGMRTILVDWLVEVGEEYKLRAETLYLAVNFLDRFLSCMSVLRGKLQLVGTAAMLLASKYEEIYPPEVDEFVYITDDTYTKRQLLKMEHLLLKVLAFDLTVPTTNQFLLQYLRRQGVCVRTENLAKYVAELSLLEADPFLKYLPSLIAAAAFCLANYTVNKHFWPETLAAFTGYSLSEIVPCLSELHKAYLDIPHRPQQAIREKYKASKYLCVSLMEPPAVLLLQ

SEQ ID NO: 5707 - protein, 421 aa, Homo sapiens; identical to SEQ ID NO: 5706

SEQ ID NO: 5708 - protein, 432 aa, Homo sapiens
MLGNSAPGPATREAGSALLALQQTALQEDQENINPEKAAPVQQPRTRAALAVLKSGNPRGLAQQQRPKTRRVAPLKDLPVNDEHVTVPPWKANSKQPAFTIHVDEAEKEAQKKPAESQKIEREDALAFNSAISLPGPRKPLVPLDYPMDGSFESPHTMDMSIILEDEKPVSVNEVPDYHEDIHTYLREMEVKCKPKVGYMKKQPDITNSMRAILVDWLVEVGEEYKLQNETLHLAVNYIDRFLSSMSVLRGKLQLVGTAAMLLASKFEEIYPPEVAEFVYITDDTYTKKQVLRMEHLVLKVLTFDLAAPTVNQFLTQYFLHQQPANCKVESLAMFLGELSLIDADPYLKYLPSVIAGAAFHLALYTVTGQSWPESLIRKTGYTLESLKPCLMDLHQTYLKAPQHAQQSIREKYKNSKYHGVSLLNPPETLNL

SEQ ID NO: 5709 - protein, 433 aa, Homo sapiens
MALRVTRNSKINAENKAKINMAGAKRVPTAPAATSKPGLRPRTALGDIGNKVSEQLQAKMPMKKEAKPSATGKVIDKKLPKPLEKVPMLVPVPVSEPVPEPEPEPEPEPVKEEKLSPEPILVDTASPSPMETSGCAPAEEDLCQAFSDVILAVNDVDAEDGADPNLCSEYVKDIYAYLRQLEEEQAVRPKYLLGREVTGNMRAILIDWLVQVQMKFRLLQETMYMTVSIIDRFMQNNCVPKKMLQLVGVTAMFIASKYEEMYPPEIGDFAFVTDNTYTKHQIRQMEMKILRALNFGLGRPLPLHFLRRASKIGEVDVEQHTLAKYLMELTMLDYDMVHFPPSQIAAGAFCLALKILDNGEWTPTLQHYLSYTEESLLPVMQHLAKNVVMVNQGLTKHMTVKNKYATSKHAKISTLPQLNSALVQDLAKAVAKV

SEQ ID NO: 5710 - protein, 396 aa, Homo sapiens
MALRVTRNSKINAENKAKINMAGAKRVPTAPAATSKPGLRPRTALGDIGNKVSEQLQAKMPMKKEAKPSATGKVIDKKLPKPLEKVPMLVPVPVSEPVPEPEPEPEPEPVKEEKLSPEPILVDTASPSPMETSGCAPAEEDLCQAFSDVILAVNDVDAEDGADPNLCSEYVKDIYAYLRQLEEEQAVRPKYLLGREVTGNMRAILIDWLVQVQMKFRLLQETMYMTVSIIDRFMQNNCVPKKMLQLVGVTAMFIASKYEEMYPPEIGDFAFVTDNTYTKHQIRQMEMKILRALNFGLGRPLPLHFLRRASKIGEVDVEQHTLAKYLMELTMLDYDMVHFPPSQIAAGAFCLALKILDNGEWTVKNKYATSKHAKISTLPQLNSALVQDLAKAVAKV

SEQ ID NO: 5711 - protein, 401 aa, Homo sapiens
MALRVTRNSKINAENKAKINMAGAKRVPTAPAATSKPGLRPRTALGDIGNKVSEQLQAKMPMKKEAKPSATGKVIDKKLPKPLEKVPMLVPVPVSEPVPEPEPEPEPEPVKEEKLSPEPILVDTASPSPMETSGCAPAEEDLCQAFSDVILAVNDVDAEDGADPNLCSEYVKDIYAYLRQLEEEQAVRPKYLLGREVTGNMRAILIDWLVQVQMKFRLLQETMYMTVSIIDRFMQNNCVPKKMLQLVGVTAMFIASKYEEMYPPEIGDFAFVTDNTYTKHQIRQMEMKILRALNFGLGRPLPLHFLRRASKIGEVDVEQHTLAKYLMELTMLDYDMVHFPPSQIAAGAFCLALKILDNGEWTPTLQHYLSYTEESLLPVMQHLAKNVVMVNQGLTKHMVSQ

SEQ ID NO: 5712 - protein, 398 aa, Homo sapiens
MALLRRPTVSSDLENIDTGVNSKVKSHVTIRRTVLEEIGNRVTTRAAQVAKKAQNTKVPVQPTKTTNVNKQLKPTASVKPVQMEKLAPKGPSPTPEDVSMKEENLCQAFSDALLCKIEDIDNEDWENPQLCSDYVKDIYQYLRQLEVLQSINPHFLDGRDINGRMRAILVDWLVQVHSKFRLLQETLYMCVGIMDRFLQVQPVSRKKLQLVGITALLLASKYEEMFSPNIEDFVYITDNAYTSSQIREMETLILKELKFELGRPLPLHFLRRASKAGEVDVEQHTLAKYLMELTLIDYDMVHYHPSKVAAAASCLSQKVLGQGKWNLKQQYYTGYTENEVLEVMQHMAKNVVKVNENLTKFIAIKNKYASSKLLKISMIPQLNSKAVKDLASPLIGRS

SEQ ID NO: 5713 - protein, 143 aa, Homo sapiens
MAGNFWQSSHYLQWILDKQDLLKERQKDLKFLSEEEYWKLQIFFTNVIQALGEHLKLRQQVIATATVYFKRFYARYSLKSIDPVLMAPTCVFLASKVEEFGVVSNTRLIAAATSVCKCKKYICFKDVILKKAPEYIDFFFFSL

SEQ ID NO: 5714 - protein, 283 aa, Homo sapiens
MAGNFWQSSHYLQWILDKQDLLKERQKDLKFLSEEEYWKLQIFFTNVIQALGEHLKLRQQVIATATVYFKRFYARYSLKSIDPVLMAPTCVFLASKVEEFGVVSNTRLIAAATSVLKTRFSYAFPKEFPYRMNHILECEFYLLELMDCCLIVYHPYRPLLQYVQDMGQEDMLLPLAWRIVNDTYRTDLCLLYPPFMIALACLHVACVVQQKDARQWFAELSVDMEKILEIIRVILKLYEQWKNFDERKEMATILSKMPKPKPPPNSEGEQGPNGSQNSSYSQS

SEQ ID NO: 5715 - protein, 198 aa, Homo sapiens
MAPTCVFLASKVEEFGVVSNTRLIAAATSVLKTRFSYAFPKEFPYRMNHILECEFYLLELMDCCLIVYHPYRPLLQYVQDMGQEDMLLPLAWRIVNDTYRTDLCLLYPPFMIALACLHVACVVQQKDARQWFAELSVDMEKILEIIRVILKLYEQWKNFDERKEMATILSKMPKPKPPPNSEGEQGPNGSQNSSYSQS

SEQ ID NO: 5716 - protein, 198 aa, Homo sapiens; identical to SEQ ID NO: 5715

SEQ ID NO: 5717 - protein, 162 aa, Homo sapiens
MAPTCVFLASKVEEFGVVSNTRLIAAATSVLKTRFSYAFPKEFPYRMNHILECEFYLLELMDCCLIVYHPYRPLLQYVQDMGQEDMLLPLAWRIVNDTYRTDLCLLYPPFMIALACLHVACVVQQKDARQWFAELSVDMEKILEIIRVILKLYEQWKNFDER

SEQ ID NO: 5718 - protein, 760 aa, Homo sapiens
MSTVEEDSDTVTVETVNSVTLTQDTEGNLILHCPQNEADEIDSEDSIEPPHKRLCLSSEDDQSIDDSTPCISVVALPLSENDQSFEVTMTATTEVADDEVTEGTVTQIQILQNEQLDEISPLGNEEVSAVSQAWFTTKEDKDSLTNKGHKWKQGMWSKEEIDILMNNIERYLKARGIKDATEIIFEMSKDERKDFYRTIAWGLNRPLFAVYRRVLRMYDDRNHVGKYTPEEIEKLKELRIKHGNDWATIGAALGRSASSVKDRCRLMKDTCNTGKWTEEEEKRLAEVVHELTSTEPGDIVTQGVSWAAVAERVGTRSEKQCRSKWLNYLNWKQSGGTEWTKEDEINLILRIAELDVADENDINWDLLAEGWSSVRSPQWLRSKWWTIKRQIANHKDVSFPVLIKGLKQLHENQKNNPTLLENKSGSGVPNSNTNSSVQHVQIRVARLEDNTAISSSPMAALQIPVQITHVSSADSPATVDSETITLNSGTLQTFEILPSFHLQPTGTPGTYLLQTSSSQGLPLTLTASPTVTLTAAAPASPEQIIVHALSPEHLLNTSDNVTVQCHTPRVIIQTVATEDITSSISQAELTVDSDIQSSDFPEPPDALEADTFPDEIHHPKMTVEPSFNDAHVSKFSDQNSTELMNSVMVRTEEEISDTDLKQEESPSDLASAYVTEGLESPTIEEQVDQTIDDETILIVPSPHGFIQASDVIDTESVLPLTTLTDPILQHHQEESNIIGSSLGSPVSEDSKDVEDLVNCH

SEQ ID NO: 5719 - protein, 285 aa, Homo sapiens
MSTVEEDSDTVTVETVNSVTLTQDTEGNLILHCPQNEADEIDSEDSIEPPHKRLCLSSEDDQSIDDSTPCISVVALPLSENDQSFEVTMTATTEVADDEVTEGTVTQIQILQNEQLDEISPLGNEEVSAVSQAWFTTKEDKDSLTNKGHKWKQGMWSKEEIDILMNNIERYLKARGIKDATEIIFEMSKDERKDFYRTIAWGLNRPLFAVYRRVLRMYDDRNHVGKYTPEEIEKLKEKKAIAACFFFTHRQLWTPKKGHTFKLWLSKYCCPQLPNQSNGKKKNEE

SEQ ID NO: 5720 - protein, 760 aa, Homo sapiens; identical to SEQ ID NO: 5718

SEQ ID NO: 5721 - protein, 244 aa, Homo sapiens
MSTVEEDSDTVTVETVNSVTLTQDTEGNLILHCPQNVSENDQSFEVTMTATTEVADDEVTEGTVTQIQILQNEQLDEISPLGNEEVSAVSQAWFTTKEDKDSLTNKGHKWKQGMWSKEEIDILMNNIERYLKARGIKDATEIIFEMSKDERKDFYRTIAWGLNRPLFAVYRRVLRMYDDRNHVGKYTPEEIEKLKEKKAIAACFFFTHRQLWTPKKGHTFKLWLSKYCCPQLPNQSNGKKKNEE

SEQ ID NO: 5722 - protein, 272 aa, Homo sapiens
MSTVEEDSDTVTVETVNSVTLTQDTEGNLILHCPQNEADEIDSEDSIEPPHKRLCLSSEDDQSIDDSTPCISVVALPLSENDQSFEVTMTATTEVADDEVTEGTVTQIQILQNEQLDEISPLGNEEVSAVSQAWFTTKEDKDSLTNKGHKWKQGMWSKEEIDILMNNIERYLKARGIKDATEIIFEMSKDERKDFYRTIAWGLNRPLFAVYRRVLRMYDDRNHVGKYTPEEIEKLKEQLWTPKKGHTFKLWLSKYCCPQLPNQSNGKKKNEE

SEQ ID NO: 5723 - protein, 690 aa, Homo sapiens
MSTVEEDSDTVTVETVNSVTLTQDTEGNLILHCPQNEADEIDSEDSIEPPHKRLCLSSEDDQSIDDSTPCISVVALPLSENDQSFEVTMTATTEVADDEVTEGTVTQIQILQNEQLDEISPLGNEEVSAVSQAWFTTKEDKDSLTNKGHKWKQGMWSKEEIDILMNNIERYLKARGIKDATEIIFEMSKDERKDFYRTIAWGLNRPLFAVYRRVLRMYDDRNHVGKYTPEEIEKLKELRIKHGNDWATIGAALGRSASSVKDRCRLMKDTCNTGKWTEEEEKRLAEVVHELTSTEPGDIVTQGVSWAAVAERVGTRSEKQCRSKWLNYLNWKQSGGTEWTKEDEINLILRIAELDVADENDINWDLLAEGWSSVRSPQWLRSKWWTIKRQIANHKDVSFPASADSPATVDSETITLNSGTLQTFEILPSFHLQPTGTPGTYLLQTSSSQGLPLTLTASPTVTLTAAAPASPEQIIVHALSPEHLLNTSDNVTVQCHTPRVIIQTVATEDITSSISQAELTVDSDIQSSDFPEPPDALEADTFPDEIHHPKMTVEPSFNDAHVSKFSDQNSTELMNSVMVRTEEEISDTDLKQEESPSDLASAYVTEGLESPTIEEQVDQTIDDETILIVPSPHGFIQASDVIDTESVLPLTTLTDPILQHHQEESNIIGSSLGSPVSEDSKDVEDLVNCH

SEQ ID NO: 5724 - protein, 494 aa, Homo sapiens
MKDTCNTGKWTEEEEKRLAEVVHELTSTEPGDIVTQGVSWAAVAERVGTRSEKQCRSKWLNYLNWKQSGGTEWTKEDEINLILRIAELDVADENDINWDLLAEGWSSVRSPQWLRSKWWTIKRQIANHKDVSFPVLIKGLKQLHENQKNNPTLLENKSGSGVPNSNTNSSVQHVQIRVARLEDNTAISSSPMAALQIPVQITHVSSADSPATVDSETITLNSGTLQTFEILPSFHLQPTGTPGTYLLQTSSSQGLPLTLTASPTVTLTAAAPASPEQIIVHALSPEHLLNTSDNVTVQCHTPRVIIQTVATEDITSSISQAELTVDSDIQSSDFPEPPDALEADTFPDEIHHPKMTVEPSFNDAHVSKFSDQNSTELMNSVMVRTEEEISDTDLKQEESPSDLASAYVTEGLESPTIEEQVDQTIDDETILIVPSPHGFIQASDVIDTESVLPLTTLTDPILQHHQEESNIIGSSLGSPVSEDSKDVEDLVNCH

SEQ ID NO: 5725 - protein, 36 aa, Homo sapiens
MSTVEEDSDTVTVETVNSVTLTQDTEGNLILHCPQN

SEQ ID NO: 5726 - protein, 10 aa, Homo sapiens
MTATTEVADD

SEQ ID NO: 5727 - protein, 36 aa, Homo sapiens; identical to SEQ ID NO: 5725

SEQ ID NO: 5728 - protein, 244 aa, Homo sapiens; identical to SEQ ID NO: 5721

SEQ ID NO: 5729 - protein, 193 aa, Homo sapiens
MSTVEEDSDTVTVETVNSVTLTQDTEGNLILHCPQNEADEIDSEDSIEPPHKRLCLSSEDDQSIDDSTPCISVVALPLSENDQSFEVTMTATTEVADDEVTEGTVTQIQILQNEQLDEISPLGNEEVSAVSQAWFTTKEDKDSLTNKGHKWKQGMWSKEEIDILMNNIERYLKARGIKDATEIIFEMSKDERK

SEQ ID NO: 5730 - protein, 27 aa, Homo sapiens
MSTVEEDSDTVTVETVNSVTLTQDTEG

SEQ ID NO: 5731 - protein, 147 aa, Homo sapiens
MSTVEEDSDTVTVETVNSVTLTQDTEGNLILHCPQNEADEIDSEDSIEPPHKRLCLSSEDDQSIDDSTPCISVVALPLSENDQSFEVTMTATTEVADDEVTEGTVTQIQILQNEQLDEISPLGNEEVSAVSQAWFTTKEDKDSLTNK

SEQ ID NO: 5732 - protein, 73 aa, Homo sapiens
MSTVEEDSDTVTVETVNSVTLTQDTEGNLILHCPQNEADEIDSEDSIEPPHKRLCLSSEDDQSIDDSTPCISV

SEQ ID NO: 5733 - protein, 672 aa, Homo sapiens
MTATTEVADDEVTEGTVTQIQILQNEQLDEISPLGNEEVSAVSQAWFTTKEDKDSLTNKGHKWKQGMWSKEEIDILMNNIERYLKARGIKDATEIIFEMSKDERKDFYRTIAWGLNRPLFAVYRRVLRMYDDRNHVGKYTPEEIEKLKELRIKHGNDWATIGAALGRSASSVKDRCRLMKDTCNTGKWTEEEEKRLAEVVHELTSTEPGDIVTQGVSWAAVAERVGTRSEKQCRSKWLNYLNWKQSGGTEWTKEDEINLILRIAELDVADENDINWDLLAEGWSSVRSPQWLRSKWWTIKRQIANHKDVSFPVLIKGLKQLHENQKNNPTLLENKSGSGVPNSNTNSSVQHVQIRVARLEDNTAISSSPMAALQIPVQITHVSSADSPATVDSETITLNSGTLQTFEILPSFHLQPTGTPGTYLLQTSSSQGLPLTLTASPTVTLTAAAPASPEQIIVHALSPEHLLNTSDNVTVQCHTPRVIIQTVATEDITSSISQAELTVDSDIQSSDFPEPPDALEADTFPDEIHHPKMTVEPSFNDAHVSKFSDQNSTELMNSVMVRTEEEISDTDLKQEESPSDLASAYVTEGLESPTIEEQVDQTIDDETILIVPSPHGFIQASDVIDTESVLPLTTLTDPILQHHQEESNIIGSSLGSPVSEDSKDVEDLVNCH

SEQ ID NO: 5734 - protein, 96 aa, Homo sapiens
MSTVEEDSDTVTVETVNSVTLTQDTEGNLILHCPQNEADEIDSEDSIEPPHKRLCLSSEDDQSIDDSTPCISVVALPLSENDQSFEVTMTATTEVA

SEQ ID NO: 5735 - protein, 56 aa, Homo sapiens
MSTVEEDSDTVTVETVNSVTLTQDTEGNLILHCPQNEADEIDSEDSIEPPHKRLCL

SEQ ID NO: 5736 - protein, 285 aa, Homo sapiens; identical to SEQ ID NO: 5719

SEQ ID NO: 5737 - protein, 49 aa, Homo sapiens
MSTVEEDSDTVTVETVNSVTLTQDTEGNLILHCPQNEADEIDSEDSIEP

SEQ ID NO: 5738 - protein, 109 aa, Homo sapiens
MSTVEEDSDTVTVETVNSVTLTQDTEGNLILHCPQNEADEIDSEDSIEPPHKRLCLSSEDDQSIDDSTPCISVVALPLSENDQSFEVTMTATTEVADDEVTEGTVTQIQ

SEQ ID NO: 5739 - protein, 91 aa, Homo sapiens
MSTVEEDSDTVTVETVNSVTLTQDTEGNLILHCPQNEADEIDSEDSIEPPHKRLCLSSEDDQSIDDSTPCISVVALPLSENDQSFEVTMTA

SEQ ID NO: 5740 - protein, 295 aa, Homo sapiens
MEHQLLCCEVETIRRAYPDANLLNDRVLRAMLKAEETCAPSVSYFKCVQKEVLPSMRKIVATWMLEVCEEQKCEEEVFPLAMNYLDRFLSLEPVKKSRLQLLGATCMFVASKMKETIPLTAEKLCIYTDNSIRPEELLQMELLLVNKLKWNLAAMTPHDFIEHFLSKMPEAEENKQIIRKHAQTFVALCATDVKFISNPPSMVAAGSVVAAVQGLNLRSPNNFLSYYRLTRFLSRVIKCDPDCLRACQEQIEALLESSLRQAQQNMDPKAAEEEEEEEEEVDLACTPTDVRDVDI

SEQ ID NO: 5741 - protein, 161 aa, Homo sapiens
MEHQLLCCEVETIRRAYPDANLLNDRVLRAMLKAEETCAPSVSYFKCVQTFVALCATDVKFISNPPSMVAAGSVVAAVQGLNLRSPNNFLSYYRLTRFLSRVIKCDPDCLRACQEQIEALLESSLRQAQQNMDPKAAEEEEEEEEEVDLACTPTDVRDVDI

SEQ ID NO: 5742 - protein, 289 aa, Homo sapiens
MELLCHEVDPVRRAVRDRNLLRDDRVLQNLLTIEERYLPQCSYFKCVQKDIQPYMRRMVATWMLEVCEEQKCEEEVFPLAMNYLDRFLAGVPTPKSHLQLLGAVCMFLASKLKETSPLTAEKLCIYTDNSIKPQELLEWELVVLGKLKWNLAAVTPHDFIEHILRKLPQQREKLSLIRKHAQTFIALCATDFKFAMYPPSMIATGSVGAAICGLQQDEEVSSLTCDALTELLAKITNTDVDCLKACQEQIEAVLLNSLQQYRQDQRDGSKSEDELDQASTPTDVRDIDL

SEQ ID NO: 5743 - protein, 242 aa, Homo sapiens
MKSAGGSGRSLLPSPRVCEEQRCEEEVFPLAMNYLDRYLSCVPTRKAQLQLLGAVCMLLASKLRETTPLTIEKLCIYTDHAVSPRQLRDWEVLVLGKLKWDLAAVIAHDFLAFILHRLSLPRDRQALVKKHAQTFLALCATDYTFAMYPPSMIATGSIGAAVQGLGACSMSGDELTELLAGITGTEVDCLRACQEQIEAALRESLREASQTSSSPAPKAPRGSSSQGPSQTSTPTDVTAIHL

SEQ ID NO: 5744 - protein, 211 aa, Homo sapiens
MNYLDRYLSCVPTRKAQLQLLGAVCMLLASKLRETTPLTIEKLCIYTDHAVSPRQLRDWEVLVLGKLKWDLAAVIAHDFLAFILHRLSLPRDRQALVKKHAQTFLALCATDYTFAMYPPSMIATGSIGAAVQGLGACSMSGDELTELLAGITGTEVDCLRACQEQIEAALRESLREASQTSSSPAPKAPRGSSSQGPSQTSTPTDVTAIHL

SEQ ID NO: 5745 - protein, 292 aa, Homo sapiens
MELLCCEGTRHAPRAGPDPRLLGDQRVLQSLLRLEERYVPRASYFQCVQREIKPHMRKMLAYWMLEVCEEQRCEEEVFPLAMNYLDRYLSCVPTRKAQLQLLGAVCMLLASKLRETTPLTIEKLCIYTDHAVSPRQLRDWEVLVLGKLKWDLAAVIAHDFLAFILHRLSLPRDRQALVKKHAQTFLALCATDYTFAMYPPSMIATGSIGAAVQGLGACSMSGDELTELLAGITGTEVDCLRACQEQIEAALRESLREASQTSSSPAPKAPRGSSSQGPSQTSTPTDVTAIHL

SEQ ID NO: 5746 - protein, 220 aa, Homo sapiens
MELLCCEGTRHAPRAGPDPRLLGDQRVLQSLLRLEERYVPRASYFQCVQREIKPHMRKMLAYWMLEDWEVLVLGKLKWDLAAVIAHDFLAFILHRLSLPRDRQALVKKHAQTFLALCATDYTFAMYPPSMIATGSIGAAVQGLGACSMSGDELTELLAGITGTEVDCLRACQEQIEAALRESLREASQTSSSPAPKAPRGSSSQGPSQTSTPTDVTAIHL

SEQ ID NO: 5747 - protein, 96 aa, Homo sapiens
MYPPSMIATGSIGAAVQGLGACSMSGDELTELLAGITGTEVDCLRACQEQIEAALRESLREASQTSSSPAPKAPRGSSSQGPSQTSTPTDVTAIHL

SEQ ID NO: 5748 - protein, 43 aa, Homo sapiens
MNYLDRYLSCVPTRKAQLQLLGAVCMLLASKLRETTPLTIEKL

SEQ ID NO: 5749 - protein, 118 aa, Homo sapiens
MNYLDRYLSCVPTRKAQLQLLGAVCMLLASKLRETTPLTIEKLCIYTDHAVSPRQLRDWEVLVLGKLKWDLAAVIAHDFLAFILHRLSLPRDRQALVKKHAQTFLALCATDYTFAMYP

SEQ ID NO: 5750 - protein, 10 aa, Homo sapiens
MYPPSMIATG

SEQ ID NO: 5751 - protein, 211 aa, Homo sapiens; identical to SEQ ID NO: 5744

SEQ ID NO: 5752 - protein, 410 aa, Homo sapiens
MPRERRERDAKERDTMKEDGGAEFSARSRKRKANVTVFLQDPDEEMAKIDRTARDQCGSQPWDNNAVCADPCSLIPTPDKEDDDRVYPNSTCKPRIIAPSRGSPLPVLSWANREEVWKIMLNKEKTYLRDQHFLEQHPLLQPKMRAILLDWLMEVCEVYKLHRETFYLAQDFFDRYMATQENVVKTLLQLIGISSLFIAAKLEEIYPPKLHQFAYVTDGACSGDEILTMELMIMKALKWRLSPLTIVSWLNVYMQVAYLNDLHEVLLPQYPQQIFIQIAELLDLCVLDVDCLEFPYGILAASALYHFSSSELMQKVSGYQWCDIENCVKWMVPFAMVIRETGSSKLKHFRGVADEDAHNIQTHRDSLDLLDKARAKKAMLSEQNRASPLPSGLLTPPQSGKKQSSGPEMA

SEQ ID NO: 5753 - protein, 367 aa, Homo sapiens
MPRERRERDAKERDTMKEDGGAEFSARSRKRKANVTVFLQDPDEEMAKIDRTARDQCGSQPWDNNAVCADPCSLIPTPDKEDDDRVYPNSTCKPRIIAPSRGSPLPVLSWANREEVWKIMLNKEKTYLRDQHFLEQHPLLQPKMRAILLDWLMEVSLSLPEIYPPKLHQFAYVTDGACSGDEILTMELMIMKALKWRLSPLTIVSWLNVYMQVAYLNDLHEVLLPQYPQQIFIQIAELLDLCVLDVDCLEFPYGILAASALYHFSSSELMQKVSGYQWCDIENCVKWMVPFAMVIRETGSSKLKHFRGVADEDAHNIQTHRDSLDLLDKARAKKAMLSEQNRASPLPSGLLTPPQSGKKQSSGPEMA

SEQ ID NO: 5754 - protein, 395 aa, Homo sapiens
MKEDGGAEFSARSRKRKANVTVFLQDPDEEMAKIDRTARDQCGSQPWDNNAVCADPCSLIPTPDKEDDDRVYPNSTCKPRIIAPSRGSPLPVLSWANREEVWKIMLNKEKTYLRDQHFLEQHPLLQPKMRAILLDWLMEVCEVYKLHRETFYLAQDFFDRYMATQENVVKTLLQLIGISSLFIAAKLEEIYPPKLHQFAYVTDGACSGDEILTMELMIMKALKWRLSPLTIVSWLNVYMQVAYLNDLHEVLLPQYPQQIFIQIAELLDLCVLDVDCLEFPYGILAASALYHFSSSELMQKVSGYQWCDIENCVKWMVPFAMVIRETGSSKLKHFRGVADEDAHNIQTHRDSLDLLDKARAKKAMLSEQNRASPLPSGLLTPPQSGKKQSSGPEMA

SEQ ID NO: 5755 - protein, 701 aa, Homo sapiens
RTSWPSELAAEKGNFEAAVKLGIAYLYNEGLSVSDEARAEVNGLKASRFFSLAERLNVGAAPFIWLFIRPPWSVSGSCCKAVVHESLRAECQLQRTHKASILHCLGRVLSLFEDEEKQQQAHDLFEEAAHQGCLTSSYLLWESDRRTDVSDPGRCLHSFRKLRDYAAKGCWEAQLSLAKACANANQLGLEVRASSEIVCQLFQASQAVSKQQVFSVQKGLNDTMRYILIDWLVEVATMKDFTSLCLHLTVECVDRYLRRRLVPRYRLQLLGIACMVICTRFISKEILTIREAVWLTDNTYKYEDLVRMMGEIVSALEGKIRVPTVVDYKEVLLTLVPVELRTQHLCSFLCELSLLHTSLSAYAPARLAAAALLLARLTHGQTQPWTTQLWDLTGFSYEDLIPCVLSLHKKCFHDDAPKDYRQVSLTAVKQRFEDKRYGEISQEEVLSYSQLCAALGVTQDSPDPPTFLSTGEIHAFLSSPSGRRTKRKRENSLQEDRGSFVTTPTAELSSQEETLLGSFLDWSLDCCSGYEGDQESEGEKEGDVTAPSGILDVTVVYLNPEQHCCQESSDEEACPEDKGPQDPQALALDTQIPATPGPKPLVRTSREPGKDVTTSGYSSVSTASPTSSVDGGLGALPQPTSVLSLDSDSHTQPCHHQARKSCLQCRPPSPPESSVPQQQVKRINLCIHSEEEDMNLGLVRL

SEQ ID NO: 5756 - protein, 786 aa, Homo sapiens
MGSGGVVHCRCAKCFCYPTKRRIRRRPRNLTILSLPEDVLFHILKWLSVEDILAVRAVHSQLKDLVDNHASVWACASFQELWPSPGNLKLFERAAEKGNFEAAVKLGIAYLYNEGLSVSDEARAEVNGLKASRFFSLAERLNVGAAPFIWLFIRPPWSVSGSCCKAVVHESLRAECQLQRTHKASILHCLGRVLSLFEDEEKQQQAHDLFEEAAHQGCLTSSYLLWESDRRTDVSDPGRCLHSFRKLRDYAAKGCWEAQLSLAKACANANQLGLEVRASSEIVCQLFQASQAVSKQQVFSVQKGLNDTMRYILIDWLVEVATMKDFTSLCLHLTVECVDRYLRRRLVPRYRLQLLGIACMVICTRFISKEILTIREAVWLTDNTYKYEDLVRMMGEIVSALEGKIRVPTVVDYKEVLLTLVPVELRTQHLCSFLCELSLLHTSLSAYAPARLAAAALLLARLTHGQTQPWTTQLWDLTGFSYEDLIPCVLSLHKKCFHDDAPKDYRQVSLTAVKQRFEDKRYGEISQEEVLSYSQLCAALGVTQDSPDPPTFLSTGEIHAFLSSPSGRRTKRKRENSLQEDRGSFVTTPTAELSSQEETLLGSFLDWSLDCCSGYEGDQESEGEKEGDVTAPSGILDVTVVYLNPEQHCCQESSDEEACPEDKGPQDPQALALDTQIPATPGPKPLVRTSREPGKDVTTSGYSSVSTASPTSSVDGGLGALPQPTSVLSLDSDSHTQPCHHQARKSCLQCRPPSPPESSVPQQQVKRINLCIHSEEEDMNLGLVRL

SEQ ID NO: 5757 - protein, 295 aa, Homo sapiens
MIEVLTTTDSQKLLHQLNALLEQESRCQPKVCGLRLIESAHDNGLRMTARLRDFEVKDLLSLTQFFGFDTETFSLAVNLLDRFLSKMKVQPKHLGCVGLSCFYLAVKSIEEERNVPLATDLIRISQYRFTVSDLMRMEKIVLEKVCWKVKATTAFQFLQLYYSLLQENLPLERRNSINFERLEAQLKACHCRIIFSKAKPSVLALSIIALEIQAQKCVELTEGIECLQKHSKINGRDLTFWQELVSKCLTEYSSNKCSKPNVQKLKWIVSGRTARQLKHSYYRITHLPTIPEMVP

SEQ ID NO: 5758 - protein, 295 aa, Homo sapiens; identical to SEQ ID NO: 5757

SEQ ID NO: 5759 - protein, 136 aa, Homo sapiens
MIEVLTTTDSQKLLHQLNALLEQESRCQPKVCGLRLIESAHDNGLRMTARLRDFEVKDLLSLTQFFGFDTETFSLAVNLLDRFLSKMKVQPKHLGCVGLSCFYLAVKSIEEERNVPLATDLIRISQYRFTVSDLMR

SEQ ID NO: 5760 - protein, 136 aa, Homo sapiens; identical to SEQ ID NO: 5759

SEQ ID NO: 5761 - protein, 167 aa, Homo sapiens
MSAKDLMRMEKIVLEKVCWKVKATTAFQFLQLYYSLLQENLPLERRNSINFERLEAQLKACHCRIIFSKAKPSVLALSIIALEIQAQKCVELTEGIECLQKHSKINGRDLTFWQELVSKCLTEYSSNKCSKPNVQKLKWIVSGRTARQLKHSYYRITHLPTIPEMVP

SEQ ID NO: 5762 - protein, 115 aa, Homo sapiens
MIEVLTTTDSQKLLHQLNALLEQESRCQPKVCGLRLIESAHDNGLRMTARLRDFEVKDLLSLTQFFGFDTETFSLAVNLLDRFLSKMKVQPKHLGCVGLSCFYLAVKSIEEERNV

SEQ ID NO: 5763 - protein, 161 aa, Homo sapiens
MRMEKIVLEKVCWKVKATTAFQFLQLYYSLLQENLPLERRNSINFERLEAQLKACHCRIIFSKAKPSVLALSIIALEIQAQKCVELTEGIECLQKHSKINGRDLTFWQELVSKCLTEYSSNKCSKPNVQKLKWIVSGRTARQLKHSYYRITHLPTIPEMVP

SEQ ID NO: 5764 - protein, 161 aa, Homo sapiens; identical to SEQ ID NO: 5763

SEQ ID NO: 5765 - protein, 34 aa, Homo sapiens
MIEVLTTTDSQKLLHQLNALLEQESRCQPKRHFL

SEQ ID NO: 5766 - protein, 344 aa, Homo sapiens
MKDLGAEHLAGHEGVQLLGLLNVYLEQEERFQPREKGLSLIEATPENDNTLCPGLRNAKVEDLRSLANFFGSCTETFVLAVNILDRFLALMKVKPKHLSCIGVCSFLLAARIVEEDCNIPSTHDVIRISQCKCTASDIKRMEKIISEKLHYELEATTALNFLHLYHTIILCHTSERKEILSLDKLEAQLKACNCRLIFSKAKPSVLALCLLNLEVETLKSVELLEILLLVKKHSKINDTEFFYWRELVSKCLAEYSSPECCKPDLKKLVWIVSRRTAQNLHNSYYSVPELPTIPEGGCFDESESEDSCEDMSCGEESLSSSPPSDQECTFFFNFKVAQTLCFPS

SEQ ID NO: 5767 - protein, 344 aa, Homo sapiens
MKDLGAEHLAGHEGVQLLGLLNVYLEQEERFQPREKGLSLIEATPENDNTLCPGLRNAKVEDLRSLANFFGSCTETFVLAVNILDRFLALMKVKPKHLSCIGVCSFLLAARIVEEDCNIPSTHDVIRISQCKCTASDIKRMEKIISEKLHYELEATTALNFLHLYHTIILCHTSERKEILSLDKLEAQLKACNCRLIFSKAKPSVLALCLLNLEVETLKSVELLEILLLVKKHSKINDTEFFYWRELVSKCLAEYSSPECCKPDLKKLVWIVSRRTAQNLHNSYYSVPELPTIPEGGCFDESESSVAQAGVQWPDLSSFQPPPTRFKRFSCLSLRSSWDYSSWT

SEQ ID NO: 5768 - protein, 344 aa, Homo sapiens; identical to SEQ ID NO: 5766

SEQ ID NO: 5769 - protein, 344 aa, Homo sapiens; identical to SEQ ID NO: 5766

SEQ ID NO: 5770 - protein, 160 aa, Homo sapiens
MKDLGAEHLAGHEGVQLLGLLNVYLEQEERFQPREKGLSLIEATPENDNTLCPGLRNAKVEDLRSLANFFGSCTETFVLAVNILDRFLALMKVKPKHLSCIGVCSFLLAARIVEEDCNIPSTHDVIRISQCKCTASDIKRMEKIISEKLHYELEATTALN

SEQ ID NO: 5771 - protein, 323 aa, Homo sapiens
MYHNSSQKRHWTFSSEEQLARLRADANRKFRCKAVANGKVLPNDPVFLEPHEEMTLCKYYEKRLLEFCSVFKPAMPRSVVGTACMYFKRFYLNNSVMEYHPRIIMLTCAFLACKVDEFNVSSPQFVGNLRESPLGQEKALEQILEYELLLIQQLNFHLIVHNPYRPFEGFLIDLKTRYPILENPEILRKTADDFLNRIALTDAYLLYTPSQIALTAILSSASRAGITMESYLSESLMLKENRTCLSQLLDIMKSMRNLVKKYEPPRSEEVAVLKQKLERCHSAELALNVITKKRKGYEDDDYVSKKSKHEEEEWTDDDLVESL

SEQ ID NO: 5772 - protein, 255 aa, Homo sapiens
MPRSVVGTACMYFKRFYLNNSVMEYHPRIIMLTCAFLACKVDEFNVSSPQFVGNLRESPLGQEKALEQILEYELLLIQQLNFHLIVHNPYRPFEGFLIDLKTRYPILENPEILRKTADDFLNRIALTDAYLLYTPSQIALTAILSSASRAGITMESYLSESLMLKENRTCLSQLLDIMKSMRNLVKKYEPPRSEEVAVLKQKLERCHSAELALNVITKKRKGYEDDDYVSKKSKHEEVCFTPKMNSKLFLLYILV

SEQ ID NO: 5773 - protein, 249 aa, Homo sapiens
MPRSVVGTACMYFKRFYLNNSVMEYHPRIIMLTCAFLACKVDEFNVSSPQFVGNLRESPLGQEKALEQILEYELLLIQQLNFHLIVHNPYRPFEGFLIDLKTRYPILENPEILRKTADDFLNRIALTDAYLLYTPSQIALTAILSSASRAGITMESYLSESLMLKENRTCLSQLLDIMKSMRNLVKKYEPPRSEEVAVLKQKLERCHSAELALNVITKKRKGYEDDDYVSKKSKHEEEEWTDDDLVESL

SEQ ID NO: 5774 - protein, 350 aa, Homo sapiens
MVTPCPTSPSSPAARAGRRDNDQNLRAPVKKSRRPRLRRKQPLHPLNPCPLPGDSGICDLFESPSSGSDGAESPSAARGGSPLPGPAQPVAQLDLQTFRDYGQSCYAFRKAQESHFHPREALARQPQVTAESRCKLLSWLIPVHRQFGLSFESLCLTVNTLDRFLTTTPVAADCFQLLGVTSLLIACKQVEVHPPRVKQLLALCCGAFSRQQLCNLECIVLHKLHFTLGAPTISFFLEHFTHARVEAGQAEASEALEAQALARGVAELSLADYAFTSYSPSLLAICCLALADRMLRVSRPVDLRLGDHPEAALEDCMGKLQLLVAINSTSLTHMLPVQICEKCSLPPSSK

SEQ ID NO: 5775 - protein, 726 aa, Homo sapiens
MEGERKNNNKRWYFTREQLENSPSRRFGVDPDKELSYRQQAANLLQDMGQRLNVSQLTINTAIVYMHRFYMIQSFTQFPGNSVAPAALFLAAKVEEQPKKLEHVIKVAHTCLHPQESLPDTRSEAYLQQVQDLVILESIILQTLGFELTIDHPHTHVVKCTQLVRASKDLAQTSYFMATNSLHLTTFSLQYTPPVVACVCIHLACKWSNWEIPVSTDGKHWWEYVDATVTLELLDELTHEFLQILEKTPNRLKRIWNWRACEAAKKTKADDRGTDEKTSEQTILNMISQSSSDTTIAGLMSMSTSTTSAVPSLPVSEESSSNLTSVEMLPGKRWLSSQPSFKLEPTQGHRTSENLALTGVDHSLPQDGSNAFISQKQNSKSVPSAKVSLKEYRAKHAEELAAQKRQLENMEANVKSQYAYAAQNLLSHHDSHSSVILKMPIEGSENPERPFLEKADKTALKMRIPVAGGDKAASSKPEEIKMRIKVHAAADKHNSVEDSVTKSREHKEKHKTHPSNHHHHHNHHSHKHSHSQLPVGTGNKRPGDPKHSSQTSNLAHKTYSLSSSFSSSSSTRKRGPSEETGGAVFDHPAKIAKSTKSSSLNFSFPSLPTMGQMPGHSSDTSGLSFSQPSCKTRVPHSKLDKGPTGANGHNTTQTIDYQDTVNMLHSLLSAQGVQPTQPTAFEFVRPYSDYLNPRSGGISSRSGNTDKPRPPPLPSEPPPPLPPLPK

SEQ ID NO: 5776 - protein, 240 aa, Homo sapiens
MEDYTKIEKIGEGTYGVVYKGRHKTTGQVVAMKKIRLESEEEGVPSTAIREISLLKELRHPNIVSLQDVLMQDSRLYLIFEFLSMDLKKYLDSIPPGQYMDSSLVKVVTLWYRSPEVLLGSARYSTPVDIWSIGTIFAELATKKPLFHGDSEIDQLFRIFRALGTPNNEVWPEVESLQDYKNTFPKWKPGSLASHVKNLDENGLDLLSKMLIYDPAKRISGKMALNHPYFNDLDNQIKKM

SEQ ID NO: 5777 - protein, 240 aa, Homo sapiens; identical to SEQ ID NO: 5776

SEQ ID NO: 5778 - protein, 297 aa, Homo sapiens
MEDYTKIEKIGEGTYGVVYKGRHKTTGQVVAMKKIRLESEEEGVPSTAIREISLLKELRHPNIVSLQDVLMQDSRLYLIFEFLSMDLKKYLDSIPPGQYMDSSLVKSYLYQILQGIVFCHSRRVLHRDLKPQNLLIDDKGTIKLADFGLARAFGIPIRVYTHEVVTLWYRSPEVLLGSARYSTPVDIWSIGTIFAELATKKPLFHGDSEIDQLFRIFRALGTPNNEVWPEVESLQDYKNTFPKWKPGSLASHVKNLDENGLDLLSKMLIYDPAKRISGKMALNHPYFNDLDNQIKKM

SEQ ID NO: 5779 - protein, 297 aa, Homo sapiens
MEDYTKIEKIGEGTYGVVYKGRHKTTGQVVAMKKIRLESEEEGVPSTAIREISLLKELRHPNIVSLQDVLMQDSRLYLIFEFLSMDLKKYLDSIPPGQYMDSSLVKSYLYQILQGIVFCHSRRVLHRDLKPQNLLIDDKGTIKLADFGLARAFGIPIRVYTHEAITLWYRSPEVLLGSARYSTPVDIWSIGTIFAELATKKPLFHGDSEIDQLFRIFRALGTPNNEVWPEVESLQDYKNTFPKWKPGSLASHVKNLDENGLDLLSKMLIYDPAKRISGKMALNHPYFNDLDNQIKKM

SEQ ID NO: 5780 - protein, 189 aa, Homo sapiens
MEDYTKIEKIGEGTYGVVYKGRHKTTGQVVAMKKIRLESEEEGVPSTAIREISLLKELRHPNIVSLQDVLMQDSRLYLIFEFLSMDLKKYLDSIPPGQYMDSSLVKSYLYQILQGIVFCHSRRVLHRDLKPQNLLIDDKGTIKLADFGLARAFGIPIRVYTHEAITLWYRSPEVLLGSARYSTPVDIWS

SEQ ID NO: 5781 - protein, 298 aa, Homo sapiens
MENFQKVEKIGEGTYGVVYKARNKLTGEVVALKKIRLDTETEGVPSTAIREISLLKELNHPNIVKLLDVIHTENKLYLVFEFLHQDLKKFMDASALTGIPLPLIKSYLFQLLQGLAFCHSHRVLHRDLKPQNLLINTEGAIKLADFGLARAFGVPVRTYTHEVVTLWYRAPEILLGCKYYSTAVDIWSLGCIFAEMVTRRALFPGDSEIDQLFRIFRTLGTPDEVVWPGVTSMPDYKPSFPKWARQDFSKVVPPLDEDGRSLLSQMLHYDPNKRISAKAALAHPFFQDVTKPVPHLRL

SEQ ID NO: 5782 - protein, 264 aa, Homo sapiens
MENFQKVEKIGEGTYGVVYKARNKLTGEVVALKKIRLDTETEGVPSTAIREISLLKELNHPNIVKLLDVIHTENKLYLVFEFLHQDLKKFMDASALTGIPLPLIKSYLFQLLQGLAFCHSHRVLHRDLKPQNLLINTEGAIKLADFGLARAFGVPVRTYTHEVTRRALFPGDSEIDQLFRIFRTLGTPDEVVWPGVTSMPDYKPSFPKWARQDFSKVVPPLDEDGRSLLSQMLHYDPNKRISAKAALAHPFFQDVTKPVPHLRL

SEQ ID NO: 5783 - protein, 115 aa, Homo sapiens
MSYKPNLAAHMPAAALNAAGSVHSPSTSMATSSQYRQLLSDYGPPSLGYTQGTGNSQVPQSKYAELLAIIEELGKEIRPTYAGSKSAMERLKRGIIHARGLVRECLAETERNARS

SEQ ID NO: 5784 - protein, 303 aa, Homo sapiens
MATSRYEPVAEIGVGAYGTVYKARDPHSGHFVALKSVRVPNGGGGGGGLPISTVREVALLRRLEAFEHPNVVRLMDVCATSRTDREIKVTLVFEHVDQDLRTYLDKAPPPGLPAETIKDLMRQFLRGLDFLHANCIVHRDLKPENILVTSGGTVKLADFGLARIYSYQMALTPVVVTLWYRAPEVLLQSTYATPVDMWSVGCIFAEMFRRKPLFCGNSEADQLGKIFDLIGLPPEDDWPRDVSLPRGAFPPRGPRPVQSVVPEMEESGAQLLLEMLTFNPHKRISAFRALQHSYLHKDEGNPE

SEQ ID NO: 5785 - protein, 111 aa, Homo sapiens
MATSRYEPVAEIGVGAYGTVYKARDPHSGHFVALKSVRVPNGGGGGGGLPISTVREVALLRRLEAFEHPNVVRLMDVCATSRTDREIKRCFVESLSSVETLKPTSWAKSLT

SEQ ID NO: 5786 - protein, 183 aa, Homo sapiens
MRQFLRGLDFLHANCIVHRDLKPENILVTSGGTVKLADFGLARIYSYQMALTPVVVTLWYRAPEVLLQSTYATPVDMWSVGCIFAEMFRRKPLFCGNSEADQLGKIFDLIGLPPEDDWPRDVSLPRGAFPPRGPRPVQSVVPEMEESGAQLLLEMLTFNPHKRISAFRALQHSYLHKDEGNPE

SEQ ID NO: 5787 - skipped

SEQ ID NO: 5788 - protein, 203 aa, Homo sapiens
MATSRYEPVAEIGVGAYGTVYKARDPHSGHFVALKSVRVPNGGGGGGGLPISTVREVALLRRLEAFEHPNVVRLMDVCATSRTDREIKVTLVFEHVDQDLRTYLDKAPPPGLPAETIKDLMRQFLRGLDFLHANCIVHRDLKPENILVTSGGTVKLADFGLARIYSYQMALTPVVVTLWYRAPEVLLQSTYATPVDMWSVGCI

SEQ ID NO: 5789 - protein, 170 aa, Homo sapiens
MATSRYEPVAEIGVGAYGTVYKARDPHSGHFVALKSVRVPNGGGGGGGLPISTVREVALLRRLEAFEHPNVVRLMDVCATSRTDREIKVTLVFEHVDQDLRTYLDKAPPPGLPAETIKDLMRQFLRGLDFLHANCIVHRDLKPENILVTSGGTVKLADFGLARIYSYQMA

SEQ ID NO: 5790 - protein, 115 aa, Homo sapiens
MATSRYEPVAEIGVGAYGTVYKARDPHSGHFVALKSVRVPNGGGGGGGLPISTVREVALLRRLEAFEHPNVVRLMDVCATSRTDREIKVTLVFEHVDQDLRTYLDKAPPPGLPAE

SEQ ID NO: 5791 - protein, 307 aa, Homo sapiens
MGTVLSLSPSYRKATLFEDGAATVGHYTAVQNSKNAKDKNLKRHSIISVLPWKRIVAVSAKKKNSKKVQPNSSYQNNITHLNNENLKKSLSCANLSTFAQPPPAQPPAPPASQLSGSQTGGSSSVKKAPHPAVTSAGTPKRVIVQASTSELLRCLGEFLCRRCYRLKHLSPTDPVLWLRSVDRSLLLQGWQDQGFITPANVVFLYMLCRDVISSEVGSDHELQAVLLTCLYLSYSYMGNEISYPLKPFLVESCKEAFWDRCLSVINLMSSKMLQINADPHYFTQVFSDLKNESGQEDKKRLLLGLDR

SEQ ID NO: 5792 - protein, 326 aa, Homo sapiens
MEKDGLCRADQQYECVAEIGEGAYGKVFKARDLKNGGRFVALKRVRVQTGEEGMPLSTIREVAVLRHLETFEHPNVVRLFDVCTVSRTDRETKLTLVFEHVDQDLTTYLDKVPEPGVPTETIKDMMFQLLRGLDFLHSHRVVHRDLKPQNILVTSSGQIKLADFGLARIYSFQMALTSVVVTLWYRAPEVLLQSSYATPVDLWSVGCIFAEMFRRKPLFRGSSDVDQLGKILDVIGLPGEEDWPRDVALPRQAFHSKSAQPIEKFVTDIDELGKDLLLKCLTFNPAKRISAYSALSHPYFQDLERCKENLDSHLPPSQNTSELNTA

SEQ ID NO: 5793 - protein, 326 aa, Homo sapiens; identical to SEQ ID NO: 5792

SEQ ID NO: 5794 - protein, 346 aa, Homo sapiens
MALDVKSRAKRYEKLDFLGEGQFATVYKARDKNTNQIVAIKKIKLGHRSEAKDGINRTALREIKLLQELSHPNIIGLLDAFGHKSNISLVFDFMETDLEVIIKDNSLVLTPSHIKAYMLMTLQGLEYLHQHWILHRDLKPNNLLLDENGVLKLADFGLAKSFGSPNRAYTHQVVTRWYRAPELLFGARMYGVGVDMWAVGCILAELLLRVPFLPGDSDLDQLTRIFETLGTPTEEQWPDMCSLPDYVTFKSFPGIPLHHIFSAAGDDLLDLIQGLFLFNPCARITATQALKMKYFSNRPGPTPGCQLPRPNCPVETLKEQSNPALAIKRKRTEALEQGGLPKKLIF

SEQ ID NO: 5795 - protein, 464 aa, Homo sapiens
MDYDFKVKLSSERERVEDLFEYEGCKVGRGTYGHVYKAKRKDGKDDKDYALKQIEGTGISMSACREIALLRELKHPNVISLQKVFLSHADRKVWLLFDYAEHDLWHIIKFHRASKANKKPVQLPRGMVKSLLYQILDGIHYLHANWVLHRDLKPANILVMGEGPERGRVKIADMGFARLFNSPLKPLADLDPVVVTFWYRAPELLLGARHYTKAIDIWAIGCIFAELLTSEPIFHCRQEDIKTSNPYHHDQLDRIFNVMGFPADKDWEDIKKMPEHSTLMKDFRRNTYTNCSLIKYMEKHKVKPDSKAFHLLQKLLTMDPIKRITSEQAMQDPYFLEDPLPTSDVFAGCQIPYPKREFLTEEEPDDKGDKKNQQQQQGNNHTNGTGHPGNQDSSHTQGPPLKKVRVVPPTTTSGGLIMTSDYQRSNPHAAYPNPGPSTSQPQSSMGYSATSQQPPQYSHQTHRY

SEQ ID NO: 5796 - protein, 164 aa, Homo sapiens
MDYDFKVKLSSERERVEDLFEYEGCKVGRGTYGHVYKAKRKDGKDDKDYALKQIEGTGISMSACREIALLRELKHPNVISLQKVFLSHADRKVWLLFDYAEHDLWHIIKFHRASKANKKPVQLPRGMVKSLLYQILDGIHYLHANWVLHRDLLTWALPDYLIHL

SEQ ID NO: 5797 - protein, 372 aa, Homo sapiens
MAKQYDSVECPFCDEVSKYEKLAKIGQGTFGEVFKARHRKTGQKVALKKVLMENEKEGFPITALREIKILQLLKHENVVNLIEICRTKASPYNRCKGSIYLVFDFCEHDLAGLLSNVLVKFTLSEIKRVMQMLLNGLYYIHRNKILHRDMKAANVLITRDGVLKLADFGLARAFSLAKNSQPNRYTNRVVTLWYRPPELLLGERDYGPPIDLWGAGCIMAEMWTRSPIMQGNTEQHQLALISQLCGSITPEVWPNVDNYELYEKLELVKGQKRKVKDRLKAYVRDPYALDLIDKLLVLDPAQRIDSDDALNHDFFWSDPMPSDLKGMLSTHLTSMFEYLAPPRRKGSQITQQSTNQSRNPATTNQTEFERVF

SEQ ID NO: 5798 - protein, 489 aa, Homo sapiens
MQRDAPPRAPAPAPRLPAPPIGAAASSGGGGGGGSGGGGGGASAAPAPPGLSGTTSPRGPGGGRRAEEAGSAPRGRKWPWRRKWRGRGGAWSAAAAGPGAGAAAAATGGGGGALEAAMAKQYDSVECPFCDEVSKYEKLAKIGQGTFGEVFKARHRKTGQKVALKKVLMENEKEGFPITALREIKILQLLKHENVVNLIEICRTKASPYNRCKGSIYLVFDFCEHDLAGLLSNVLVKFTLSEIKRVMQMLLNGLYYIHRNKILHRDMKAANVLITRDGVLKLADFGLARAFSLAKNSQPNRYTNRVVTLWYRPPELLLGERDYGPPIDLWGAGCIMAEMWTRSPIMQGNTEQHQLALISQLCGSITPEVWPNVDNYELYEKLELVKGQKRKVKDRLKAYVRDPYALDLIDKLLVLDPAQRIDSDDALNHDFFWSDPMPSDLKGMLSTHLTSMFEYLAPPRRKGSQITQQSTNQSRNPATTNQTEFERVF

SEQ ID NO: 5799 - protein, 194 aa, Homo sapiens
MQRDAPPRAPAPAPRLPAPPIGAAASSGGGGGGGSGGGGGGASAAPAPPGLSGTTSPRGPGGGRRAEEAGSAPRGRKWPWRRKWRGRGGAWSAAAAGPGAGAAAAATGGGGGALEAAMAKQYDSVECPFCDEVSKYEKLAKIGQGTFGEVFKARHRKTGQKVALKKVLMENEKEGFPITALREIKILQLLKHEN

SEQ ID NO: 5800 - protein, 164 aa, Homo sapiens
MSEPAGDVRQNPCGSKACRRLFGPVDSEQLSRDCDALMAGCIQEARERWNFDFVTETPLEGDFAWERVRGLGLPKLYLPTGPRRGRDELGGGRRPGTSPALLQGTAEEDHVDLSLSCTLVPRSGEQAEGSPGGPGDSQGRKRRQTSMTDFYHSKRRLIFSKRKP

SEQ ID NO: 5801 - protein, 164 aa, Homo sapiens; identical to SEQ ID NO: 5800

SEQ ID NO: 5802 - protein, 164 aa, Homo sapiens; identical to SEQ ID NO: 5800

SEQ ID NO: 5803 - protein, 198 aa, Homo sapiens
MWGVFRRQTTHSSNPPLPGQQSCCNHRDFFCSGAMSEPAGDVRQNPCGSKACRRLFGPVDSEQLSRDCDALMAGCIQEARERWNFDFVTETPLEGDFAWERVRGLGLPKLYLPTGPRRGRDELGGGRRPGTSPALLQGTAEEDHVDLSLSCTLVPRSGEQAEGSPGGPGDSQGRKRRQTSMTDFYHSKRRLIFSKRKP

SEQ ID NO: 5804 - protein, 198 aa, Homo sapiens
MSNVRVSNGSPSLERMDARQAEHPKPSACRNLFGPVDHEELTRDLEKHCRDMEEASQRKWNFDFQNHKPLEGKYEWQEVEKGSLPEFYYRPPRPPKGACKVPAQESQDVSGSRPAAPLIGAPANSEDTHLVDPKTDPSDSQTGLAEQCAGIRKRPATDDSSTQNKRANRTEENVSDGSPNAGSVEQTPKKPGLRRRQT

SEQ ID NO: 5805 - protein, 147 aa, Homo sapiens
MEEASQRKWNFDFQNHKPLEGKYEWQEVEKGSLPEFYYRPPRPPKGACKVPAQESQDVSGSRPAAPLIGAPANSEDTHLVDPKTDPSDSQTGLAEQCAGIRKRPATDDSSTQNKRANRTEENVSDGSPNAGSVEQTPKKPGLRRRQT

SEQ ID NO: 5806 - protein, 305 aa, Homo sapiens
MERLVARGTFPVLVRTSACRSLFGPVDHEELSRELQARLAELNAEDQNRWDYDFQQDMPLRGPGRLQWTEVDSDSVPAFYRETVQVGRCRLLLAPRPVAVAVAVSPPLEPAAESLDGLEEAPEQLPSVPVPAPASTPPPVPVLAPAPAPAPAPVAAPVAAPVAVAVLAPAPAPAPAPAPAPAPVAAPAPAPAPAPAPAPAPAPAPDAAPQESAEQGANQGQRGQEPLADQLHSGISGRPAAGTAAASANGAAIKKLSGPLISDFFAKRKRSAPEKSSGDVPAPCPSPSAAPGVGSVEQTPRKRLR

SEQ ID NO: 5807 - protein, 316 aa, Homo sapiens
MSDASLRSTSTMERLVARGTFPVLVRTSACRSLFGPVDHEELSRELQARLAELNAEDQNRWDYDFQQDMPLRGPGRLQWTEVDSDSVPAFYRETVQVGRCRLLLAPRPVAVAVAVSPPLEPAAESLDGLEEAPEQLPSVPVPAPASTPPPVPVLAPAPAPAPAPVAAPVAAPVAVAVLAPAPAPAPAPAPAPAPVAAPAPAPAPAPAPAPAPAPAPDAAPQESAEQGANQGQRGQEPLADQLHSGISGRPAAGTAAASANGAAIKKLSGPLISDFFAKRKRSAPEKSSGDVPAPCPSPSAAPGVGSVEQTPRKRLR

SEQ ID NO: 5808 - protein, 316 aa, Homo sapiens; identical to SEQ ID NO: 5807

SEQ ID NO: 5809 - protein, 305 aa, Homo sapiens; identical to SEQ ID NO: 5806

SEQ ID NO: 5810 - protein, 167 aa, Homo sapiens
MEPAAGSSMEPSADWLATAAARGRVEEVRALLEAGALPNAPNSYGRRPIQVMMMGSARVAELLLLHGAEPNCADPATLTRPVHDAAREGFLDTLVVLHRAGARLDVRDAWGRLPVDLAEELGHRDVARYLRAAAGGTRGSNHARIDAAEGPSEMIGNHLWVCRSRHA

SEQ ID NO: 5811 - protein, 156 aa, Homo sapiens
MEPAAGSSMEPSADWLATAAARGRVEEVRALLEAGALPNAPNSYGRRPIQVMMMGSARVAELLLLHGAEPNCADPATLTRPVHDAAREGFLDTLVVLHRAGARLDVRDAWGRLPVDLAEELGHRDVARYLRAAAGGTRGSNHARIDAAEGPSDIPD

SEQ ID NO: 5812 - protein, 173 aa, Homo sapiens
MGRGRCVGPSLQLRGQEWRCSPLVPKGGAAAAELGPGGGENMVRRFLVTLRIRRACGPPRVRVFVVHIPRLTGEWAAPGAPAAVALVLMLLRSQRLGQQPLPRRPGHDDGQRPSGGAAAAPRRGAQLRRPRHSHPTRARRCPGGLPGHAGGAAPGRGAAGRARCLGPSARGPG

SEQ ID NO: 5813 - protein, 167 aa, Homo sapiens; identical to SEQ ID NO: 5810

SEQ ID NO: 5814 - protein, 132 aa, Homo sapiens
MVRRFLVTLRIRRACGPPRVRVFVVHIPRLTGEWAAPGAPAAVALVLMLLRSQRLGQQPLPRRPGHDDGQRPSGGAAAAPRRGAQLRRPRHSHPTRARRCPGGLPGHAGGAAPGRGAAGRARCLGPSARGPG

SEQ ID NO: 5815 - protein, 138 aa, Homo sapiens
MREENKGMPSGGGSDEGLASAAARGLVEKVRQLLEAGADPNGVNRFGRRAIQVMMMGSARVAELLLLHGAEPNCADPATLTRPVHDAAREGFLDTLVVLHRAGARLDVRDAWGRLPVDLAEERGHRDVAGYLRTATGD

SEQ ID NO: 5816 - protein, 78 aa, Homo sapiens
MREENKGMPSGGGSDEGLASAAARGLVEKVRQLLEAGADPNGVNRFGRRAIQVAGAPGPRRQGARERGARPRRIGAGT

SEQ ID NO: 5817 - protein, 78 aa, Homo sapiens; identical to SEQ ID NO: 5816

SEQ ID NO: 5818 - protein, 168 aa, Homo sapiens
MAEPWGNELASAAARGDLEQLTSLLQNNVNVNAQNGFGRTALQVMKLGNPEIARRLLLRGANPDLKDRTGFAVIHDAARAGFLDTLQTLLEFQADVNIEDNEGNLPLHLAAKEGHLRVVEFLVKHTASNVGHRNHKGDTACDLARLYGRNEVVSLMQANGAGGATNLQ

SEQ ID NO: 5819 - protein, 168 aa, Homo sapiens; identical to SEQ ID NO: 5818

SEQ ID NO: 5820 - protein, 168 aa, Homo sapiens; identical to SEQ ID NO: 5818

SEQ ID NO: 5821 - protein, 166 aa, Homo sapiens
MLLEEVRAGDRLSGAAARGDVQEVRRLLHRELVHPDALNRFGKTALQVMMFGSTAIALELLKQGASPNVQDTSGTSPVHDAARTGFLDTLKVLVEHGADVNVPDGTGALPIHLAVQEGHTAVVSFLAAESDLHRRDARGLTPLELALQRGAQDLVDILQGHMVAPL

SEQ ID NO: 5822 - protein, 166 aa, Homo sapiens; identical to SEQ ID NO: 5821

SEQ ID NO: 5823 - protein, 212 aa, Homo sapiens
MKPPSSIQTSEFDSSDEEPIEDEQTPIHISWLSLSRVNCSQFLGLCALPGCKFKDVRRNVQKDTEELKSCGIQDIFVFCTRGELSKYRVPNLLDLYQQCGIITHHHPIADGGTPDIASCCEIMEELTTCLKNYRKTLIHCYGGLGRSCLVAACLLLYLSDTISPEQAIDSLRDLRGSGAIQTIKQYNYLHEFRDKLAAHLSSRDSQSRSVSR

SEQ ID NO: 5824 - protein, 166 aa, Homo sapiens
MNPCCKFKDVRRNVQKDTEELKSCGIQDIFVFCTRGELSKYRVPNLLDLYQQCGIITHHHPIADGGTPDIASCCEIMEELTTCLKNYRKTLIHCYGGLGRSCLVAACLLLYLSDTISPEQAIDSLRDLRGSGAIQTIKQYNYLHEFRDKLAAHLSSRDSQSRSVSR

SEQ ID NO: 5825 - protein, 69 aa, Homo sapiens
MKPPSSIQTSEFDSSDEEPIEDEQTPIHISWLSLSRVNCSQFLGLCALPGCKFKDVRRNVQKEKKKKKK

SEQ ID NO: 5826 - protein, 207 aa, Homo sapiens
MKPPSSIQTSEFDSSDEEPIEDEQTPIHISWLSLSRVNCSQFLGLCALPGCKFKDVRRNVQKDTEELKSCGIQDIFVFCTRGELSKYRVPNLLDLYQQCGIITHHHPIADGGTPDIASCCEIMEELTTCLKNLFCYGGLGRSCLVAACLLLYLSDTISPEQAIDSLRDLRGSGAIQTIKQYNYLHEFRDKLAAHLSSRDSQSRSVSR

SEQ ID NO: 5827 - protein, 172 aa, Homo sapiens
MKPPSSIQTSCKFKDVRRNVQKDTEELKSCGIQDIFVFCTRGELSKYRVPNLLDLYQQCGIITHHHPIADGGTPDIASCCEIMEELTTCLKNYRKTLIHCYGGLGRSCLVAACLLLYLSDTISPEQAIDSLRDLRGSGAIQTIKQYNYLHEFRDKLAAHLSSRDSQSRSVSR

SEQ ID NO: 5828 - protein, 956 aa, Homo sapiens
MSSGLWSQEKVTSPYWEERIFYLLLQECSVTDKQTQKLLKVPKGSIGQYIQDRSVGHSRIPSAKGKKNQIGLKILEQPHAVLFVDEKDVVEINEKFTELLLAITNCEERFSLFKNRNRLSKGLQIDVGCPVKVQLRSGEEKFPGVVRFRGPLLAERTVSGIFFGVELLEEGRGQGFTDGVYQGKQLFQCDEDCGVFVALDKLELIEDDDTALESDYAGPGDTMQVELPPLEINSRVSLKVGETIESGTVIFCDVLPGKESLGYFVGVDMDNPIGNWDGRFDGVQLCSFACVESTILLHINDIIPALSESVTQERRPPKLAFMSRGVGDKGSSSHNKPKATGSTSDPGNRNRSELFYTLNGSSVDSQPQSKSKNTWYIDEVAEDPAKSLTEISTDFDRSSPPLQPPPVNSLTTENRFHSLPFSLTKMPNTNGSIGHSPLSLSAQSVMEELNTAPVQESPPLAMPPGNSHGLEVGSLAEVKENPPFYGVIRWIGQPPGLNEVLAGLELEDECAGCTDGTFRGTRYFTCALKKALFVKLKSCRPDSRFASLQPVSNQIERCNSLAFGGYLSEVVEENTPPKMEKEGLEIMIGKKKGIQGHYNSCYLDSTLFCLFAFSSVLDTVLLRPKEKNDVEYYSETQELLRTEIVNPLRIYGYVCATKIMKLRKILEKVEAASGFTSEEKDPEEFLNILFHHILRVEPLLKIRSAGQKVQDCYFYQIFMEKNEKVGVPTIQQLLEWSFINSNLKFAEAPSCLIIQMPRFGKDFKLFKKIFPSLELNITDLLEDTPRQCRICGGLAMYECRECYDDPDISAGKIKQFCKTCNTQVHLHPKRLNHKYNPVSLPKDLPDWDWRHGCIPCQNMELFAVLCIETSHYVAFVKYGKDDSAWLFFDSMADRDGGQNGFNIPQVTPCPEVGEYLKMSLEDLHSLDSRRIQGCARRLLCDAYMCMYQSPTMSLYK

SEQ ID NO: 5829 - protein, 953 aa, Homo sapiens
MSSGLWSQEKVTSPYWEERIFYLLLQECSVTDKQTQKLLKVPKGSIGQYIQDRSVGHSRIPSAKGKKNQIGLKILEQPHAVLFVDEKDVVEINEKFTELLLAITNCEERFSLFKNRNRLSKGLQIDVGCPVKVQLRSGEEKFPGVVRFRGPLLAERTVSGIFFGVELLEEGRGQGFTDGVYQGKQLFQCDEDCGVFVALDKLELIEDDDTALESDYAGPGDTMQVELPPLEINSRVSLKVGETIESGTVIFCDVLPGKESLGYFVGVDMDNPIGNWDGRFDGVQLCSFACVESTILLHINDIIPESVTQERRPPKLAFMSRGVGDKGSSSHNKPKATGSTSDPGNRNRSELFYTLNGSSVDSQPQSKSKNTWYIDEVAEDPAKSLTEISTDFDRSSPPLQPPPVNSLTTENRFHSLPFSLTKMPNTNGSIGHSPLSLSAQSVMEELNTAPVQESPPLAMPPGNSHGLEVGSLAEVKENPPFYGVIRWIGQPPGLNEVLAGLELEDECAGCTDGTFRGTRYFTCALKKALFVKLKSCRPDSRFASLQPVSNQIERCNSLAFGGYLSEVVEENTPPKMEKEGLEIMIGKKKGIQGHYNSCYLDSTLFCLFAFSSVLDTVLLRPKEKNDVEYYSETQELLRTEIVNPLRIYGYVCATKIMKLRKILEKVEAASGFTSEEKDPEEFLNILFHHILRVEPLLKIRSAGQKVQDCYFYQIFMEKNEKVGVPTIQQLLEWSFINSNLKFAEAPSCLIIQMPRFGKDFKLFKKIFPSLELNITDLLEDTPRQCRICGGLAMYECRECYDDPDISAGKIKQFCKTCNTQVHLHPKRLNHKYNPVSLPKDLPDWDWRHGCIPCQNMELFAVLCIETSHYVAFVKYGKDDSAWLFFDSMADRDGGQNGFNIPQVTPCPEVGEYLKMSLEDLHSLDSRRIQGCARRLLCDAYMCMYQSPTMSLYK

SEQ ID NO: 5830 - protein, 953 aa, Homo sapiens; identical to SEQ ID NO: 5829

SEQ ID NO: 5831 - protein, 956 aa, Homo sapiens
MSSGLWSQEKVTSPYWEERIFYLLLQECSVTDKQTQKLLKVPKGSIGQYIQDRSVGHSRIPSAKGKKNQIGLKILEQPHAVLFVDEKDVVEINEKFTELLLAITNCEERFSLFKNRNRLSKGLQIDVGCPVKVQLRSGEEKFPGVVRFRGPLLAERTVSGIFFGVELLEEGRGQGFTDGVYQGKQLFQCDEDCGVFVALDKLELIEDDDTALESDYAGPGDTMQVELPPLEINSRVSLKVGETIESGTVIFCDVLPGKESLGYFVGVDMDNPIGNWDGRFDGVQLCSFACVESTILLHINDIIPAVSESVTQERRPPKLAFMSRGVGDKGSSSHNKPKATGSTSDPGNRNRSELFYTLNGSSVDSQPQSKSKNTWYIDEVAEDPAKSLTEISTDFDRSSPPLQPPPVNSLTTENRFHSLPFSLTKMPNTNGSIGHSPLSLSAQSVMEELNTAPVQESPPLAMPPGNSHGLEVGSLAEVKENPPFYGVIRWIGQPPGLNEVLAGLELEDECAGCTDGTFRGTRYFTCALKKALFVKLKSCRPDSRFASLQPVSNQIERCNSLAFGGYLSEVVEENTPPKMEKEGLEIMIGKKKGIQGHYNSCYLDSTLFCLFAFSSVLDTVLLRPKEKNDVEYYSETQELLRTEIVNPLRIYGYVCATKIMKLRKILEKVEAASGFTSEEKDPEEFLNILFHHILRVEPLLKIRSAGQKVQDCYFYQIFMEKNEKVGVPTIQQLLEWSFINSNLKFAEAPSCLIIQMPRFGKDFKLFKKIFPSLELNITDLLEDTPRQCRICGGLAMYECRECYDDPDISAGKIKQFCKTCNTQVHLHPKRLNHKYNPVSLPKDLPDWDWRHGCIPCQNMELFAVLCIETSHYVAFVKYGKDDSAWLFFDSMADRDGGQNGFNIPQVTPCPEVGEYLKMSLEDLHSLDSRRIQGCARRLLCDAYMCMYQSPTMSLYK

SEQ ID NO: 5832 - protein, 149 aa, Homo sapiens
MARSNLPLALGLALVAFCLLALPRDARARPQERMVGELRDLSPDDPQVQKAAQAAVASYNMGSNSIYYFRDTHIIKAQSQLVAGIKYFLTMEMGSTDCRKTRVTGDHVDLTTCPLAAGAQQEKLRCDFEVLVVPWQNSSQLLKHNCVQM

SEQ ID NO: 5833 - protein, 167 aa, Homo sapiens
MLPEKALHGHPQLPRTVPTRAAMRAAGTLLAFCCLVLSTTGGPSPDTCSQDLNSRVKPGFPKTIKTNDPGVLQAARYSVEKFNNCTNDMFLFKESRITRALVQIVKGLKYMLEVEIGRTTCKKNQHLRLDDCDFQTNHTLKQTLSCYSEVWVVPWLQHFEVPVLRCH

SEQ ID NO: 5834 - protein, 145 aa, Homo sapiens
MRAAGTLLAFCCLVLSTTGGPSPDTCSQDLNSRVKPGFPKTIKTNDPGVLQAARYSVEKFNNCTNDMFLFKESRITRALVQIVKGLKYMLEVEIGRTTCKKNQHLRLDDCDFQTNHTLKQTLSCYSEVWVVPWLQHFEVPVLRCH

SEQ ID NO: 5835 - protein, 150 aa, Homo sapiens
MLGAALRRCAVAATTRADPRGLLHSARTPGPAVAIQSVRCYSHGSQETDEEFDARWVTYFNKPDIDAWELRKGINTLVTYDMVPEPKIIDAALRACRRLNDFASTVRILEVVKDKAGPHKEIYPYVIQELRPTLNELGISTPEELGLDKV

SEQ ID NO: 5836 - protein, 105 aa, Homo sapiens
MGDVEKGKKIFIMKCSQCHTVEKGGKHKTGPNLHGLFGRKTGQAPGYSYTAANKNKGIIWGEDTLMEYLENPKKYIPGTKMIFVGIKKKEERADLIAYLKKATNE

SEQ ID NO: 5837 - protein, 105 aa, Homo sapiens; identical to SEQ ID NO: 5836

SEQ ID NO: 5838 - protein, 105 aa, Homo sapiens; identical to SEQ ID NO: 5836

SEQ ID NO: 5839 - protein, 101 aa, Homo sapiens
MGDVEKGKKIFIMKCSQCHTVEKGGKHKTGPNLHGLFGRKTGQAPGYSYTAANKNKGIIWGEDTLMEYLENPKKYIPGTKMIFVGIKKKEERADLIAYLKK

SEQ ID NO: 5840 - protein, 543 aa, Homo sapiens
MGTSLSPNDPWPLNPLSIQQTTLLLLLSVLATVHVGQRLLRQRRRQLRSAPPGPFAWPLIGNAAAVGQAAHLSFARLARRYGDVFQIRLGSCPIVVLNGERAIHQALVQQGSAFADRPAFASFRVVSGGRSMAFGHYSEHWKVQRRAAHSMMRNFFTRQPRSRQVLEGHVLSEARELVALLVRGSADGAFLDPRPLTVVAVANVMSAVCFGCRYSHDDPEFRELLSHNEEFGRTVGAGSLVDVMPWLQYFPNPVRTVFREFEQLNRNFSNFILDKFLRHCESLRPGAAPRDMMDAFILSAEKKAAGDSHGGGARLDLENVPATITDIFGASQDTLSTALQWLLLLFTRYPDVQTRVQAELDQVVGRDRLPCMGDQPNLPYVLAFLYEAMRFSSFVPVTIPHATTANTSVLGYHIPKDTVVFVNQWSVNHDPVKWPNPENFDPARFLDKDGLINKDLTSRVMIFSVGKRRCIGEELSKMQLFLFISILAHQCDFRANPNEPAKMNFSYGLTIKPKSFKVNVTLRESMELLDSAVQNLQAKETCQ

SEQ ID NO: 5841 - protein, 543 aa, Homo sapiens; identical to SEQ ID NO: 5840

SEQ ID NO: 5842 - protein, 1132 aa, Homo sapiens
MEPDSLLDQDDSYESPQERPGSRRSLPGSLSEKSPSMEPSAATPFRVTGFLSRRLKGSIKRTKSQPKLDRNHSFRHILPGFRSAAAAAADNERSHLMPRLKESRSHESLLSPSSAVEALDLSMEEEVVIKPVHSSILGQDYCFEVTTSSGSKCFSCRSAAERDKWMENLRRAVHPNKDNSRRVEHILKLWVIEAKDLPAKKKYLCELCLDDVLYARTTGKLKTDNVFWGEHFEFHNLPPLRTVTVHLYRETDKKKKKERNSYLGLVSLPAASVAGRQFVEKWYPVVTPNPKGGKGPGPMIRIKARYQTITILPMEMYKEFAEHITNHYLGLCAALEPILSAKTKEEMASALVHILQSTGKVKDFLTDLMMSEVDRCGDNEHLIFRENTLATKAIEEYLKLVGQKYLQDALGEFIKALYESDENCEVDPSKCSAADLPEHQGNLKMCCELAFCKIINSYCVFPRELKEVFASWRQECSSRGRPDISERLISASLFLRFLCPAIMSPSLFNLLQEYPDDRTARTLTLIAKVTQNLANFAKFGSKEEYMSFMNQFLEHEWTNMQRFLLEISNPETLSNTAGFEGYIDLGRELSSLHSLLWEAVSQLEQSIVSKLGPLPRILRDVHTALSTPGSGQLPGTNDLASTPGSGSSSISAGLQKMVIENDLSGLIDFTRLPSPTPENKDLFFVTRSSGVQPSPARSSSYSEANEPDLQMANGGKSLSMVDLQDARTLDGEAGSPAGPDVLPTDGQAAAAQLVAGWPARATPVNLAGLATVRRAGQTPTTPGTSEGAPGRPQLLAPLSFQNPVYQMAAGLPLSPRGLGDSGSEGHSSLSSHSNSEELAAAAKLGSFSTAAEELARRPGELARRQMSLTEKGGQPTVPRQNSAGPQRRIDQPPPPPPPPPPAPRGRTPPNLLSTLQYPRPSSGTLASASPDWVGPSTRLRQQSSSSKGDSPELKPRAVHKQGPSPVSPNALDRTAAWLLTMNAQLLEDEGLGPDPPHRDRLRSKDELSQAEKDLAVLQDKLRISTKKLEEYETLFKCQEETTQKLVLEYQARLEEGEERLRRQQEDKDIQMKGIISRLMSVEEELKKDHAEMQAAVDSKQKIIDAQEKRIASLDAANARLMSALTQLKESMH

SEQ ID NO: 5843 - protein, 1065 aa, Homo sapiens
MPRLKESRSHESLLSPSSAVEALDLSMEEEVVIKPVHSSILGQDYCFEVTTSSGSKCFSCRSAAERDKWMENLRRAVHPNKDNSRRVEHILKLWVIEAKDLPAKKKYLCELCLDDVLYARTTGKLKTDNVFWGEHFEFHNLPPLRTVTVHLYRETDKKKKKERNSYLGLVSLPAASVAGRQFVEKWYPVVTPNPKGGKGPGPMIRIKARYQTITILPMEMYKEFAEHITNHYLGLCAALEPILSAKTKEEMASALVHILQSTGKVKDFLTDLMMSEVDRCGDNEHLIFRENTLATKAIEEYLKLVGQKYLQDALGEFIKALYESDENCEVDPSKCSAADLPEHQGNLKMCCELAFCKIINSYCVFPRELKEVFASWRQECSSRGRPDISERLISASLFLRFLCPAIMSPSLFNLLQEYPDDRTARTLTLIAKVTQNLANFAKFGSKEEYMSFMNQFLEHEWTNMQRFLLEISNPETLSNTAGFEGYIDLGRELSSLHSLLWEAVSQLEQSIVSKLGPLPRILRDVHTALSTPGSGQLPGTNDLASTPGSGSSSISAGLQKMVIENDLSGLIDFTRLPSPTPENKDLFFVTRSSGVQPSPARSSSYSEANEPDLQMANGGKSLSMVDLQDARTLDGEAGSPAGPDVLPTDGQAAAAQLVAGWPARATPVNLAGLATVRRAGQTPTTPGTSEGAPGRPQLLAPLSFQNPVYQMAAGLPLSPRGLGDSGSEGHSSLSSHSNSEELAAAAKLGSFSTAAEELARRPGELARRQMSLTEKGGQPTVPRQNSAGPQRRIDQPPPPPPPPPPAPRGRTPPNLLSTLQYPRPSSGTLASASPDWVGPSTRLRQQSSSSKGDSPELKPRAVHKQGPSPVSPNALDRTAAWLLTMNAQLLEDEGLGPDPPHRDRLRSKDELSQAEKDLAVLQDKLRISTKKLEEYETLFKCQEETTQKLVLEYQARLEEGEERLRRQQEDKDIQMKGIISRLMSVEEELKKDHAEMQAAVDSKQKIIDAQEKRIASLDAANARLMSALTQLKERYSMQARNGISPTNPTKLQITENGEFRNSSNC

SEQ ID NO: 5844 - protein, 1069 aa, Homo sapiens
SQPKLDRNHSFRHILPGFRSAAAAAADNERSHLMPRLKESRSHESLLSPSSAVEALDLSMEEEVVIKPVHSSILGQDYCFEVTTSSGSKCFSCRSAAERDKWMENLRRAVHPNKDNSRRVEHILKLWVIEAKDLPAKKKYLCELCLDDVLYARTTGKLKTDNVFWGEHFEFHNLPPLRTVTVHLYRETDKKKKKERNSYLGLVSLPAASVAGRQFVEKWYPVVTPNPKGGKGPGPMIRIKARYQTITILPMEMYKEFAEHITNHYLGLCAALEPILSAKTKEEMASALVHILQSTGKVKDFLTDLMMSEVDRCGDNEHLIFRENTLATKAIEEYLKLVGQKYLQDALGEFIKALYESDENCEVDPSKCSAADLPEHQGNLKMCCELAFCKIINSYCVFPRELKEVFASWRQECSSRGRPDISERLISASLFLRFLCPAIMSPSLFNLLQEYPDDRTARTLTLIAKVTQNLANFAKFGSKEEYMSFMNQFLEHEWTNMQRFLLEISNPETLSNTAGFEGYIDLGRELSSLHSLLWEAVSQLEQSIVSKLGPLPRILRDVHTALSTPGSGQLPGTNDLASTPGSGSSSISAGLQKMVIENDLSGLIDFTRLPSPTPENKDLFFVTRSSGVQPSPARSSSYSEANEPDLQMANGGKSLSMVDLQDARTLDGEAGSPAGPDVLPTDGQAAAAQLVAGWPARATPVNLAGLATVRRAGQTPTTPGTSEGAPGRPQLLAPLSFQNPVYQMAAGLPLSPRGLGDSGSEGHSSLSSHSNSEELAAAAKLGSFSTAAEELARRPGELARRQMSLTEKGGQPTVPRQNSAGPQRRIDQPPPPPPPPPPAPRGRTPPNLLSTLQYPRPSSGTLASASPDWVGPSTRLRQQSSSSKGDSPELKPRAVHKQGPSPVSPNALDRTAAWLLTMNAQLLEDEGLGPDPPHRDRLRSKDELSQAEKDLAVLQDKLRISTKKLEEYETLFKCQEETTQKLVLEYQARLEEGEERLRRQQEDKDIQMKGIISRLMSVEEELKKDHAEMQAAVDSKQKIIDAQEKRIASLDAANARLMSALTQLKESMH

SEQ ID NO: 5845 - protein, 291 aa, Homo sapiens
MEPDSLLDQDDSYESPQERPGSRRSLPGSLSEKSPSMEPSAATPFRVTGFLSRRLKGSIKRTKSQPKLDRNHSFRHILPGFRSAAAAAADNERSHLMPRLKESRSHESLLSPSSAVEALDLSMEEEVVIKPVHSSILGQDYCFEVTTSSGSKCFSCRSAAERDKWMENLRRAVHPNKDNSRRVEHILKLWVIEAKDLPAKKKYLCELCLDDVLYARTTGKLKTDNVFWGEHFEFHNLPPLRTVTVHLYRETDKKKKKERNSYLGLVSLPAASVAGRQFVEKWYPVVTPNPK

SEQ ID NO: 5846 - protein, 1189 aa, Homo sapiens
MSAGGSARKSTGRSSYYYRLLRRPRLQRQRSRSRSRTRPARESPQERPGSRRSLPGSLSEKSPSMEPSAATPFRVTGFLSRRLKGSIKRTKSQPKLDRNHSFRHILPGFRSAAAAAADNERSHLMPRLKESRSHESLLSPSSAVEALDLSMEEEVVIKPVHSSILGQDYCFEVTTSSGSKCFSCRSAAERDKWMENLRRAVHPNKDNSRRVEHILKLWVIEAKDLPAKKKYLCELCLDDVLYARTTGKLKTDNVFWGEHFEFHNLPPLRTVTVHLYRETDKKKKKERNSYLGLVSLPAASVAGRQFVEKWYPVVTPNPKGGKGPGPMIRIKARYQTITILPMEMYKEFAEHITNHYLGLCAALEPILSAKTKEEMASALVHILQSTGKVKDFLTDLMMSEVDRCGDNEHLIFRENTLATKAIEEYLKLVGQKYLQDALGEFIKALYESDENCEVDPSKCSAADLPEHQGNLKMCCELAFCKIINSYCVFPRELKEVFASWRQECSSRGRPDISERLISASLFLRFLCPAIMSPSLFNLLQEYPDDRTARTLTLIAKVTQNLANFAKFGSKEEYMSFMNQFLEHEWTNMQRFLLEISNPETLSNTAGFEGYIDLGRELSSLHSLLWEAVSQLEQSIVSKLGPLPRILRDVHTALSTPGSGQLPGTNDLASTPGSGSSSISAGLQKMVIENDLSGLIDFTRLPSPTPENKDLFFVTRSSGVQPSPARSSSYSEANEPDLQMANGGKSLSMVDLQDARTLDGEAGSPAGPDVLPTDGQAAAAQLVAGWPARATPVNLAGLATVRRAGQTPTTPGTSEGAPGRPQLLAPLSFQNPVYQMAAGLPLSPRGLGDSGSEGHSSLSSHSNSEELAAAAKLGSFSTAAEELARRPGELARRQMSLTEKGGQPTVPRQNSAGPQRRIDQPPPPPPPPPPAPRGRTPPNLLSTLQYPRPSSGTLASASPDWVGPSTRLRQQSSSSKGDSPELKPRAVHKQGPSPVSPNALDRTAAWLLTMNAQLLEDEGLGPDPPHRDRLRSKDELSQAEKDLAVLQDKLRISTKKLEEYETLFKCQEETTQKLVLEYQARLEEGEERLRRQQEDKDIQMKGIISRLMSVEEELKKDHAEMQAAVDSKQKIIDAQEKRIASLDAANARLMSALTQLKERYSMQARNGISPTNPTKLQITENGEFRNSSNC

SEQ ID NO: 5847 - protein, 229 aa, Homo sapiens
MPRLKESRSHESLLSPSSAVEALDLSMEEEVVIKPVHSSILGQDYCFEVTTSSGSKCFSCRSAAERDKWMENLRRAVHPNKDNSRRVEHILKLWVIEAKDLPAKKKYLCELCLDDVLYARTTGKLKTDNVFWGEHFEFHNLPPLRTVTVHLYRETDKKKKKERNSYLGLVSLPAASVAGRQFVEKWYPVVTPNPKGGKGPGPMIRIKARYQTITILPMEMYKEFAEHIT

SEQ ID NO: 5848 - protein, 1140 aa, Homo sapiens [sequence omitted]

SEQ ID NO: 5849 - protein, 451 aa, Homo sapiens
MSYNYVVTAQKPTAVNGCVTGHFTSAEDLNLLIAKNTRLEIYVVTAEGLRPVKEVGMYGKIAVMELFRPKALSSSVSSSKLFSSSTAPHETSFGEEVEVHNLLIIDQHTFEVLHAHQFLQNEYALSLVSCKLGKDPNTYFIVGTAMVYPEEAEPKQGRIVVFQYSDGKLQTVAEKEVKGAVYSMVEFNGKLLASINSTVRLYEWTTEKELRTECNHYNNIMALYLKTKGDFILVGDLMRSVLLLAYKPMEGNFEEIARDFNPNWMSAVEILDDDNFLGAENAFNLFVCQKDSAATTDEERQHLQEVGLFHLGEFVNVFCHGSLVMQNLGETSTPTQGSVLFGTVNGMIGLVTSLSESWYNLLLDMQNRLNKVIKSVGKIEHSFWRSFHTERKTEPATGFIDGDLIESFLDISRPKMQEVVANLQYDDGSGMKREATADDLIKVVEELTRIH

SEQ ID NO: 5850 - protein, 146 aa, Homo sapiens
MSYNYVVTAQKPTAVNGCVTGHFTSAEDLNLLIAKNTRLEIYVVTAEGLRPVKEVGMYGKIAVMELFRPKGESKDLLFILTAKYNACILEYKQSGESIDIITRAHGNVQDRIGRPSETGIIGIIDPECRMIGLRLYDGLFKVIPLD

SEQ ID NO: 5851 - protein, 109 aa, Homo sapiens
MSYNYVVTAQKPTAVNGCVTGHFTSAEDLNLLIAKNTRLEIYVVTAEGLRPVKEVGMYGKIAVMELFRPKGESKDLLFILTAKYNACILEYKQSGESIDIITRAHGNVQ

SEQ ID NO: 5852 - protein, 427 aa, Homo sapiens
MAPKKRPETQKTSEIVLRPRNKRSRSPLELEPEAKKLCAKGSGPSRRCDSDCLWVGLAGPQILPPCRSIVRTLHQHKLGRASWPSVQQGLQQSFLHTLDSYRILQKAAPFDRRATSLAWHPTHPSTVAVGSKGGDIMLWNFGIKDKPTFIKGIGAGGSITGLKFNPLNTNQFYASSMEGTTRLQDFKGNILRVFASSDTINIWFCSLDVSASSRMVVTGDNVGNVILLNMDGKELWNLRMHKKKVTHVALNPCCDWFLATASVDQTVKIWDLRQVRGKASFLYSLPHRHPVNAACFSPDGARLLTTDQKSEIRVYSASQWDCPLGLIPHPHRHFQHLTPIKAAWHPRYNLIVVGRYPDPNFKSCTPYELRTIDVFDGNSGKMMCQLYDPESSGISSLNEFNPMGDTLASAMGYHILIWSQEEARTRK

SEQ ID NO: 5853 - protein, 238 aa, Homo sapiens
MAPKKRPETQKTSEIVLRPRNKRSRSPLELEPEAKKLCAKGSGPSRRCDSDCLWVGLAGPQILPPCRSIVRTLHQHKLGRASWPSVQQGLQQSFLHTLDSYRILQKAAPFDRRATSLAWHPTHPSTVAVGSKGGDIMLWNFGIKDKPTFIKGAAWHPRYNLIVVGRYPDPNFKSCTPYELRTIDVFDGNSGKMMCQLYDPESSGISSLNEFNPMGDTLASAMGYHILIWSQEEARTRK

SEQ ID NO: 5854 - protein, 244 aa, Homo sapiens
MAPKKRPETQKTSEIVLRPRNKRSRSPLELEPEAKKLCAKGSGPSRRCDSDCLWVGLAGPQILPPCRSIVRTLHQHKLGRASWPSVQQGLQQSFLHTLDSYRILQKAAPFDRRATSLAWHPTHPSTVAVGSKGGDIMLWNFGIKDKPTFIKGIGAGGSITGLKFNPLNTNQFYASSMEGTTRLQDFKGNILRVFASSDTINIWFCSLDVSASSRMVVTGDNVGNVILLNMDGKELVSVPMEPGS

SEQ ID NO: 5855 - protein, 363 aa, Homo sapiens
MAPKKRPETQKTSEIVLRPRNKRSRSPLELEPEAKKLCAKGSGPSRRCDSDCLWVGLAGPQILPPCRSIVRTLHQHKLGRASWPSVQQIGAGGSITGLKFNPLNTNQFYASSMEGTTRLQDFKGNILRVFASSDTINIWFCSLDVSASSRMVVTGDNVGNVILLNMDGKELWNLRMHKKKVTHVALNPCCDWFLATASVDQTVKIWDLRQVRGKASFLYSLPHRHPVNAACFSPDGARLLTTDQKSEIRVYSASQWDCPLGLIPHPHRHFQHLTPIKAAWHPRYNLIVVGRYPDPNFKSCTPYELRTIDVFDGNSGKMMCQLYDPESSGISSLNEFNPMGDTLASAMGYHILIWSQEEARTRK

SEQ ID NO: 5856 - protein, 880 aa, Homo sapiens
MAELYRVLEAGKIGIFESPTGTGKSLSLICGALSWLRDFEQKKREEEARLLETGTGPLHDEKDESLCLSSSCEGAAGTPRPAGEPAWVTQFVQKKEERDLVDRLKAEQARRKQREERLQQLQHRVQLKYAAKRLRQEEEERENLLRLSREMLETGPEAERLEQLESGEEELVLAEYESDEEKKVASRVDEDEDDLEEEHITKIYYCSRTHSQLAQFVHEVKKSPFGKDVRLVSLGSRQNLCVNEDVKSLGSVQLINDRCVDMQRSRHEKKKGAEEEKPKRRRQEKQAACPFYNHEQMGLLRDEALAEVKDMEQLLALGKEARACPYYGSRLAIPAAQLVVLPYQMLLHAATRQAAGIRLQDQVVIIDEAHNLIDTITGMHSVEVSGSQLCQAHSQLLQYVERYGKRLKAKNLMYLKQILYLLEKFVAVLGGNIKQNPNTQSLSQTGTELKTINDFLFQSQIDNINLFKVQRYCEKSMISRKLFGFTERYGAVFSSREQPKLAGFQQFLQSLQPRTTEALAAPADESQASTLRPASPLMHIQGFLAALTTANQDGRVILSRQGSLSQSTLKFLLLNPAVHFAQVVKECRAVVIAGGTMQPVSDFRQQLLACAGVEAERVVEFSCGHVIPPDNILPLVICSGISNQPLEFTFQKRELPQMMDEVGRILCNLCGVVPGGVVCFFPSYEYLRQVHAHWEKGGLLGRLAARKKIFQEPKSAHQVEQVLLAYSRCIQACGQERGQVTGALLLSVVGGKMSEGINFSDNLGRCVVMVGMPFPNIRSAELQEKMAYLDQTLPRAPGQAPPGKALVENLCMKAVNQSIGRAIRHQKDFASVVLLDQRYARPPVLAKLPAWIRARVEVKATFGPAIAAVQKFHREKSASS

SEQ ID NO: 5857 - protein, 288 aa, Homo sapiens
MANETQKVGAIHFPFPFTPYSIQEDFMAELYRVLEAGKIGIFESPTGTGKSLSLICGALSWLRDFEQKKREEEARLLETGTGPLHDEKDESLCLSSSCEGAAGTPRPAGEPAWVTQFVQKKEERDLVDRLKAEQARRKQREERLQQLQHRVQLKYAAKRLRQEEEERENLLRLSREMLETGPEAERLEQLESGEEELVLAEYESDEEKKVASRAPSDATSSRHPPDASFPAALNFLQRTRPSSVLSEDLLMQRAVAKHPALLPWQMSSSPLRPGSEWMRMRMTWRKNT

SEQ ID NO: 5858 - protein, 856 aa, Homo sapiens
MANETQKVGAIHFPFPFTPYSIQEDFMAELYRVLEAGKIGIFESPTGTGKSLSLICGALSWLRDFEQKKREEEARLLETGTGPLHDEKDESLCLSSSCEGAAGTPRPAGEPAWVTQFVQKKEERDLVDRLKAEQARRKQREERLQQLQHRVQLKYAAKRLRQEEEERENLLRLSREMLETGPEAERLEQLESGEEELVLAEYESDEEKKVASRVDEDEDDLEEEHITKIYYCSRTHSQLAQFVHEVKKSPFGKDVRLVSLGSRQNLCVNEDVKSLGSVQLINDRCVDMQRSRHEKKKGAEEEKPKRRRQEKQAACPFYNHEQMGLLRDEALAEVKDMEQLLALGKEARACPYYGSRLAIPAAQLVVLPYQMLLHAATRQAAGIRLQDQVVIIDEAHNLIDTITGMHSVEVSGSQLCQAHSQLLQYVERYGKRLKAKNLMYLKQILYLLEKFVAVLGGNIKQNPNTQSLSQTGTELKTINDFLFQSQIDNINLFKVQRYCEKSMISRKLFGFTERYGAVFSSREQPKLAGFQQFLQSLQPRTTEALAAPADESQASTLRPASPLMHIQGFLAALTTANQDGRVILSRQGSLSQSTLKFLLLNPAVHFAQVVKECRAVVIAGGTMQPVSDFRQQLLACAGVEAERVVEFSCGHVIPPDNILPLVICSGISNQPLEFTFQKRELPQMIFQEPKSAHQVEQVLLAYSRCIQACGQERGQVTGALLLSVVGGKMSEGINFSDNLGRCVVMVGMPFPNIRSAELQEKMAYLDQTLPRAPGQAPPGKALVENLCMKAVNQSIGRAIRHQKDFASVVLLDQRYARPPVLAKLPAWIRARVEVKATFGPAIAAVQKFHREKSASS

SEQ ID NO: 5859 - protein, 556 aa, Homo sapiens
EEEPLWQGCSAGLPWLPAEKKKGAEEEKPKRRRQEKQAACPFYNHEQMGLLRDEALAEVKDMEQLLALGKEARACPYYGSRLAIPAAQLVVLPYQMLLHAATRQAAGIRLQDQVVIIDEAHNLIDTITGMHSVEVSGSQLCQAHSQLLQYVERYGKRLKAKNLMYLKQILYLLEKFVAVLGGNIKQNPNTQSLSQTGTELKTINDFLFQSQIDNINLFKVQRYCEKSMISRKLFGFTERYGAVFSSREQPKLAGFQQFLQSLQPRTTEALAAPADESQASTLRPASPLMHIQGFLAALTTANQDGRVILSRQGSLSQSTLKFLLLNPAVHFAQVVKECRAVVIAGGTMQPVSDFRQQLLACAGVEAERVVEFSCGHVIPPDNILPLVICSGISNQPLEFTFQKRELPQMMDEVGRILCNLCGVVPGGVVCFFPSYEYLRQVHAHWEKGGLLGRLAARKKIFQEPKSAHQVEQVLLAYSRCIQACGQERGQVTGALLLSVVGGKMSEGINFSDNLGRCVVMVGMPFPNIRSAELQEKMAYLDQTLAGPSGTRRILPA

SEQ ID NO: 5860 - protein, 970 aa, Homo sapiens
MANETQKVGAIHFPFPFTPYSIQEDFMAELYRVLEAGKIGIFESPTGTGKSLSLICGALSWLRDFEQKKREEEARLLETGTGPLHDEKDESLCLSSSCEGAAGTPRPAGEPAWVTQFVQKKEERDLVDRLKAEQARRKQREERLQQLQHRVQLKYAAKRLRQEEEERENLLRLSREMLETGPEAERLEQLESGEEELVLAEYESDEEKKVASRVDEDEDDLEEEHITKIYYCSRTHSQLAQFVHEVKKSPFGKDVRLVSLGSRQNLCVNEDVKSLGSVQLINDRCVDMQRSRHEKKKGAEEEKPKRRRQEKQAACPFYNHEQMGLLRDEALAEVKDMEQLLALGKEARACPYYGSRLAIPAAQLVVLPYQMLLHAATRQAAGIRLQDQVVIIDEAHNLIDTITGMHSVEVSGSQLCQAHSQLLQYVERYGKRLKAKNLMYLKQILYLLEKFVAVLGGNIKQNPNTQSLSQTGTELKTINDFLFQSQIDNINLFKVQRYCEKSMISRKLFGFTERYGAVFSSREQPKLAGFQQFLQSLQPRTTEALAAPADESQASTLRPASPLMHIQGFLAALTTANQDGRVILSRQGSLSQSTLKFLLLNPAVHFAQVVKECRAVVIAGGTMQPVSDFRQQLLACAGVEAERVVEFSCGHVIPPDNILPLVICSGISNQPLEFTFQKRELPQMMDEVGRILCNLCGVVPGGVVCFFPSYEYLRQVHAHWEKGGLLGRLAARKKIFQEPKSAHQVEQVLLAYSRCIQACGQERGQVTGALLLSVVGGKMSEGINFSDNLGRCVVMVGMPFPNIRSAELQEKMAYLDQTLSPRPGTPREGSGGEPVHEGRQPVHRQGHQAPEGFCQRSAPGPAICPAPCPGQAAGLDPSPCGGQSYLWPRHCCCAEVSPGEVGLFLMGNHTTAWRRALPLSCPLETVFVVGVVCGDPVTKVKPRRRVWSPECCQDPGTGVSSRRRKWGNPE

SEQ ID NO: 5861 - protein, 224 aa, Homo sapiens
MAELYRVLEAGKIGIFESPTGTGKSLSLICGALSWLRDFEQKKREEEARLLETGTGPLHDEKDESLCLSSSCEGAAGTPRPAGEPAWVTQFVQKKEERDLVDRLKAEQARRKQREERLQQLQHRVQLKYAAKRLRQEEEERENLLRLSREMLETGPEAERLEQLESGEEELVLAEYESDEEKKVASRVDEDEDDLEEEHITKIYYCSRTHSQLAQFVHEVKKSP

SEQ ID NO: 5862 - protein, 906 aa, Homo sapiens
MANETQKVGAIHFPFPFTPYSIQEDFMAELYRVLEAGKIGIFESPTGTGKSLSLICGALSWLRDFEQKKREEEARLLETGTGPLHDEKDESLCLSSSCEGAAGTPRPAGEPAWVTQFVQKKEERDLVDRLKAEQARRKQREERLQQLQHRVQLKYAAKRLRQEEEERENLLRLSREMLETGPEAERLEQLESGEEELVLAEYESDEEKKVASRVDEDEDDLEEEHITKIYYCSRTHSQLAQFVHEVKKSPFGKDVRLVSLGSRQNLCVNEDVKSLGSVQLINDRCVDMQRSRHEKKKGAEEEKPKRRRQEKQAACPFYNHEQMGLLRDEALAEVKDMEQLLALGKEARACPYYGSRLAIPAAQLVVLPYQMLLHAATRQAAGIRLQDQVVIIDEAHNLIDTITGMHSVEVSGSQLCQAHSQLLQYVERYGKRLKAKNLMYLKQILYLLEKFVAVLGGNIKQNPNTQSLSQTGTELKTINDFLFQSQIDNINLFKVQRYCEKSMISRKLFGFTERYGAVFSSREQPKLAGFQQFLQSLQPRTTEALAAPADESQASTLRPASPLMHIQGFLAALTTANQDGRVILSRQGSLSQSTLKFLLLNPAVHFAQVVKECRAVVIAGGTMQPVSDFRQQLLACAGVEAERVVEFSCGHVIPPDNILPLVICSGISNQPLEFTFQKRELPQMMDEVGRILCNLCGVVPGGVVCFFPSYEYLRQVHAHWEKGGLLGRLAARKKIFQEPKSAHQVEQVLLAYSRCIQACGQERGQVTGALLLSVVGGKMSEGINFSDNLGRCVVMVGMPFPNIRSAELQEKMAYLDQTLPRAPGQAPPGKALVENLCMKAVNQSIGRAIRHQKDFASVVLLDQRYARPPVLAKLPAWIRARVEVKATFGPAIAAVQKFHREKSASS

SEQ ID NO: 5863 - protein, 970 aa, Homo sapiens; identical to SEQ ID NO: 5860

SEQ ID NO: 5864 - protein, 1430 aa, Homo sapiens
MTVFRQENVDDYYDTGEELGSGQFAVVKKCREKSTGLQYAAKFIKKRRTKSSRRGVSREDIEREVSILKEIQHPNVITLHEVYENKTDVILILELVAGGELFDFLAEKESLTEEEATEFLKQILNGVYYLHSLQIAHFDLKPENIMLLDRNVPKPRIKIIDFGLAHKIDFGNEFKNIFGTPEFVAPEIVNYEPLGLEADMWSIGVITYILLSGASPFLGDTKQETLANVSAVNYEFEDEYFSNTSALAKDFIRRLLVKDPKKRMTIQDSLQHPWIKPKDTQQALSRKASAVNMEKFKKFAARKKWKQSVRLISLCQRLSRSFLSRSNMSVARSDDTLDEEDSFVMKAIIHAINDDNVPGLQHLLGSLSNYDVNQPNKHGTPPLLIAAGCGNIQILQLLIKRGSRIDVQDKGGSNAVYWAARHGHVDTLKFLSENKCPLDVKDKSGEMALHVAARYGHADVAQLLCSFGSNPNIQDKEEETPLHCAAWHGYYSVAKALCEAGCNVNIKNREGETPLLTASARGYHDIVECLAEHGADLNACDKDGHIALHLAVRRCQMEVIKTLLSQGCFVDYQDRHGNTPLHVACKDGNMPIVVALCEANCNLDISNKYGRTPLHLAANNGILDVVRYLCLMGASVEALTTDGKTAEDLARSEQHEHVAGLLARLRKDTHRGLFIQQLRPTQNLQPRIKLKLFGHSGSGKTTLVESLKCGLLRSFFRRRRPRLSSTNSSRFPPSPLASKPTVSVSINNLYPGCENVSVRSRSMMFEPGLTKGMLEVFVAPTHHPHCSADDQSTKAIDIQNAYLNGVGDFSVWEFSGNPVYFCCYDYFAANDPTSIHVVVFSLEEPYEIQLNQVIFWLSFLKSLVPVEEPIAFGGKLKNPLQVVLVATHADIMNVPRPAGGEFGYDKDTSLLKEIRNRFGNDLHISNKLFVLDAGASGSKDMKVLRNHLQEIRSQIVSVCPPMTHLCEKIISTLPSWRKLNGPNQLMSLQQFVYDVQDQLNPLASEEDLRRIAQQLHSTGEINIMQSETVQDVLLLDPRWLCTNVLGKLLSVETPRALHHYRGRYTVEDIQRLVPDSDVEELLQILDAMDICARDLSSGTMVDVPALIKTDNLHRSWADEEDEVMVYGGVRIVPVEHLTPFPCGIFHKVQVNLCRWIHQQSTEGDADIRLWVNGCKLANRGAELLVLLVNHGQGIEVQVRGLETEKIKCCLLLDSVCSTIENVMATTLPGLLTVKHYLSPQQLREHHEPVMIYQPRDFFRAQTLKETSLTNTMGGYKESFSSIMCFGCHDVYSQASLGMDIHASDLNLLTRRKLSRLLDPPDPLGKDWCLLAMNLGLPDLVAKYNTSNGAPKDFLPSPLHALLREWTTYPESTVGTLMSKLRELGRRDAADFLLKASSVFKINLDGNGQEAYASSCNSGTSYNSISSVVSR

SEQ ID NO: 5865 - protein, 1430 aa, Homo sapiens; identical to SEQ ID NO: 5864

SEQ ID NO: 5866 - protein, 1455 aa, Homo sapiens
MTVFRQENVDDYYDTGEELGSGQFAVVKKCREKSTGLQYAAKFIKKRRTKSSRRGVSREDIEREVSILKEIQHPNVITLHEVYENKTDVILILELVAGGELFDFLAEKESLTEEEATEFLKQILNGVYYLHSLQIAHFDLKPENIMLLDRNVPKPRIKIIDFGLAHKIDFGNEFKNIFGTPEFVAPEIVNYEPLGLEADMWSIGVITYILLSGASPFLGDTKQETLANVSAVNYEFEDEYFSNTSALAKDFIRRLLVKDPKKRMTIQDSLQHPWIKPKDTQQALSRKASAVNMEKFKKFAARKKWKQSVRLISLCQRLSRSFLSRSNMSVARSDDTLDEEDSFVMKAIIHAINDDNVPGLQHLLGSLSNYDVNQPNKHGTPPLLIAAGCGNIQILQLLIKRGSRIDVQDKGGSNAVYWAARHGHVDTLKFLSENKCPLDVKDKSGEMALHVAARYGHADVAQLLCSFGSNPNIQDKEEETPLHCAAWHGYYSVAKALCEAGCNVNIKNREGETPLLTASARGYHDIVECLAEHGADLNACDKDGHIALHLAVRRCQMEVIKTLLSQGCFVDYQDRHGNTPLHVACKDGNMPIVVALCEANCNLDISNKYGRTPLHLAANNGILDVVRYLCLMGASVEALTTDGKTAEDLARSEQHEHVAGLLARLRKDTHRGLFIQQLRPTQNLQPRIKLKLFGHSGSGKTTLVESLKCGLLRSFFRRRRPRLSSTNSSRFPPSPLASKPTVSVSINNLYPGCENVSVRSRSMMFEPGLTKGMLEVFVAPTHHPHCSADDQSTKAIDIQNAYLNGVGDFSVWEFSGNPVYFCCYDYFAANDPTSIHVVVFSLEEPYEIQLNQVIFWLSFLKSLVPVEEPIAFGGKLKNPLQVVLVATHADIMNVPRPAGGEFGYDKDTSLLKEIRNRFGNDLHISNKLFVLDAGASGSKDMKVLRNHLQEIRSQIVSKTLPFTPDILVGVPLWHHQKIGGSPVCPPMTHLCEKIISTLPSWRKLNGPNQLMSLQQFVYDVQDQLNPLASEEDLRRIAQQLHSTGEINIMQSETVQDVLLLDPRWLCTNVLGKLLSVETPRALHHYRGRYTVEDIQRLVPDSDVEELLQILDAMDICARDLSSGTMVDVPALIKTDNLHRSWADEEDEVMVYGGVRIVPVEHLTPFPCGIFHKVQVNLCRWIHQQSTEGDADIRLWVNGCKLANRGAELLVLLVNHGQGIEVQVRGLETEKIKCCLLLDSVCSTIENVMATTLPGLLTVKHYLSPQQLREHHEPVMIYQPRDFFRAQTLKETSLTNTMGGYKESFSSIMCFGCHDVYSQASLGMDIHASDLNLLTRRKLSRLLDPPDPLGKDWCLLAMNLGLPDLVAKYNTSNGAPKDFLPSPLHALLREWTTYPESTVGTLMSKLRELGRRDAADFLLKASSVFKINLDGNGQEAYASSCNSGTSYNSISSVVSR

SEQ ID NO: 5867 - protein, 1430 aa, Homo sapiens; identical to SEQ ID NO: 5864

SEQ ID NO: 5868 - protein, 1364 aa, Homo sapiens
MTVFRQENVDDYYDTGEELGSGQFAVVKKCREKSTGLQYAAKFIKKRRTKSSRRGVSREDIEREVSILKEIQHPNVITLHEVYENKTDVILILELVAGGELFDFLAEKESLTEEEATEFLKQILNGVYYLHSLQIAHFDLKPENIMLLDRNVPKPRIKIIDFGLAHKIDFGNEFKNIFGTPEFVAPEIVNYEPLGLEADMWSIGVITYILLSGASPFLGDTKQETLANVSAVNYEFEDEYFSNTSALAKDFIRRLLVKDPKKRMTIQDSLQHPWIKPKDTQQALSRKASAVNMEKFKKFAARKKWKQSVRLISLCQRLSRSFLSRSNMSVARSDDTLDEEDSFVMKAIIHAINDDNVPGLQHLLGSLSNYDVNQPNKHGTPPLLIAAGCGNIQILQLLIKRGSRIDVQDKGGSNAVYWAARHGHVDTLKFLSENKCPLDVKDKSGEMALHVAARYGHADVAQLLCSFGSNPNIQDKEEETPLHCAAWHGYYSVAKALCEAGCNVNIKNREGETPLLTASARGYHDIVECLAEHGADLNACDKDGHIALHLAVRRCQMEVIKTLLSQGCFVDYQDRHGNTPLHVACKDGNMPIVVALCEANCNLDISNKYGRTPLHLAANNGILDVVRYLCLMGASVEALTTDGKTAEDLARSEQHEHVAGLLARLRKDTHRGLFIQQLRPTQNLQPRIKLKLFGHSGSGKTTLVESLKCGLLRSFFRRRRPRLSSTNSSRFPPSPLASKPTVSVSINNLYPGCENVSVRSRSMMFEPGLTKGMLEVFVAPTHHPHCSADDQSTKAIDIQNAYLNAFGGKLKNPLQVVLVATHADIMNVPRPAGGEFGYDKDTSLLKEIRNRFGNDLHISNKLFVLDAGASGSKDMKVLRNHLQEIRSQIVSVCPPMTHLCEKIISTLPSWRKLNGPNQLMSLQQFVYDVQDQLNPLASEEDLRRIAQQLHSTGEINIMQSETVQDVLLLDPRWLCTNVLGKLLSVETPRALHHYRGRYTVEDIQRLVPDSDVEELLQILDAMDICARDLSSGTMVDVPALIKTDNLHRSWADEEDEVMVYGGVRIVPVEHLTPFPCGIFHKVQVNLCRWIHQQSTEGDADIRLWVNGCKLANRGAELLVLLVNHGQGIEVQVRGLETEKIKCCLLLDSVCSTIENVMATTLPGLLTVKHYLSPQQLREHHEPVMIYQPRDFFRAQTLKETSLTNTMGGYKESFSSIMCFGCHDVYSQASLGMDIHASDLNLLTRRKLSRLLDPPDPLGKDWCLLAMNLGLPDLVAKYNTSNGAPKDFLPSPLHALLREWTTYPESTVGTLMSKLRELGRRDAADFLLKASSVFKINLDGNGQEAYASSCNSGTSYNSISSVVSR

SEQ ID NO: 5869 - protein, 740 aa, Homo sapiens
MATANSIIVLDDDDEDEAAAQPGPSHPLPNAASPGAEAPSSSEPHGARGSSSSGGKKCYKLENEKLFEEFLELCKMQTADHPEVVPFLYNRQQRAHSLFLASAEFCNILSRVLSRARSRPAKLYVYINELCTVLKAHSAKKKLNLAPAATTSNEPSGNNPPTHLSLDPTNAENTASQSPRTRGSRRQIQRLEQLLALYVAEIRRLQEKELDLSELDDPDSAYLQEARLKRKLIRLFGRLCELKDCSSLTGRVIEQRIPYRGTRYPEVNRRIERLINKPGPDTFPDYGDVLRAVEKAAARHSLGLPRQQLQLMAQDAFRDVGIRLQERRHLDLIYNFGCHLTDDYRPGVDPALSDPVLARRLRENRSLAMSRLDEVISKYAMLQDKSEEGERKKRRARLQGTSSHSADTPEASLDSGEGPSGMASQGCPSASRAETDDEDDEESDEEEEEEEEEEEEEATDSEEEEDLEQMQEGQEDDEEEDEEEEAAAGKDGDKSPMSSLQISNEKNLEPGKQISRSSGEQQNKGRIVSPSLLSEEPLAPSSIDAESNGEQPEELTLEEESPVSQLFELEIEALPLDTPSSVETDISSSRKQSEEPFTTVLENGAGMVSSTSFNGGVSPHNWGDSGPPCKKSRKEKKQTGSGPLGNSYVERQRSVHEKNGKKICTLPSPPSPLASLAPVADSSTRVDSPSHGLVTSSLCIPSPARLSQTPHSQPPRPGTCKTSVATQCDPEEIIVLSDSD

SEQ ID NO: 5870 - protein, 740 aa, Homo sapiens; identical to SEQ ID NO: 5869

SEQ ID NO: 5871 - protein, 665 aa, Homo sapiens
MQTADHPEVVPFLYNRQQRAHSLFLASAEFCNILSRVLSRARSRPAKLYVYINELCTVLKAHSAKKKLNLAPAATTSNEPSGNNPPTHLSLDPTNAENTASQSPRTRGSRRQIQRLEQLLALYVAEIRRLQEKELDLSELDDPDSAYLQEARLKRKLIRLFGRLCELKDCSSLTGRVIEQRIPYRGTRYPEVNRRIERLINKPGPDTFPDYGDVLRAVEKAAARHSLGLPRQQLQLMAQDAFRDVGIRLQERRHLDLIYNFGCHLTDDYRPGVDPALSDPVLARRLRENRSLAMSRLDEVISKYAMLQDKSEEGERKKRRARLQGTSSHSADTPEASLDSGEGPSGMASQGCPSASRAETDDEDDEESDEEEEEEEEEEEEEATDSEEEEDLEQMQEGQEDDEEEDEEEEAAAGKDGDKSPMSSLQISNEKNLEPGKQISRSSGEQQNKGRIVSPSLLSEEPLAPSSIDAESNGEQPEELTLEEESPVSQLFELEIEALPLDTPSSVETDISSSRKQSEEPFTTVLENGAGMVSSTSFNGGVSPHNWGDSGPPCKKSRKEKKQTGSGPLGNSYVERQRSVHEKNGKKICTLPSPPSPLASLAPVADSSTRVDSPSHGLVTSSLCIPSPARLSQTPHSQPPRPGTCKTSVATQCDPEEIIVLSDSD

SEQ ID NO: 5872 - protein, 178 aa, Homo sapiens
MATANSIIVLDDDDEDEAAAQPGPSHPLPNAASPGAEAPSSSEPHGARGSSSSGGKKCYKLENEKLFEEFLELCKMQTADHPEVVPFLYNRQQRAHSLFLASAEFCNILSRVLSRARSRPAKLYVYINELCTVLKAHSAKKKLNLAPAATTSNEPSGNNPPTHLSLDPTNAENTASQS

SEQ ID NO: 5873 - protein, 48 aa, Homo sapiens
MATANSIIVLDDDDEDEAAAQPGPSHPLPNAASPGAEAPSSSEPHGAR

SEQ ID NO: 5874 - protein, 130 aa, Homo sapiens
MATANSIIVLDDDDEDEAAAQPGPSHPLPNAASPGAEAPSSSEPHGARGSSSSGGKKCYKLENEKLFEEFLELCKMQTADHPEVVPFLYNRQQRAHSLFLASAEFCNILSRVLSRARSRPAKLYVYINEL

SEQ ID NO: 5875 - protein, 771 aa, Homo sapiens
GVPVIKWKKDGIHLALGMDERKQQLSNGSLLIQNILHSRHHKPDEGLYQCEASLGDSGSIISRTAKVAVAGPLRFLSQTESVTAFMGDTVLLKCEVIGEPMPTIHWQKNQQDLTPIPGDSRVVVLPSGALQISRLQPGDIGIYRCSARNPASSRTGNEAEVRILSDPGLHRQLYFLQRPSNVVAIEGKDAVLECCVSGYPPPSFTWLRGEEVIQLRSKKYSLLGGSNLLISNVTDDDSGMYTCVVTYKNENISASAELTVLVPPWFLNHPSNLYAYESMDIEFECTVSGKPVPTVNWMKNGDVVIPSDYFQIVGGSNLRILGVVKSDEGFYQCVAENEAGNAQTSAQLIVPKPAIPSSSVLPSAPRDVVPVLVSSRFVRLSWRPPAEAKGNIQTFTVFFSREGDNRERALNTTQPGSLQLTVGNLKPEAMYTFRVVAYNEWGPGESSQPIKVATQPELQVPGPVENLQAVSTSPTSILITWEPPAYANGPVQGYRLFCTEVSTGKEQNIEVDGLSYKLEGLKKFTEYSLRFLAYNRYGPGVSTDDITVVTLSDVPSAPPQNVSLEVVNSRSIKVSWLPPPSGTQNGFITGYKIRHRKTTRRGEMETLEPNNLWYLFTGLEKGSQYSFQVSAMTVNGTGPPSNWYTAETPENDLDESQVPDQPSSLHVRPQTNCIIMSWTPPLNPNIVVRGYIIGYGVGSPYAETVRVDSKQRYYSIERLESSSHYVISLKAFNNAGEGVPLYESATTRSITVRRHNISKLHSNRPQTKHNV

SEQ ID NO: 5876 - protein, 897 aa, Homo sapiens
MGDTVLLKCEVIGEPMPTIHWQKNQQDLTPIPGDSRVVVLPSGALQISRLQPGDIGIYRCSARNPASSRTGNEAEVRILSDPGLHRQLYFLQRPSNVVAIEGKDAVLECCVSGYPPPSFTWLRGEEVIQLRSKKYSLLGGSNLLISNVTDDDSGMYTCVVTYKNENISASAELTVLVPPWFLNHPSNLYAYESMDIEFECTVSGKPVPTVNWMKNGDVVIPSDYFQIVGGSNLRILGVVKSDEGFYQCVAENEAGNAQTSAQLIVPKPAIPSSSVLPSAPRDVVPVLVSSRFVRLSWRPPAEAKGNIQTFTVFFSREGDNRERALNTTQPGSLQLTVGNLKPEAMYTFRVVAYNEWGPGESSQPIKVATQPELQVPGPVENLQAVSTSPTSILITWEPPAYANGPVQGYRLFCTEVSTGKEQNIEVDGLSYKLEGLKKFTEYSLRFLAYNRYGPGVSTDDITVVTLSDVPSAPPQNVSLEVVNSRSIKVSWLPPPSGTQNGFITGYKIRHRKTTRRGEMETLEPNNLWYLFTGLEKGSQYSFQVSAMTVNGTGPPSNWYTAETPENDLDESQVPDQPSSLHVRPQTNCIIMSWTPPLNPNIVVRGYIIGYGVGSPYAETVRVDSKQRYYSIERLESSSHYVISLKAFNNAGEGVPLYESATTRSITDLSTPMLPPVGVQAVALTHDAVRVSWADNSVPKNQKTSEVRLYTVRWRTSFSASAKYKSEDTTSLSYTATGLKPNTMYEFSVMVTKNRRSSTWSMTAHATTYEAAPTSAPKDLTVITREGKPRAVIVSWQPPLEANGKITAYILFYTLDKNIPIDDWIMETISGDRLTHQIMDLNLDTMYYFRIQARNSKGVGPLSDPILFRTLKVEHPDKMANDQDTGVTINLVNEVLLG

SEQ ID NO: 5877 - protein, 1447 aa, Homo sapiens
MENSLRCVWVPKLAFVLFGASLFSAHLQVTGFQIKAFTALRFLSEPSDAVTMRGGNVLLDCSAESDRGVPVIKWKKDGIHLALGMDERKQQLSNGSLLIQNILHSRHHKPDEGLYQCEASLGDSGSIISRTAKVAVAGPLRFLSQTESVTAFMGDTVLLKCEVIGEPMPTIHWQKNQQDLTPIPGDSRVVVLPSGALQISRLQPGDIGIYRCSARNPASSRTGNEAEVRILSDPGLHRQLYFLQRPSNVVAIEGKDAVLECCVSGYPPPSFTWLRGEEVIQLRSKKYSLLGGSNLLISNVTDDDSGMYTCVVTYKNENISASAELTVLVPPWFLNHPSNLYAYESMDIEFECTVSGKPVPTVNWMKNGDVVIPSDYFQIVGGSNLRILGVVKSDEGFYQCVAENEAGNAQTSAQLIVPKPAIPSSSVLPSAPRDVVPVLVSSRFVRLSWRPPAEAKGNIQTFTVFFSREGDNRERALNTTQPGSLQLTVGNLKPEAMYTFRVVAYNEWGPGESSQPIKVATQPELQVPGPVENLQAVSTSPTSILITWEPPAYANGPVQGYRLFCTEVSTGKEQNIEVDGLSYKLEGLKKFTEYSLRFLAYNRYGPGVSTDDITVVTLSDVPSAPPQNVSLEVVNSRSIKVSWLPPPSGTQNGFITGYKIRHRKTTRRGEMETLEPNNLWYLFTGLEKGSQYSFQVSAMTVNGTGPPSNWYTAETPENDLDESQVPDQPSSLHVRPQTNCIIMSWTPPLNPNIVVRGYIIGYGVGSPYAETVRVDSKQRYYSIERLESSSHYVISLKAFNNAGEGVPLYESATTRSITDPTDPVDYYPLLDDFPTSVPDLSTPMLPPVGVQAVALTHDAVRVSWADNSVPKNQKTSEVRLYTVRWRTSFSASAKYKSEDTTSLSYTATGLKPNTMYEFSVMVTKNRRSSTWSMTAHATTYEAAPTSAPKDLTVITREGKPRAVIVSWQPPLEANGKITAYILFYTLDKNIPIDDWIMETISGDRLTHQIMDLNLDTMYYFRIQARNSKGVGPLSDPILFRTLKVEHPDKMANDQGRHGDGGYWPVDTNLIDRSTLNEPPIGQMHPPHGSVTPQKNSNLLVIIVVTVGVITVLVVVIVAVICTRRSSAQQRKKRATHSAGKRKGSQKDLRPPDLWIHHEEMEMKNIEKPSGTDPAGRDSPIQSCQDLTPVSHSQSETQLGSKSTSHSGQDTEEAGSSMSTLERSLAARRAPRAKLMIPMDAQSNNPAVVSAIPVPTLESAQYPGILPSPTCGYPHPQFTLRPVPFPTLSVDRGFGAGRSQSVSEGPTTQQPPMLPPSQPEHSSSEEAPSRTIPTACVRPTHPLRSFANPLLPPPMSAIEPKVPYTPLLSQPGPTLPKTHVKTASLGLAGKARSPLLPVSVPTAPEVSEESHKPTEDSANVYEQDDLSEQMASLEGLMKQLNAITGSAF

SEQ ID NO: 5878 - protein, 70 aa, Homo sapiens
MTMNVLEAGKWKSIVPAPGEGLLAVLHMMVFTDALHRERSVKWQAGVCYNGGKDFAVSLARPKAAEGIAD

SEQ ID NO: 5879 - protein, 463 aa, Homo sapiens
MSVAIRKRSWEEHVTHWMGQPFNSDDRNTACHHGLVADSLQASMEKDATLNVDRKEKCVSLPDCCHGSELRDFPGRPMGHLSKDVDENDSHEGEDQFLSLEASTETLVHVSDEDNNADLCLTDDKQVLNTQGQKTSGQHMIQGAGSLEKALPIIQSNQVSSNSWGIAGETELALVKESGERKVTDSISKSLELCNEISLSEIKDAPKVNAVDTLNVKDIAPEKQLLNSAVIAQQRRKPDPPKDENERSTCNVVQNEFLDTPCTNRGLPLLKTDFGSCLLQPPSCPNGMSAENGLEKSGFSQHQNKSPPKVKAEDGMQCLQLKETLATQEPTDNQVRLRKRKEIREDRDRARLDSMVLLIMKLDQLDQDIENALSTSSSPSGTPTNLRRHVPDLESGSESGADTISVNQTRVNLSSDTESTDLPSSTPVANSGTKPKTTAIQGISEKEKAGKLTFWFCFLANLF

SEQ ID NO: 5880 - protein, 1755 aa, Homo sapiens
METRSSKTRRSLASRTNECQGTMWAPTSPPAGSSSPSQPTWKSSLYSSLAYSEAFHYSFAARPRRLTQLALAQRPEPQLLRLRPSSLRTQDISHLLTGVFRNLYSAEVIGDEVSASLIKARGSENERHEEFVDQLQQIRELYKQRLDEFEMLERHITQAQARAIAENERVMSQAGVQDLESLVRLPPVKSVSRWCIDSELLRKHHLISPEDYYTDTVPFHSAPKGISLPGCSKLTFSCEKRSVQKKELNKKLEDSCRKKLAEFEDELDHTVDSLTWNLTPKAKERTREPLKKASQPRNKNWMNHLRVPQRELDRLLLARMESRNHFLKNPRFFPPNTRYGGKSLVFPPKKPAPIGEFQSTEPEQSCADTPVFLAKPPIGFFTDYEIGPVYEMVIALQNTTTTSRYLRVLPPSTPYFALGLGMFPGKGGMVAPGMTCQYIVQFFPDCLGDFDDFILVETQSAHTLLIPLQARRPPPVLTLSPVLDCGYCLIGGVKMTRFICKNVGFSVGRFCIMPKTSWPPLSFKAIATVGFVEQPPFGILPSVFELAPGHAILVEVLFSPKSLGKAEQTFIIMCDNCQIKELVTIGIGQLIALDLIYISGEKSQPDPGELTDLTAQHFIRFEPENLRSTARKQLIIRNATHVELAFYWQIMKPNLQPLMPGETFSMDSIKCYPDKETAFSIMPRKGVLSPHTDHEFILSFSPHELRDFHSVLQMVLEEVPEPVSSEAESLGHSSYSVDDVIVLEIEVKGSVEPFQVLLEPYALIIPGENYIGINVKKAFKMWNNSKSPIRYLWGKISDCHIIEVEPGTGVIEPSEVGDFELNFTGGVPGPTSQDLLCEIEDSPSPVVLHIEAVFKGPALIINVSALQFGLLRLGQKATNSIQIRNVSQLPATWRMKESPVSLQERPEDVSPFDIEPSSGQLHSLGECRVDITLEALHCQHLETVLELEVENGAWSYLPVYAEVQKPHVYLQSSQVEVRNLYLGVPTKTTITLINGTLLPTQFHWGKLLGHQAEFCMVTVSPKHGLLGPSEECQLKLELTAHTQEELTHLALPCHVSGMKKPLVLGISGKPQGLQVAITISKESSDCSTEQWPGHPKELRLDFGSAVPLRTRVTRQLILTNRSPIRTRFSLKFEYFGSPQNSLSKKTSLPNMPPALLKTVRMQEHLAKREQLDFMESMLSHGKGAAFFPHFSQGMLGPYQQLCIDITGCANMWGEYWDNLICTVGDLLPEVIPVHMAAVGCPISSLRTTSYTIDQAQKEPAMRFGTQVSGGDTVTRTLRLNNSSPCDIRLDWETYVPEDKEDRLVELLVFYGPPFPLRDQAGNELVCPDTPEGGCLLWSPGPSSSSEFSHETDSSVEGSSSASNRVAQKLISVILQAHEGVPSGHLYCISPKQVVVPAGGSSTIYISFTPMVLSPEILHKVECTGYALGFMSLDSKVEREIPGKRHRLQDFAVGPLKLDLHSYVRPAQLSVELDYGGSMEFQCQASDLIPEQPCSGVLSELVTTHHLKLTNTTEIPHYFRLMVSRPFSVSQDGASQDHRAPGPGQKQECEEETASADKQLVLQAQENMLVNVSFSLSLELLSYQKLPADQTLPGVDIQQSASGEREMVFTQNLLLEYTNQTTQVVPLRAVVAVPELQLSTSWVDFGTCFVSQQRVREVYLMNLSGCRSYWTMLMGQQEPAKAAVAFRVSPNSGLLEARSANAPPTSIALQVFFTARSSELYESTMVVEGVLGEKSCTLRLRGQGSYDERYMLPHQP

SEQ ID NO: 5881 - protein, 1778 aa, Homo sapiens
METRSSKTRRSLASRTNECQGTMWAPTSPPAGSSSPSQPTWKSSLYSSLAYSEAFHYSFAARPRRLTQLALAQRPEPQLLRLRPSSLRTQDISHLLTGVFRNLYSAEVIGDEVSASLIKARGSENERHEEFVDQLQQIRELYKQRLDEFEMLERHITQAQARAIAENERVMSQAGVQDLESLVRLPPVKSVSRWCIDSELLRKHHLISPEDYYTDTVPFHSAPKGISLPGCSKLTFSCEKRSVQKKELNKKLEDSCRKKLAEFEDELDHTVDSLTWNLTPKAKERTREPLKKASQPRNKNWMNHLRVPQRELDRLLLARMESRNHFLKNPRFFPPNTRYGGKSLVFPPKKPAPIGEFQSTEPEQSCADTPVFLAKPPIGFFTDYEIGPVYEMVIALQNTTTTSRYLRVLPPSTPYFALGLGMFPGKGGMVAPGMTCQYIVQFFPDCLGDFDDFILVETQSAHTLLIPLQARRPPPVLTLSPVLDCGYCLIGGVKMTRFICKNVGFSVGRFCIMPKTSWPPLSFKAIATVGFVEQPPFGILPSVFELAPGHAILVEVLFSPKSLGKAEQTFIIMCDNCQIKELVTIGIGQLIALDLIYISGEKSQPDPGELTDLTAQHFIRFEPENLRSTARKQLIIRNATHVELAFYWQIMKPNLQPLMPGETFSMDSIKCYPDKETAFSIMPRKGVLSPHTDHEFILSFSPHELRDFHSVLQMVLEEVPEPVSSEAESLGHSSYSVDDVIVLEIEVKGSVEPFQVLLEPYALIIPGENYIGINVKKAFKMWNNSKSPIRYLWGKISDCHIIEVEPGTGVIEPSEVGDFELNFTGGVPGPTSQDLLCEIEDSPSPVVLHIEAVFKGPALIINVSALQFGLLRLGQKATNSIQIRNVSQLPATWRMKESPVSLQERPEDVSPFDIEPSSGQLHSLGECRVDITLEALHCQHLETVLELEVENGAWSYLPVYAEVQKPHVYLQSSQVEVRNLYLGVPTKTTITLINGTLLPTQFHWGKLLGHQAEFCMVTVSPKHGLLGPSEECQLKLELTAHTQEELTHLALPCHVSGMKKPLVLGISGKPQGLQVAITISKESSDCSTEQWPGHPKELRLDFGSAVPLRTRVTRQLILTNRSPIRTRFSLKFEYFGSPQNSLSKKTSLPNMPPALLKTVRMQEHLAKREQLDFMESMLSHGKGAAFFPHFSQGMLGPYQQLCIDITGCANMWGEYWDNLICTVGDLLPEVIPVHMAAVGCPISSLRTTSYTIDQAQKEPAMRFGTQVSGGDTVTRTLRLNNSSPCDIRLDWETYVPEDKEDRLVELLVFYGPPFPLRDQAGNELVCPDTPEGGCLLWSPGPSSSSEFSHETDSSVEGSSSASNRVAQKLISVILQAHEGVPSGHLYCISPKQVVVPAGGSSTIYISFTPMVLSPEILHKVECTGYALGFMSLDSKVEREIPGKRHRLQDFAVGPLKLDLHSYVRPAQLSVELDYGGSMEFQCQASDLIPEQPCSGVLSELVTTHHLKLTNTTEIPHYFRLMVSRPFSVSQDGASQDHRAPGPGQKQECEEETASADKQLVLQAQENMLVNVSFSLSLELLSYQKLPADQTLPGVDIQQSASGEREMVFTQNLLLEYTNQTTQVVPLRAVVAVPELQLSTSWVDFGTCFVSQQRVREVYLMNLSGCRSYWTMLMGVVSCTSPRWWWKVCSVRSPAPCGSGAKAPMMRDTCCLTSPEAPPQPSAPGPSWRKNIAQGLGAALQHKDTDLGTWGPLGSSWNGRTPFHNGLSLGPHDMSSELT

SEQ ID NO: 5882 - protein, 1758 aa, Homo sapiens
METRSSKTRRSLASRTNECQGTMWAPTSPPAGSSSPSQPTWKSSLYSSLAYSEAFHYSFAARPRRLTQLALAQRPEPQLLRLRPSSLRTQDISHLLTGVFRNLYSAEVIGDEVSASLIKARGSENERHEEFVDQLQQIRELYKQRLDEFEMLERHITQAQARAIAENERVMSQAGVQDLESLVRLPPVKSVSRWCIDSELLRKHHLISPEDYYTDTVPFHSAPKGISLPGCSKLTFSCEKRSVQKKELNKKLEDSCRKKLAEFEDELDHTVDSLTWNLTPKAKERTREPLKKASQPRNKNWMNHLRVPQRELDRLLLARMESRNHFLKNPRFFPPNTRYGGKSLVFPPKKPAPIGEFQSTEPEQSCADTPVFLAKPPIGFFTDYEIGPVYEMVIALQNTTTTSRYLRVLPPSTPYFALGLGMFPGKGGMVAPGMTCQYIVQFFPDCLGDFDDFILVETQSAHTLLIPLQARRPPPVLTLSPVLDCGYCLIGGVKMTRFICKNVGFSVGRFCIMPKTSWPPLSFKAIATVGFVEQPPFGILPSVFELAPGHAILVEVLFSPKSLGKAEQTFIIMCDNCQIKELVTIGIGQLIALDLIYISGEKSQPDPGELTDLTAQHFIRFEPENLRSTARKQLIIRNATHVELAFYWQIMKPNLQPLMPGETFSMDSIKCYPDKETAFSIMPRKGVLSPHTDHEFILSFSPHELRDFHSVLQMVLEEVPEPVSSEAESLGHSSYSVDDVIVLEIEVKGSVEPFQVLLEPYALIIPGENYIGINVKKAFKMWNNSKSPIRYLWGKISDCHIIEVEPGTGVIEPSEVGDFELNFTGGVPGPTSQDLLCEIEDSPSPVVLHIEAVFKGPALIINVSALQFGLLRLGQKATNSIQIRNVSQLPATWRMKESPVSLQERPEDVSPFDIEPSSGQLHSLGECRVDITLEALHCQHLETVLELEVENGAWSYLPVYAEVQKPHVYLQSSQVEVRNLYLGVPTKTTITLINGTLLPTQFHWGKLLGHQAEFCMVTVSPKHGLLGPSEECQLKLELTAHTQEELTHLALPCHVSGMKKPLVLGISGKPQGLQVAITISKESSDCSVFSTEQWPGHPKELRLDFGSAVPLRTRVTRQLILTNRSPIRTRFSLKFEYFGSPQNSLSKKTSLPNMPPALLKTVRMQEHLAKREQLDFMESMLSHGKGAAFFPHFSQGMLGPYQQLCIDITGCANMWGEYWDNLICTVGDLLPEVIPVHMAAVGCPISSLRTTSYTIDQAQKEPAMRFGTQVSGGDTVTRTLRLNNSSPCDIRLDWETYVPEDKEDRLVELLVFYGPPFPLRDQAGNELVCPDTPEGGCLLWSPGPSSSSEFSHETDSSVEGSSSASNRVAQKLISVILQAHEGVPSGHLYCISPKQVVVPAGGSSTIYISFTPMVLSPEILHKVECTGYALGFMSLDSKVEREIPGKRHRLQDFAVGPLKLDLHSYVRPAQLSVELDYGGSMEFQCQASDLIPEQPCSGVLSELVTTHHLKLTNTTEIPHYFRLMVSRPFSVSQDGASQDHRAPGPGQKQECEEETASADKQLVLQAQENMLVNVSFSLSLELLSYQKLPADQTLPGVDIQQSASGEREMVFTQNLLLEYTNQTTQVVPLRAVVAVPELQLSTSWVDFGTCFVSQQRVREVYLMNLSGCRSYWTMLMGQQEPAKAAVAFRVSPNSGLLEARSANAPPTSIALQVFFTARSSELYESTMVVEGVLGEKSCTLRLRGQGSYDERYMLPHQP

SEQ ID NO: 5883 - protein, 78 aa, Homo sapiens
MRPCIWIHVHLKPPCRLVELLPFSSALQGLSHLSLGTTLPVILPERNEEQNLQELSHNADKYQMGDCCKEEIDDSIFY

SEQ ID NO: 5884 - protein, 1785 aa, Homo sapiens
MGISTVILEMCLLWGQVLSTGGWIPRTTDYASLIPSEVPLDPTVAEGSPFPSESTLESTVAEGSPISLESTLESTVAEGSLIPSESTLESTVAEGSDSGLALRLVNGDGRCQGRVEILYRGSWGTVCDDSWDTNDANVVCRQLGCGWAMSAPGNAWFGQGSGPIALDDVRCSGHESYLWSCPHNGWLSHNCGHGEDAGVICSAAQPQSTLRPESWPVRISPPVPTEGSESSLALRLVNGGDRCRGRVEVLYRGSWGTVCDDYWDTNDANVVCRQLGCGWAMSAPGNAQFGQGSGPIVLDDVRCSGHESYLWSCPHNGWLTHNCGHSEDAGVICSAPQSRPTPSPDTWPTSHASTAGPESSLALRLVNGGDRCQGRVEVLYRGSWGTVCDDSWDTSDANVVCRQLGCGWATSAPGNARFGQGSGPIVLDDVRCSGYESYLWSCPHNGWLSHNCQHSEDAGVICSAAHSWSTPSPDTLPTITLPASTVGSESSLALRLVNGGDRCQGRVEVLYQGSWGTVCDDSWDTNDANVVCRQLGCGWAMSAPGNARFGQGSGPIVLDDVRCSGHESYLWSCPHNGWLSHNCGHSEDAGVICSASQSRPTPSPDTWPTSHASTAGSESSLALRLVNGGDRCQGRVEVLYRGSWGTVCDDYWDTNDANVVCRQLGCGWAMSAPGNARFGQGSGPIVLDDVRCSGHESYLWSCPHNGWLSHNCGHHEDAGVICSASQSQPTPSPDTWPTSHASTAGSESSLALRLVNGGDRCQGRVEVLYRGSWGTVCDDYWDTNDANVVCRQLGCGWATSAPGNARFGQGSGPIVLDDVRCSGHESYLWSCPHNGWLSHNCGHHEDAGVICSASQSQPTPSPDTWPTSRASTAGSESTLALRLVNGGDRCRGRVEVLYQGSWGTVCDDYWDTNDANVVCRQLGCGWAMSAPGNAQFGQGSGPIVLDDVRCSGHESYLWSCPHNGWLSHNCGHHEDAGVICSAAQSQSTPRPDTWLTTNLPALTVGSESSLALRLVNGGDRCRGRVEVLYRGSWGTVCDDSWDTNDANVVCRQLGCGWAMSAPGNARFGQGSGPIVLDDVRCSGNESYLWSCPHKGWLTHNCGHHEDAGVICSATQINSTTTDWWHPTTTTTARPSSNCGGFLFYASGTFSSPSYPAYYPNNAKCVWEIEVNSGYRINLGFSNLKLEAHHNCSFDYVEIFDGSLNSSLLLGKICNDTRQIFTSSYNRMTIHFRSDISFQNTGFLAWYNSFPSDATLRLVNLNSSYGLCAGRVEIYHGGTWGTVCDDSWTIQEAEVVCRQLGCGRAVSALGNAYFGSGSGPITLDDVECSGTESTLWQCRNRGWFSHNCNHREDAGVICSGNHLSTPAPFLNITRPNTDYSCGGFLSQPSGDFSSPFYPGNYPNNAKCVWDIEVQNNYRVTVIFRDVQLEGGCNYDYIEVFDGPYRSSPLIARVCDGARGSFTSSSNFMSIRFISDHSITRRGFRAEYYSSPSNDSTNLLCLPNHMQASVSRSYLQSLGFSASDLVISTWNGYYECRPQITPNLVIFTIPYSGCGTFKQADNDTIDYSNFLTAAVSGGIIKRRTDLRIHVSCRMLQNTWVDTMYIANDTIHVANNTIQVEEVQYGNFDVNISFYTSSSFLYPVTSRPYYVDLNQDLYVQAEILHSDAVLTLFVDTCVASPYSNDFTSLTYDLIRSGCVRDDTYGPYSSPSLRIARFRFRAFHFLNRFPSVYLRCKMVVCRAYDPSSRCYRGCVLRSKRDVGSYQEKVDVVLGPIQLQTPPRREEEPR

SEQ ID NO: 5885 - protein, 1785 aa, Homo sapiens; identical to SEQ ID NO: 5884

SEQ ID NO: 5886 - protein, 2413 aa, Homo sapiens
MGISTVILEMCLLWGQVLSTGGWIPRTTDYASLIPSEVPLDPTVAEGSPFPSESTLESTVAEGSPISLESTLESTVAEGSLIPSESTLESTVAEGSDSGLALRLVNGDGRCQGRVEILYRGSWGTVCDDSWDTNDANVVCRQLGCGWAMSAPGNAWFGQGSGPIALDDVRCSGHESYLWSCPHNGWLSHNCGHGEDAGVICSAAQPQSTLRPESWPVRISPPVPTEGSESSLALRLVNGGDRCRGRVEVLYRGSWGTVCDDYWDTNDANVVCRQLGCGWAMSAPGNAQFGQGSGPIVLDDVRCSGHESYLWSCPHNGWLTHNCGHSEDAGVICSAPQSRPTPSPDTWPTSHASTAGPESSLALRLVNGGDRCQGRVEVLYRGSWGTVCDDSWDTSDANVVCRQLGCGWATSAPGNARFGQGSGPIVLDDVRCSGYESYLWSCPHNGWLSHNCQHSEDAGVICSAAHSWSTPSPDTLPTITLPASTVGSESSLALRLVNGGDRCQGRVEVLYRGSWGTVCDDSWDTNDANVVCRQLGCGWAMLAPGNARFGQGSGPIVLDDVRCSGNESYLWSCPHNGWLSHNCGHSEDAGVICSGPESSLALRLVNGGDRCQGRVEVLYRGSWGTVCDDSWDTNDANVVCRQLGCGWATSAPGNARFGQGSGPIVLDDVRCSGHESYLWSCPNNGWLSHNCGHHEDAGVICSAAQSRSTPRPDTLSTITLPPSTVGSESSLTLRLVNGSDRCQGRVEVLYRGSWGTVCDDSWDTNDANVVCRQLGCGWATSAPGNARFGQGSGPIVLDDVRCSGHESYLWSCPHNGWLSHNCGHHEDAGVICSVSQSRPTPSPDTWPTSHASTAGPESSLALRLVNGGDRCQGRVEVLYRGSWGTVCDDSWDTSDANVVCRQLGCGWATSAPGNARFGQGSGPIVLDDVRCSGYESYLWSCPHNGWLSHNCQHSEDAGVICSAAHSWSTPSPDTLPTITLPASTVGSESSLALRLVNGGDRCQGRVEVLYQGSWGTVCDDSWDTNDANVVCRQLGCGWAMSAPGNARFGQGSGPIVLDDVRCSGHESYLWSCPHNGWLSHNCGHSEDAGVICSASQSRPTPSPDTWPTSHASTAGSESSLALRLVNGGDRCQGRVEVLYRGSWGTVCDDYWDTNDANVVCRQLGCGWAMSAPGNARFGQGSGPIVLDDVRCSGHESYLWSCPHNGWLSHNCGHHEDAGVICSASQSQPTPSPDTWPTSHASTAGSESSLALRLVNGGDRCQGRVEVLYRGSWGTVCDDYWDTNDANVVCRQLGCGWATSAPGNARFGQGSGPIVLDDVRCSGHESYLWSCPHNGWLSHNCGHHEDAGVICSASQSQPTPSPDTWPTSHASTAGSESSLALRLVNGGDRCQGRVEVLYRGSWGTVCDDYWDTNDANVVCRQLGCGWATSAPGNARFGQGSGPIVLDDVRCSGHESYLWSCPHNGWLSHNCGHHEDAGVICSASQSQPTPSPDTWPTSRASTAGSESTLALRLVNGGDRCRGRVEVLYQGSWGTVCDDYWDTNDANVVCRQLGCGWAMSAPGNAQFGQGSGPIVLDDVRCSGHESYLWSCPHNGWLSHNCGHHEDAGVICSAAQSQSTPRPDTWLTTNLPALTVGSESSLALRLVNGGDRCRGRVEVLYRGSWGTVCDDSWDTNDANVVCRQLGCGWAMSAPGNARFGQGSGPIVLDDVRCSGNESYLWSCPHKGWLTHNCGHHEDAGVICSATQINSTTTDWWHPTTTTTARPSSNCGGFLFYASGTFSSPSYPAYYPNNAKCVWEIEVNSGYRINLGFSNLKLEAHHNCSFDYVEIFDGSLNSSLLLGKICNDTRQIFTSSYNRMTIHFRSDISFQNTGFLAWYNSFPSDATLRLVNLNSSYGLCAGRVEIYHGGTWGTVCDDSWTIQEAEVVCRQLGCGRAVSALGNAYFGSGSGPITLDDVECSGTESTLWQCRNRGWFSHNCNHREDAGVICSGNHLSTPAPFLNITRPNTDYSCGGFLSQPSGDFSSPFYPGNYPNNAKCVWDIEVQNNYRVTVIFRDVQLEGGCNYDYIEVFDGPYRSSPLIARVCDGARGSFTSSSNFMSIRFISDHSITRRGFRAEYYSSPSNDSTNLLCLPNHMQASVSRSYLQSLGFSASDLVISTWNGYYECRPQITPNLVIFTIPYSGCGTFKQADNDTIDYSNFLTAAVSGGIIKRRTDLRIHVSCRMLQNTWVDTMYIANDTIHVANNTIQVEEVQYGNFDVNISFYTSSSFLYPVTSRPYYVDLNQDLYVQAEILHSDAVLTLFVDTCVASPYSNDFTSLTYDLIRSGCVRDDTYGPYSSPSLRIARFRFRAFHFLNRFPSVYLRCKMVVCRAYDPSSRCYRGCVLRSKRDVGSYQEKVDVVLGPIQLQTPPRREEEPR

SEQ ID NO: 5887 - protein, 1785 aa, Homo sapiens; identical to SEQ ID NO: 5884

SEQ ID NO: 5888 - protein, 2413 aa, Homo sapiens; identical to SEQ ID NO: 5886

SEQ ID NO: 5889 - protein, 2413 aa, Homo sapiens; identical to SEQ ID NO: 5886

SEQ ID NO: 5890 - protein, 2403 aa, Homo sapiens
MGISTVILEMCLLWGQVLSTGGWIPRTTDYASLIPSEVPLDPTVAEGSPFPSESTLESTVAEGSPISLESTLESTVAEGSLIPSESTLESTVAEGSDSGLALRLVNGDGRCQGRVEILYRGSWGTVCDDSWDTNDANVVCRQLGCGWAMSAPGNAWFGQGSGPIALDDVRCSGHESYLWSCPHNGWLSHNCGHGEDAGVICSAAQPQSTLRPESWPVRISPPVPTEGSESSLALRLVNGGDRCRGRVEVLYRGSWGTVCDDYWDTNDANVVCRQLGCGWAMSAPGNAQFGQGSGPIVLDDVRCSGHESYLWSCPHNGWLTHNCGHSEDAGVICSAPQSRPTPSPDTWPTSHASTAGPESSLALRLVNGGDRCQGRVEVLYRGSWGTVCDDSWDTSDANVVCRQLGCGWATSAPGNARFGQGSGPIVLDDVRCSGYESYLWSCPHNGWLSHNCQHSEDAGVICSDTLPTITLPASTVGSESSLALRLVNGGDRCQGRVEVLYRGSWGTVCDDSWDTNDANVVCRQLGCGWAMLAPGNARFGQGSGPIVLDDVRCSGNESYLWSCPHNGWLSHNCGHSEDAGVICSGPESSLALRLVNGGDRCQGRVEVLYRGSWGTVCDDSWDTNDANVVCRQLGCGWATSAPGNARFGQGSGPIVLDDVRCSGHESYLWSCPNNGWLSHNCGHHEDAGVICSAAQSRSTPRPDTLSTITLPPSTVGSESSLTLRLVNGSDRCQGRVEVLYRGSWGTVCDDSWDTNDANVVCRQLGCGWATSAPGNARFGQGSGPIVLDDVRCSGHESYLWSCPHNGWLSHNCGHHEDAGVICSVSQSRPTPSPDTWPTSHASTAGPESSLALRLVNGGDRCQGRVEVLYRGSWGTVCDDSWDTSDANVVCRQLGCGWATSAPGNARFGQGSGPIVLDDVRCSGYESYLWSCPHNGWLSHNCQHSEDAGVICSAAHSWSTPSPDTLPTITLPASTVGSESSLALRLVNGGDRCQGRVEVLYQGSWGTVCDDSWDTNDANVVCRQLGCGWAMSAPGNARFGQGSGPIVLDDVRCSGHESYLWSCPHNGWLSHNCGHSEDAGVICSASQSRPTPSPDTWPTSHASTAGSESSLALRLVNGGDRCQGRVEVLYRGSWGTVCDDYWDTNDANVVCRQLGCGWAMSAPGNARFGQGSGPIVLDDVRCSGHESYLWSCPHNGWLSHNCGHHEDAGVICSASQSQPTPSPDTWPTSHASTAGSESSLALRLVNGGDRCQGRVEVLYRGSWGTVCDDYWDTNDANVVCRQLGCGWATSAPGNARFGQGSGPIVLDDVRCSGHESYLWSCPHNGWLSHNCGHHEDAGVICSASQSQPTPSPDTWPTSHASTAGSESSLALRLVNGGDRCQGRVEVLYRGSWGTVCDDYWDTNDANVVCRQLGCGWATSAPGNARFGQGSGPIVLDDVRCSGHESYLWSCPHNGWLSHNCGHHEDAGVICSASQSQPTPSPDTWPTSRASTAGSESTLALRLVNGGDRCRGRVEVLYQGSWGTVCDDYWDTNDANVVCRQLGCGWAMSAPGNAQFGQGSGPIVLDDVRCSGHESYLWSCPHNGWLSHNCGHHEDAGVICSAAQSQSTPRPDTWLTTNLPALTVGSESSLALRLVNGGDRCRGRVEVLYRGSWGTVCDDSWDTNDANVVCRQLGCGWAMSAPGNARFGQGSGPIVLDDVRCSGNESYLWSCPHKGWLTHNCGHHEDAGVICSATQINSTTTDWWHPTTTTTARPSSNCGGFLFYASGTFSSPSYPAYYPNNAKCVWEIEVNSGYRINLGFSNLKLEAHHNCSFDYVEIFDGSLNSSLLLGKICNDTRQIFTSSYNRMTIHFRSDISFQNTGFLAWYNSFPSDATLRLVNLNSSYGLCAGRVEIYHGGTWGTVCDDSWTIQEAEVVCRQLGCGRAVSALGNAYFGSGSGPITLDDVECSGTESTLWQCRNRGWFSHNCNHREDAGVICSGNHLSTPAPFLNITRPNTDYSCGGFLSQPSGDFSSPFYPGNYPNNAKCVWDIEVQNNYRVTVIFRDVQLEGGCNYDYIEVFDGPYRSSPLIARVCDGARGSFTSSSNFMSIRFISDHSITRRGFRAEYYSSPSNDSTNLLCLPNHMQASVSRSYLQSLGFSASDLVISTWNGYYECRPQITPNLVIFTIPYSGCGTFKQADNDTIDYSNFLTAAVSGGIIKRRTDLRIHVSCRMLQNTWVDTMYIANDTIHVANNTIQVEEVQYGNFDVNISFYTSSSFLYPVTSRPYYVDLNQDLYVQAEILHSDAVLTLFVDTCVASPYSNDFTSLTYDLIRSGCVRDDTYGPYSSPSLRIARFRFRAFHFLNRFPSVYLRCKMVVCRAYDPSSRCYRGCVLRSKRDVGSYQEKVDVVLGPIQLQTPPRREEEPR

SEQ ID NO: 5891 - protein, 559 aa, Homo sapiens
MTIHFRSDISFQNTGFLAWYNSFPSDATLRLVNLNSSYGLCAGRVEIYHGGTWGTVCDDSWTIQEAEVVCRQLGCGRAVSALGNAYFGSGSGPITLDDVECSGTESTLWQCRNRGWFSHNCNHREDAGVICSGNHLSTPAPFLNITRPNTDYSCGGFLSQPSGDFSSPFYPGNYPNNAKCVWDIEVQNNYRVTVIFRDVQLEGGCNYDYIEVFDGPYRSSPLIARVCDGARGSFTSSSNFMSIRFISDHSITRRGFRAEYYSSPSNDSTNLLCLPNHMQASVSRSYLQSLGFSASDLVISTWNGYYECRPQITPNLVIFTIPYSGCGTFKQADNDTIDYSNFLTAAVSGGIIKRRTDLRIHVSCRMLQNTWVDTMYIANDTIHVANNTIQVEEVQYGNFDVNISFYTSSSFLYPVTSRPYYVDLNQDLYVQAEILHSDAVLTLFVDTCVASPYSNDFTSLTYDLIRSGCVRDDTYGPYSSPSLRIARFRFRAFHFLNRFPSVYLRCKMVVCRAYDPSSRCYRGCVLRSKRDVGSYQEKVDVVLGPIQLQTPPRREEEPR

SEQ ID NO: 5892 - protein, 1133 aa, Homo sapiens
MGISTVILEMCLLWGQVLSTGGWIPRTTDYASLIPSEVPLDPTVAEGSPFPSESTLESTVAEGSPISLESTLESTVAEGSLIPSESTLESTVAEGSDSGLALRLVNGDGRCQGRVEILYRGSWGTVCDDSWDTNDANVVCRQLGCGWAMSAPGNAWFGQGSGPIALDDVRCSGHESYLWSCPHNGWLSHNCGHGEDAGVICSAPQSRPTPSPDTWPTSHASTAGSESSLALRLVNGGDRCQGRVEVLYRGSWGTVCDDYWDTNDANVVCRQLGCGWATSAPGNARFGQGSGPIVLDDVRCSGHESYLWSCPHNGWLSHNCGHHEDAGVICSASQSQPTPSPDTWPTSRASTAGSESTLALRLVNGGDRCRGRVEVLYQGSWGTVCDDYWDTNDANVVCRQLGCGWAMSAPGNAQFGQGSGPIVLDDVRCSGHESYLWSCPHNGWLSHNCGHHEDAGVICSATQINSTTTDWWHPTTTTTARPSSNCGGFLFYASGTFSSPSYPAYYPNNAKCVWEIEVNSGYRINLGFSNLKLEAHHNCSFDYVEIFDGSLNSSLLLGKICNDTRQIFTSSYNRMTIHFRSDISFQNTGFLAWYNSFPSDATLRLVNLNSSYGLCAGRVEIYHGGTWGTVCDDSWTIQEAEVVCRQLGCGRAVSALGNAYFGSGSGPITLDDVECSGTESTLWQCRNRGWFSHNCNHREDAGVICSGNHLSTPAPFLNITRPNTDYSCGGFLSQPSGDFSSPFYPGNYPNNAKCVWDIEVQNNYRVTVIFRDVQLEGGCNYDYIEVFDGPYRSSPLIARVCDGARGSFTSSSNFMSIRFISDHSITRRGFRAEYYSSPSNDSTNLLCLPNHMQASVSRSYLQSLGFSASDLVISTWNGYYECRPQITPNLVIFTIPYSGCGTFKQADNDTIDYSNFLTAAVSGGIIKRRTDLRIHVSCRMLQNTWVDTMYIANDTIHVANNTIQVEEVQYGNFDVNISFYTSSSFLYPVTSRPYYVDLNQDLYVQAEILHSDAVLTLFVDTCVASPYSNDFTSLTYDLIRSGCVRDDTYGPYSSPSLRIARFRFRAFHFLNRFPSVYLRCKMVVCRAYDPSSRCYRGCVLRSKRDVGSYQEKVDVVLGPIQLQTPPRREEEPR

SEQ ID NO: 5893 - protein, 2413 aa, Homo sapiens; identical to SEQ ID NO: 5886

SEQ ID NO: 5894 - protein, 2542 aa, Homo sapiens
MGISTVILEMCLLWGQVLSTGGWIPRTTDYASLIPSEVPLDPTVAEGSPFPSESTLESTVAEGSPISLESTLESTVAEGSLIPSESTLESTVAEGSDSGLALRLVNGDGRCQGRVEILYRGSWGTVCDDSWDTNDANVVCRQLGCGWAMSAPGNAWFGQGSGPIALDDVRCSGHESYLWSCPHNGWLSHNCGHGEDAGVICSAAQPQSTLRPESWPVRISPPVPTEGSESSLALRLVNGGDRCRGRVEVLYRGSWGTVCDDYWDTNDANVVCRQLGCGWAMSAPGNAQFGQGSGPIVLDDVRCSGHESYLWSCPHNGWLTHNCGHSEDAGVICSAPQSRPTPSPDTWPTSHASTAGPESSLALRLVNGGDRCQGRVEVLYRGSWGTVCDDSWDTSDANVVCRQLGCGWATSAPGNARFGQGSGPIVLDDVRCSGYESYLWSCPHNGWLSHNCQHSEDAGVICSAAHSWSTPSPDTLPTITLPASTVGSESSLALRLVNGGDRCQGRVEVLYRGSWGTVCDDSWDTNDANVVCRQLGCGWAMLAPGNARFGQGSGPIVLDDVRCSGNESYLWSCPHNGWLSHNCGHSEDAGVICSGPESSLALRLVNGGDRCQGRVEVLYRGSWGTVCDDSWDTNDANVVCRQLGCGWATSAPGNARFGQGSGPIVLDDVRCSGHESYLWSCPNNGWLSHNCGHHEDAGVICSAAQSRSTPRPDTLSTITLPPSTVGSESSLTLRLVNGSDRCQGRVEVLYRGSWGTVCDDSWDTNDANVVCRQLGCGWATSAPGNARFGQGSGPIVLDDVRCSGHESYLWSCPHNGWLSHNCGHHEDAGVICSVSQSRPTPSPDTWPTSHASTAGPESSLALRLVNGGDRCQGRVEVLYRGSWGTVCDDSWDTSDANVVCRQLGCGWATSAPGNARFGQGSGPIVLDDVRCSGYESYLWSCPHNGWLSHNCQHSEDAGVICSAAHSWSTPSPDTLPTITLPASTVGSESSLALRLVNGGDRCQGRVEVLYQGSWGTVCDDSWDTNDANVVCRQLGCGWAMSAPGNARFGQGSGPIVLDDVRCSGHESYLWSCPHNGWLSHNCGHSEDAGVICSASQSRPTPSPDTWPTSHASTAGSESSLALRLVNGGDRCQGRVEVLYRGSWGTVCDDYWDTNDANVVCRQLGCGWAMSAPGNARFGQGSGPIVLDDVRCSGHESYLWSCPHNGWLSHNCGHHEDAGVICSASQSQPTPSPDTWPTSHASTAGSESSLALRLVNGGDRCQGRVEVLYRGSWGTVCDDYWDTNDANVVCRQLGCGWATSAPGNARFGQGSGPIVLDDVRCSGHESYLWSCPHNGWLSHNCGHHEDAGVICSASQSQPTPSPDTWPTSHASTAGSESSLALRLVNGGDRCQGRVEVLYRGSWGTVCDDYWDTNDANVVCRQLGCGWATSAPGNARFGQGSGPIVLDDVRCSGHESYLWSCPHNGWLSHNCGHHEDAGVICSASQSQPTPSPDTWPTSHASTAGSESSLALRLVNGGDRCQGRVEVLYRGSWGTVCDDYWDTNDANVVCRQLGCGWATSAPGNARFGQGSGPIVLDDVRCSGHESYLWSCPHNGWLSHNCGHHEDAGVICSASQSQPTPSPDTWPTSRASTAGSESTLALRLVNGGDRCRGRVEVLYQGSWGTVCDDYWDTNDANVVCRQLGCGWAMSAPGNAQFGQGSGPIVLDDVRCSGHESYLWSCPHNGWLSHNCGHHEDAGVICSAAQSQSTPRPDTWLTTNLPALTVGSESSLALRLVNGGDRCRGRVEVLYRGSWGTVCDDSWDTNDANVVCRQLGCGWAMSAPGNARFGQGSGPIVLDDVRCSGNESYLWSCPHKGWLTHNCGHHEDAGVICSATQINSTTTDWWHPTTTTTARPSSNCGGFLFYASGTFSSPSYPAYYPNNAKCVWEIEVNSGYRINLGFSNLKLEAHHNCSFDYVEIFDGSLNSSLLLGKICNDTRQIFTSSYNRMTIHFRSDISFQNTGFLAWYNSFPSDATLRLVNLNSSYGLCAGRVEIYHGGTWGTVCDDSWTIQEAEVVCRQLGCGRAVSALGNAYFGSGSGPITLDDVECSGTESTLWQCRNRGWFSHNCNHREDAGVICSGNHLSTPAPFLNITRPNTDYSCGGFLSQPSGDFSSPFYPGNYPNNAKCVWDIEVQNNYRVTVIFRDVQLEGGCNYDYIEVFDGPYRSSPLIARVCDGARGSFTSSSNFMSIRFISDHSITRRGFRAEYYSSPSNDSTNLLCLPNHMQASVSRSYLQSLGFSASDLVISTWNGYYECRPQITPNLVIFTIPYSGCGTFKQADNDTIDYSNFLTAAVSGGIIKRRTDLRIHVSCRMLQNTWVDTMYIANDTIHVANNTIQVEEVQYGNFDVNISFYTSSSFLYPVTSRPYYVDLNQDLYVQAEILHSDAVLTLFVDTCVASPYSNDFTSLTYDLIRSGCVRDDTYGPYSSPSLRIARFRFRAFHFLNRFPSVYLRCKMVVCRAYDPSSRCYRGCVLRSKRDVGSYQEKVDVVLGPIQLQTPPRREEEPR

SEQ ID NO: 5895 - protein, 2412 aa, Homo sapiens
MGISTVILEMCLLWGQVLSTGGWIPRTTDYASLIPSEVPLDPTVAEGSPFPSESTLESTVAEGSPISLESTLESTVAEGSLIPSESTLESTVAEGSDSGLALRLVNGDGRCQGRVEILYRGSWGTVCDDSWDTNDANVVCRQLGCGWAMSAPGNAWFGQGSGPIALDDVRCSGHESYLWSCPHNGWLSHNCGHGEDAGVICSAAQPQSTLRPESWPVRISPPVPTEGSESSLALRLVNGGDRCRGRVEVLYRGSWGTVCDDYWDTNDANVVCRQLGCGWAMSAPGNAQFGQGSGPIVLDDVRCSGHESYLWSCPHNGWLTHNCGHSEDAGVICSAPQSRPTPSPDTWPTSHASTAGPESSLALRLVNGGDRCQGRVEVLYRGSWGTVCDDSWDTSDANVVCRQLGCGWATSAPGNARFGQGSGPIVLDDVRCSGYESYLWSCPHNGWLSHNCQHSEDAGVICSAAHSWSTPSPDTLPTITLPASTVGSESSLALRLVNGGDRCQGRVEVLYRGSWGTVCDDSWDTNDANVVCRQLGCGWAMLAPGNARFGQGSGPIVLDDVRCSGNESYLWSCPHNGWLSHNCGHSEDAGVICSGPESSLALRLVNGGDRCQGRVEVLYRGSWGTVCDDSWDTNDANVVCRQLGCGWATSAPGNARFGQGSGPIVLDDVRCSGHESYLWSCPNNGWLSHNCGHHEDAGVICSAAQSRSTPRPDTLSTITLPPSTVGSESSLTLRLVNGSDRCQGRVEVLYRGSWGTVCDDSWDTNDANVVCRQLGCGWATSAPGNARFGQGSGPIVLDDVRCSGHESYLWSCPHNGWLSHNCGHHEDAGVICSVSQSRPTPSPDTWPTSHASTAGPESSLALRLVNGGDRCQGRVEVLYRGSWGTVCDDSWDTSDANVVCRQLGCGWATSAPGNARFGQGSGPIVLDDVRCSGYESYLWSCPHNGWLSHNCQHSEDAGVICSAAHSWSTPSPDTLPTITLPASTVGSESSLALRLVNGGDRCQGRVEVLYQGSWGTVCDDSWDTNDANVVCRQLGCGWAMSAPGNARFGQGSGPIVLDDVRCSGHESYLWSCPHNGWLSHNCGHSEDAGVICSASQSRPTPSPDTWPTSHASTAGSESSLALRLVNGGDRCQGRVEVLYRGSWGTVCDDYWDTNDANVVCRQLGCGWAMSAPGNARFGQGSGPIVLDDVRCSGHESYLWSCPHNGWLSHNCGHHEDAGVICSASQSQPTPSPDTWPTSHASTAGSESSLALRLVNGGDRCQGRVEVLYRGSWGTVCDDYWDTNDANVVCRQLGCGWATSAPGNARFGQGSGPIVLDDVRCSGHESYLWSCPHNGWLSHNCGHHEDAGVICSASQSQPTPSPDTWPTSHASTAGSESSLALRLVNGGDRCQGRVEVLYRGSWGTVCDDYWDTNDANVVCRQLGCGWATSAPGNARFGQGSGPIVLDDVRCSGHESYLWSCPHNGWLSHNCGHHEDAGVICSASQSQPTPSPDTWPTSRASTAGSESTLALRLVNGGDRCRGRVEVLYQGSWGTVCDDYWDTNDANVVCRQLGCGWAMSAPGNAQFGQGSGPIVLDDVRCSGHESYLWSCPHNGWLSHNCGHHEDAGVICSAAQSQSTPRPDTWLTTNLPALTVGSESSLALRLVNGGDRCRGRVEVLYRGSWGTVCDDSWDTNDANVVCRQLGCGWAMSAPGNARFGQGSGPIVLDDVRCSGNESYLWSCPHKGWLTHNCGHHEDAGVICSATQINSTTTDWWHPTTTTTARPSSNCGGFLFYASGTFSSPSYPAYYPNNAKCVWEIEVNSGYRINLGFSNLKLEAHHNCSFDYVEIFDGSLNSSLLLGKICNDTRQIFTSSYNRMTIHFRSDISFQNTGFLAWYNSFPSDATLRLVNLNSSYGLCAGRVEIYHGGTWGTVCDDSWTIQEAEVVCRQLGCGRAVSALGNAYFGSGSGPITLDDVECSGTESTLWQCRNRGWFSHNCNHREDAGVICSGNHLSTPAPFLNITRPNNYSCGGFLSQPSGDFSSPFYPGNYPNNAKCVWDIEVQNNYRVTVIFRDVQLEGGCNYDYIEVFDGPYRSSPLIARVCDGARGSFTSSSNFMSIRFISDHSITRRGFRAEYYSSPSNDSTNLLCLPNHMQASVSRSYLQSLGFSASDLVISTWNGYYECRPQITPNLVIFTIPYSGCGTFKQADNDTIDYSNFLTAAVSGGIIKRRTDLRIHVSCRMLQNTWVDTMYIANDTIHVANNTIQVEEVQYGNFDVNISFYTSSSFLYPVTSRPYYVDLNQDLYVQAEILHSDAVLTLFVDTCVASPYSNDFTSLTYDLIRSGCVRDDTYGPYSSPSLRIARFRFRAFHFLNRFPSVYLRCKMVVCRAYDPSSRCYRGCVLRSKRDVGSYQEKVDVVLGPIQLQTPPRREEEPR

SEQ ID NO: 5896 - protein, 2413 aa, Homo sapiens; identical to SEQ ID NO: 5886

SEQ ID NO: 5897 - protein, 2403 aa, Homo sapiens; identical to SEQ ID NO: 5890

SEQ ID NO: 5898 - protein, 1785 aa, Homo sapiens; identical to SEQ ID NO: 5884

SEQ ID NO: 5899 - protein, 198 aa, Homo sapiens
MAADISESSGADCKGDPRNSAKLDADYPLRVLYCGVCSLPTEYCEYMPDVAKCRQWLEKNFPNEFAKLTVENSPKQEAGISEGQGTAGEEEEKKKQKRGGRGQIKQKKKTVPQKVTIAKIPRAKKKYVTRVCGLATFEIDLKEAQRFFAQKFSCGASVTGEDEIIIQGDFTDDIIDVIQEKWPEVDDDSIEDLGEVKK

SEQ ID NO: 5900 - protein, 509 aa, Homo sapiens
MDPPRASHLSPRKKRPRQTGALMASSPQDIKFQDLVVFILEKKMGTTRRAFLMELARRKGFRVENELSDSVTHIVAENNSGSDVLEWLQAQKVQVSSQPELLDVSWLIECIRAGKPVEMTGKHQLVVRRDYSDSTNPGPPKTPPIAVQKISQYACQRRTTLNNCNQIFTDAFDILAENCEFRENEDSCVTFMRAASVLKSLPFTIISMKDTEGIPCLGSKVKGIIEEIIEDGESSEVKAVLNDERYQSFKLFTSVFGVGLKTSEKWFRMGFRTLSKVRSDKSLKFTRMQKAGFLYYEDLVSCVTRAEAEAVSVLVKEAVWAFLPDAFVTMTGGFRRGKKMGHDVDFLITSPGSTEDEEQLLQKVMNLWEKKGLLLYYDLVESTFEKLRLPSRKVDALDHFQKCFLIFKLPRQRVDSDQSSWQEGKTWKAIRVDLVLCPYERRAFALLGWTGSRQFERDLRRYATHERKMILDNHALYDKTKRIFLKAESEEEIFAHLGLDYIEPWERNA

SEQ ID NO: 5901 - protein, 508 aa, Homo sapiens
MDPPRASHLSPRKKRPRQTGALMASSPQDIKFQDLVVFILEKKMGTTRRAFLMELARRKGFRVENELSDSVTHIVAENNSGSDVLEWLQAQKVQVSSQPELLDVSWLIECIRAGKPVEMTGKHQLVVRRDYSDSTNPGPPKTPPIAVQKISQYACQRRTTLNNCNQIFTDAFDILAENCEFRENEDSCVTFMRAASVLKSLPFTIISMKDTEGIPCLGSKVKGIIEEIIEDGESSEVKAVLNDERYQSFKLFTSVFGVGLKTSEKWFRMGFRTLSKVRSDKSLKFTRMQKAGFLYYEDLVSCVTRAEAEAVSVLVKEAVWAFLPDAFVTMTGGFRRGKKMGHDVDFLITSPGSTEDEEQLLQKVMNLWEKKGLLLYYDLVESTFEKLRLPSRKVDALDHFQKCFLIFKLPRQRVDSDQSSWQEGKTWKAIRVDLVLCPYERRAFALLGWTGSRFERDLRRYATHERKMILDNHALYDKTKRIFLKAESEEEIFAHLGLDYIEPWERNA

SEQ ID NO: 5902 - protein, 847 aa, Homo sapiens
MEAARPSGSWNGALCRLLLLTLAILIFASDACKNVTLHVPSKLDAEKLVGRVNLKECFTAANLIHSSDPDFQILEDGSVYTTNTILLSSEKRSFTILLSNTENQEKKKIFVFLEHQTKVLKKRHTKEKVLRRAKRRWAPIPCSMLENSLGPFPLFLQQVQSDTAQNYTIYYSIRGPGVDQEPRNLFYVERDTGNLYCTRPVDREQYESFEIIAFATTPDGYTPELPLPLIIKIEDENDNYPIFTEETYTFTIFENCRVGTTVGQVCATDKDEPDTMHTRLKYSIIGQVPPSPTLFSMHPTTGVITTTSSQLDRELIDKYQLKIKVQDMDGQYFGLQTTSTCIINIDDVNDHLPTFTRTSYVTSVEENTVDVEILRVTVEDKDLVNTANWRANYTILKGNENGNFKIVTDAKTNEGVLCVVKPLNYEEKQQMILQIGVVNEAPFSREASPRSAMSTATVTVNVEDQDEGPECNPPIQTVRMKENAEVGTTSNGYKAYDPETRSSSGIRYKKLTDPTGWVTIDENTGSIKVFRSLDREAETIKNGIYNITVLASDQGGRTCTGTLGIILQDVNDNSPFIPKKTVIICKPTMSSAEIVAVDPDEPIHGPPFDFSLESSTSEVQRMWRLKAINDTAARLSYQNDPPFGSYVVPITVRDRLGMSSVTSLDVTLCDCITENDCTHRVDPRIGGGGVQLGKWAILAILLGIALLFCILFTLVCGASGTSKQPKVIPDDLAQQNLIVSNTEAPGDDKVYSANGFTTQTVGASAQGVCGTVGSGIKNGGQETIEMVKGGHQTSESCRGAGHHHTLDSCRGGHTEVDNCRYTYSEWHSFTQPRLGEESIRGHTLIKN

SEQ ID NO: 5903 - protein, 901 aa, Homo sapiens
MEAARPSGSWNGALCRLLLLTLAILIFASDACKNVTLHVPSKLDAEKLVGRVNLKECFTAANLIHSSDPDFQILEDGSVYTTNTILLSSEKRSFTILLSNTENQEKKKIFVFLEHQTKVLKKRHTKEKVLRRAKRRWAPIPCSMLENSLGPFPLFLQQVQSDTAQNYTIYYSIRGPGVDQEPRNLFYVERDTGNLYCTRPVDREQYESFEIIAFATTPDGYTPELPLPLIIKIEDENDNYPIFTEETYTFTIFENCRVGTTVGQVCATDKDEPDTMHTRLKYSIIGQVPPSPTLFSMHPTTGVITTTSSQLDRELIDKYQLKIKVQDMDGQYFGLQTTSTCIINIDDVNDHLPTFTRTSYVTSVEENTVDVEILRVTVEDKDLVNTANWRANYTILKGNENGNFKIVTDAKTNEGVLCVVKPLNYEEKQQMILQIGVVNEAPFSREASPRSAMSTATVTVNVEDQDEGPECNPPIQTVRMKENAEVGTTSNGYKAYDPETRSSSGIRYKKLTDPTGWVTIDENTGSIKVFRSLDREAETIKNGIYNITVLASDQGGRTCTGTLGIILQDVNDNSPFIPKKTVIICKPTMSSAEIVAVDPDEPIHGPPFDFSLESSTSEVQRMWRLKAINDTAARLSYQNDPPFGSYVVPITVRDRLGMSSVTSLDVTLCDCITENDCTHRVDPRIGGGGVQLGKWAILAILLGIALLFCILFTLVCGASGTSKQPKVIPDDLAQQNLIVSNTEAPGDDKVYSANGFTTQTVGASAQGVCGTVGSGIKNGGQETIEMVKGGHQTSESCRGAGHHHTLDSCRGGHTEVDNCRYTYSEWHSFTQPRLGEKVYLCNQDENHKHAQDYVLTYNYEGRGSVAGSVGCCSERQEEDGLEFLDNLEPKFRTLAEACMKR

SEQ ID NO: 5904 - protein, 914 aa, Homo sapiens
MEAARPSGSWNGALCRLLLLTLAILIFASDACKNVTLHVPSKLDAEKLVGRVNLKECFTAANLIHSSDPDFQILEDGSVYTTNTILLSSEKRSFTILLSNTENQEKKKIFVFLEHQTKISLLVPWLCLVAEVLKKRHTKEKVLRRAKRRWAPIPCSMLENSLGPFPLFLQQVQSDTAQNYTIYYSIRGPGVDQEPRNLFYVERDTGNLYCTRPVDREQYESFEIIAFATTPDGYTPELPLPLIIKIEDENDNYPIFTEETYTFTIFENCRVGTTVGQVCATDKDEPDTMHTRLKYSIIGQVPPSPTLFSMHPTTGVITTTSSQLDRELIDKYQLKIKVQDMDGQYFGLQTTSTCIINIDDVNDHLPTFTRTSYVTSVEENTVDVEILRVTVEDKDLVNTANWRANYTILKGNENGNFKIVTDAKTNEGVLCVVKPLNYEEKQQMILQIGVVNEAPFSREASPRSAMSTATVTVNVEDQDEGPECNPPIQTVRMKENAEVGTTSNGYKAYDPETRSSSGIRYKKLTDPTGWVTIDENTGSIKVFRSLDREAETIKNGIYNITVLASDQGGRTCTGTLGIILQDVNDNSPFIPKKTVIICKPTMSSAEIVAVDPDEPIHGPPFDFSLESSTSEVQRMWRLKAINDTAARLSYQNDPPFGSYVVPITVRDRLGMSSVTSLDVTLCDCITENDCTHRVDPRIGGGGVQLGKWAILAILLGIALLFCILFTLVCGASGTSKQPKVIPDDLAQQNLIVSNTEAPGDDKVYSANGFTTQTVGASAQGVCGTVGSGIKNGGQETIEMVKGGHQTSESCRGAGHHHTLDSCRGGHTEVDNCRYTYSEWHSFTQPRLGEKVYLCNQDENHKHAQDYVLTYNYEGRGSVAGSVGCCSERQEEDGLEFLDNLEPKFRTLAEACMKR

SEQ ID NO: 5905 - protein, 667 aa, Homo sapiens
MKMITTQFLQKKLILLQFLKIAEWGTTVGQVCATDKDEPDTMHTRLKYSIIGQVPPSPTLFSMHPTTGVITTTSSQLDRELIDKYQLKIKVQDMDGQYFGLQTTSTCIINIDDVNDHLPTFTRTSYVTSVEENTVDVEILRVTVEDKDLVNTANWRANYTILKGNENGNFKIVTDAKTNEGVLCVVKPLNYEEKQQMILQIGVVNEAPFSREASPRSAMSTATVTVNVEDQDEGPECNPPIQTVRMKENAEVGTTSNGYKAYDPETRSSSGIRYKKLTDPTGWVTIDENTGSIKVFRSLDREAETIKNGIYNITVLASDQGGRTCTGTLGIILQDVNDNSPFIPKKTVIICKPTMSSAEIVAVDPDEPIHGPPFDFSLESSTSEVQRMWRLKAINDTAARLSYQNDPPFGSYVVPITVRDRLGMSSVTSLDVTLCDCITENDCTHRVDPRIGGGGVQLGKWAILAILLGIALLFCILFTLVCGASGTSKQPKVIPDDLAQQNLIVSNTEAPGDDKVYSANGFTTQTVGASAQGVCGTVGSGIKNGGQETIEMVKGGHQTSESCRGAGHHHTLDSCRGGHTEVDNCRYTYSEWHSFTQPRLGEKVYLCNQDENHKHAQDYVLTYNYEGRGSVAGSVGCCSERQEEDGLEFLDNLEPKFRTLAEACMKR

SEQ ID NO: 5906 - protein, 999 aa, Homo sapiens
MMGLFPRTTGALAIFVVVILVHGELRIETKGQYDEEEMTMQQAKRRQKREWVKFAKPCREGEDNSKRNPIAKITSDYQATQKITYRISGVGIDQPPFGIFVVDKNTGDINITAIVDREETPSFLITCRALNAQGLDVEKPLILTVKILDINDNPPVFSQQIFMGEIEENSASNSLVMILNATDADEPNHLNSKIAFKIVSQEPAGTPMFLLSRNTGEVRTLTNSLDREQASSYRLVVSGADKDGEGLSTQCECNIKVKDVNDNFPMFRDSQYSARIEENILSSELLRFQVTDLDEEYTDNWLAVYFFTSGNEGNWFEIQTDPRTNEGILKVVKALDYEQLQSVKLSIAVKNKAEFHQSVISRYRVQSTPVTIQVINVREGIAFRPASKTFTVQKGISSKKLVDYILGTYQAIDEDTNKAASNVKYVMGRNDGGYLMIDSKTAEIKFVKNMNRDSTFIVNKTITAEVLAIDEYTGKTSTGTVYVRVPDFNDNCPTAVLEKDAVCSSSPSVVVSARTLNNRYTGPYTFALEDQPVKLPAVWSITTLNATSALLRAQEQIPPGVYHISLVLTDSQNNRCEMPRSLTLEVCQCDNRGICGTSYPTTSPGTRYGRPHSGRLGPAAIGLLLLGLLLLLLAPLLLLTCDCGAGSTGGVTGGFIPVPDGSEGTIHQWGIEGAHPEDKEITNICVPPVTANGADFMESSEVCTNTYARGTAVEGTSGMEMTTKLGAATESGGAAGFATGTVSGAASGFGAATGVGICSSGQSGTMRTRHSTGGTNKDYADGAISMNFLDSYFSQKAFACAEEDDGQEANDCLLIYDNEGADATGSPVGSVGCCSFIADDLDDSFLDSLGPKFKKLAEISLGVDGEGKEVQPPSKDSGYGIESCGHPIEVQQTGFVKCQTLSGSQGASALSTSGSVQPAVSIPDPLQHGNYLVTETYSASGSLVQPSTAGFDPLLTQNVIVTERVICPISSVPGNLAGPTQLRGSHTMLCTEDPCSRLI

SEQ ID NO: 5907 - protein, 2871 aa, Homo sapiens
MSCNGGSHPRINTLGRMIRAESGPDLRYEVTSGGGGTSRMYYSRRGVITDQNSDGYCQTGTMSRHQNQNTIQELLQNCSDCLMRAELIVQPELKYGDGIQLTRSRELDECFAQANDQMEILDSLIREMRQMGQPCDAYQKRLLQLQEQMRALYKAISVPRVRRASSKGGGGYTCQSGSGWDEFTKHVTSECLGWMRQQRAEMDMVAWGVDLASVEQHINSHRGIHNSIGDYRWQLDKIKADLREKSAIYQLEEEYENLLKASFERMDHLRQLQNIIQATSREIMWINDCEEEELLYDWSDKNTNIAQKQEAFSIRMSQLEVKEKELNKLKQESDQLVLNQHPASDKIEAYMDTLQTQWSWILQITKCIDVHLKENAAYFQFFEEAQSTEAYLKGLQDSIRKKYPCDKNMPLQHLLEQIKELEKEREKILEYKRQVQNLVNKSKKIVQLKPRNPDYRSNKPIILRALCDYKQDQKIVHKGDECILKDNNERSKWYVTGPGGVDMLVPSVGLIIPPPNPLAVDLSCKIEQYYEAILALWNQLYINMKSLVSWHYCMIDIEKIRAMTIAKLKTMRQEDYMKTIADLELHYQEFIRNSQGSEMFGDDDKRKIQSQFTDAQKHYQTLVIQLPGYPQHQTVTTTEITHHGTCQDVNHNKVIETNRENDKQETWMLMELQKIRRQIEHCEGRMTLKNLPLADQGSSHHITVKINELKSVQNDSQAIAEVLNQLKDMLANFRGSEKYCYLQNEVFGLFQKLENINGVTDGYLNSLCTVRALLQAILQTEDMLKVYEARLTEEETVCLDLDKVEAYRCGLKKIKNDLNLKKSLLATMKTELQKAQQIHSQTSQQYPLYDLDLGKFGEKVTQLTDRWQRIDKQIDFRLWDLEKQIKQLRNYRDNYQAFCKWLYDAKRRQDSLESMKFGDSNTVMRFLNEQKNLHSEISGKRDKSEEVQKIAELCANSIKDYELQLASYTSGLETLLNIPIKRTMIQSPSGVILQEAADVHARYIELLTRSGDYYRFLSEMLKSLEDLKLKNTKIEVLEEELRLARDANSENCNKNKFLDQNLQKYQAECSQFKAKLASLEELKRQAELDGKSAKQNLDKCYGQIKELNEKITRLTYEIEDEKRRRKSVEDRFDQQKNDYDQLQKARQCEKENLGWQKLESEKAIKEKEYEIERLRVLLQEEGTRKREYENELAKVRNHYNEEMSNLRNKYETEINITKTTIKEISMQKEDDSKNLRNQLDRLSRENRDLKDEIVRLNDSILQATEQRRRAEENALQQKACGSEIMQKKQHLEIELKQVMQQRSEDNARHKQSLEEAAKTIQDKNKEIERLKAEFQEEAKRRWEYENELSKVRNNYDEEIISLKNQFETEINITKTTIHQLTMQKEEDTSGYRAQIDNLTRENRSLSEEIKRLKNTLTQTTENLRRVEEDIQQQKATGSEVSQRKQQLEVELRQVTQMRTEESVRYKQSLDDAAKTIQDKNKEIERLKQLIDKETNDRKCLEDENARLQRVQYDLQKANSSATETINKLKVQEQELTRLRIDYERVSQERTVKDQDITRFQNSLKELQLQKQKVEEELNRLKRTASEDSCKRKKLEEELEGMRRSLKEQAIKITNLTQQLEQASIVKKRSEDDLRQQRDVLDGHLREKQRTQEELRRLSSEVEALRRQLLQEQESVKQAHLRNEHFQKAIEDKSRSLNESKIEIERLQSLTENLTKEHLMLEEELRNLRLEYDDLRRGRSEADSDKNATILELRSQLQISNNRTLELQGLINDLQRERENLRQEIEKFQKQALEASNRIQESKNQCTQVVQERESLLVKIKVLEQDKARLQRLEDELNRAKSTLEAETRVKQRLECEKQQIQNDLNQWKTQYSRKEEAIRKIESEREKSEREKNSLRSEIERLQAEIKRIEERCRRKLEDSTRETQSQLETERSRYQREIDKLRQRPYGSHRETQTECEWTVDTSKLVFDGLRKKVTAMQLYECQLIDKTTLDKLLKGKKSVEEVASEIQPFLRGAGSIAGASASPKEKYSLVEAKRKKLISPESTVMLLEAQAATGGIIDPHRNEKLTVDSAIARDLIDFDDRQQIYAAEKAITGFDDPFSGKTVSVSEAIKKNLIDRETGMRLLEAQIASGGVVDPVNSVFLPKDVALARGLIDRDLYRSLNDPRDSQKNFVDPVTKKKVSYVQLKERCRIEPHTGLLLLSVQKRSMSFQGIRQPVTVTELVDSGILRPSTVNELESGQISYDEVGERIKDFLQGSSCIAGIYNETTKQKLGIYEAMKIGLVRPGTALELLEAQAATGFIVDPVSNLRLPVEEAYKRGLVGIEFKEKLLSAERAVTGYNDPETGNIISLFQAMNKELIEKGHGIRLLEAQIATGGIIDPKESHRLPVDIAYKRGYFNEELSEILSDPSDDTKGFFDPNTEENLTYLQLKERCIKDEETGLCLLPLKEKKKQVQTSQKNTLRKRRVVIVDPETNKEMSVQEAYKKGLIDYETFKELCEQECEWEEITITGSDGSTRVVLVDRKTGSQYDIQDAIDKGLVDRKFFDQYRSGSLSLTQFADMISLKNGVGTSSSMGSGVSDDVFSSSRHESVSKISTISSVRNLTIRSSSFSDTLEESSPIAAIFDTENLEKISITEGIERGIVDSITGQRLLEAQACTGGIIHPTTGQKLSLQDAVSQGVIDQDMATRLKPAQKAFIGFEGVKGKKKMSAAEAVKEKWLPYEAGQRFLEFQYLTGGLVDPEVHGRISTEEAIRKGFIDGRAAQRLQDTSSYAKILTCPKTKLKISYKDAINRSMVEDITGLRLLEAASVSSKGLPSPYNMSSAPGSRSGSRSGSRSGSRSGSRSGSRRGSFDATGNSSYSYSYSFSSSSIGH

SEQ ID NO: 5908 - protein, 953 aa, Homo sapiens
QQQRAEMDMVAWGVDLASVEQHINSHRGIHNSIGDYRWQLDKIKADLREKSAIYQLEEEYENLLKASFERMDHLRQLQNIIQATSREIMWINDCEEEELLYDWSDKNTNIAQKQEAFSIRMSQLEVKEKELNKLKQESDQLVLNQHPASDKIEAYMDTLQTQWSWILQITKCIDVHLKENAAYFQFFEEAQSTEAYLKGLQDSIRKKYPCDKNMPLQHLLEQIKELEKEREKILEYKRQVQNLVNKSKKIVQLKPRNPDYRSNKPIILRALCDYKQDQKIVHKGDECILKDNNERSKWYVTGPGGVDMLVPSVGLIIPPPNPLAVDLSCKIEQYYEAILALWNQLYINMKSLVSWHYCMIDIEKIRAMTIAKLKTMRQEDYMKTIADLELHYQEFIRNSQGSEMFGDDDKRKIQSQFTDAQKHYQTLVIQLPGYPQHQTVTTTEITHHGTCQDVNHNKVIETNRENDKQETWMLMELQKIRRQIEHCEGRMTLKNLPLADQGSSHHITVKINELKSVQNDSQAIAEVLNQLKDMLANFRGSEKYCYLQNEVFGLFQKLENINGVTDGYLNSLCTVRALLQAILQTEDMLKVYEARLTEEETVCLDLDKVEAYRCGLKKIKNDLNLKKSLLATMKTELQKAQQIHSQTSQQYPLYDLDLGKFGEKVTQLTDRWQRIDKQIDFRLWDLEKQIKQLRNYRDNYQAFCKWLYDAKRRQDSLESMKFGDSNTVMRFLNEQKNLHSEISGKRDKSEEVQKIAELCANSIKDYELQLASYTSGLETLLNIPIKRTMIQSPSGVILQEAADVHARYIELLTRSGDYYRFLSEMLKSLEDLKLKNTKIEVLEEELRLARDANSENCNKNKFLDQNLQKYQAECSQFKAKLASLEELKRQAELDGKSAKQNLDKCYGQIKELNEKITRLTYEIEDEKRRRKSVEDRFDQQKNDYDQLQKARQC

SEQ ID NO: 5909 - protein, 2272 aa, Homo sapiens
MSCNGGSHPRINTLGRMIRAESGPDLRYEVTSGGGGTSRMYYSRRGVITDQNSDGYCQTGTMSRHQNQNTIQELLQNCSDCLMRAELIVQPELKYGDGIQLTRSRELDECFAQANDQMEILDSLIREMRQMGQPCDAYQKRLLQLQEQMRALYKAISVPRVRRASSKGGGGYTCQSGSGWDEFTKHVTSECLGWMRQQRAEMDMVAWGVDLASVEQHINSHRGIHNSIGDYRWQLDKIKADLREKSAIYQLEEEYENLLKASFERMDHLRQLQNIIQATSREIMWINDCEEEELLYDWSDKNTNIAQKQEAFSIRMSQLEVKEKELNKLKQESDQLVLNQHPASDKIEAYMDTLQTQWSWILQITKCIDVHLKENAAYFQFFEEAQSTEAYLKGLQDSIRKKYPCDKNMPLQHLLEQIKELEKEREKILEYKRQVQNLVNKSKKIVQLKPRNPDYRSNKPIILRALCDYKQDQKIVHKGDECILKDNNERSKWYVTGPGGVDMLVPSVGLIIPPPNPLAVDLSCKIEQYYEAILALWNQLYINMKSLVSWHYCMIDIEKIRAMTIAKLKTMRQEDYMKTIADLELHYQEFIRNSQGSEMFGDDDKRKIQSQFTDAQKHYQTLVIQLPGYPQHQTVTTTEITHHGTCQDVNHNKVIETNRENDKQETWMLMELQKIRRQIEHCEGRMTLKNLPLADQGSSHHITVKINELKSVQNDSQAIAEVLNQLKDMLANFRGSEKYCYLQNEVFGLFQKLENINGVTDGYLNSLCTVRALLQAILQTEDMLKVYEARLTEEETVCLDLDKVEAYRCGLKKIKNDLNLKKSLLATMKTELQKAQQIHSQTSQQYPLYDLDLGKFGEKVTQLTDRWQRIDKQIDFRLWDLEKQIKQLRNYRDNYQAFCKWLYDAKRRQDSLESMKFGDSNTVMRFLNEQKNLHSEISGKRDKSEEVQKIAELCANSIKDYELQLASYTSGLETLLNIPIKRTMIQSPSGVILQEAADVHARYIELLTRSGDYYRFLSEMLKSLEDLKLKNTKIEVLEEELRLARDANSENCNKNKFLDQNLQKYQAECSQFKAKLASLEELKRQAELDGKSAKQNLDKCYGQIKELNEKITRLTYEIEDEKRRRKSVEDRFDQQKNDYDQLQKARQCEKENLGWQKLESEKAIKEKEYEIERLRVLLQEEGTRKREYENELAKASNRIQESKNQCTQVVQERESLLVKIKVLEQDKARLQRLEDELNRAKSTLEAETRVKQRLECEKQQIQNDLNQWKTQYSRKEEAIRKIESEREKSEREKNSLRSEIERLQAEIKRIEERCRRKLEDSTRETQSQLETERSRYQREIDKLRQRPYGSHRETQTECEWTVDTSKLVFDGLRKKVTAMQLYECQLIDKTTLDKLLKGKKSVEEVASEIQPFLRGAGSIAGASASPKEKYSLVEAKRKKLISPESTVMLLEAQAATGGIIDPHRNEKLTVDSAIARDLIDFDDRQQIYAAEKAITGFDDPFSGKTVSVSEAIKKNLIDRETGMRLLEAQIASGGVVDPVNSVFLPKDVALARGLIDRDLYRSLNDPRDSQKNFVDPVTKKKVSYVQLKERCRIEPHTGLLLLSVQKRSMSFQGIRQPVTVTELVDSGILRPSTVNELESGQISYDEVGERIKDFLQGSSCIAGIYNETTKQKLGIYEAMKIGLVRPGTALELLEAQAATGFIVDPVSNLRLPVEEAYKRGLVGIEFKEKLLSAERAVTGYNDPETGNIISLFQAMNKELIEKGHGIRLLEAQIATGGIIDPKESHRLPVDIAYKRGYFNEELSEILSDPSDDTKGFFDPNTEENLTYLQLKERCIKDEETGLCLLPLKEKKKQVQTSQKNTLRKRRVVIVDPETNKEMSVQEAYKKGLIDYETFKELCEQECEWEEITITGSDGSTRVVLVDRKTGSQYDIQDAIDKGLVDRKFFDQYRSGSLSLTQFADMISLKNGVGTSSSMGSGVSDDVFSSSRHESVSKISTISSVRNLTIRSSSFSDTLEESSPIAAIFDTENLEKISITEGIERGIVDSITGQRLLEAQACTGGIIHPTTGQKLSLQDAVSQGVIDQDMATRLKPAQKAFIGFEGVKGKKKMSAAEAVKEKWLPYEAGQRFLEFQYLTGGLVDPEVHGRISTEEAIRKGFIDGRAAQRLQDTSSYAKILTCPKTKLKISYKDAINRSMVEDITGLRLLEAASVSSKGLPSPYNMSSAPGSRSGSRSGSRSGSRSGSRSGSRRGSFDATGNSSYSYSYSFSSSSIGH

SEQ ID NO: 5910 - protein, 168 aa, Homo sapiens
MEPPNLYPVKLYVYDLSKGLARRLSPIMLGKQLEGIWHTSIVVHKDEFFFGSGGISSCPPGGTLLGPPDSVVDVGSTEVTEEIFLEYLSSLGESLFRGEAYNLFEHNCNTFSNEVAQFLTGRKIPSYITDLPSEVLSTPFGQALRPLLDSIQIQPPGGSSVGRPNGQS

SEQ ID NO: 5911 - protein, 186 aa, Homo sapiens
MKSDFYFQKSEPHSLSSEALMRRAVSLVTDSTSTFLSQTTYALIEAITEYTKAVYTLTSLYRQYTSLLGKMNSEEEDEVWQVIIGARAEMTSKHQEYLKLETTWMTAVGLSEMAAEAAYQTGADQASITARNHIQLVKLQVEEVHQLSRKAETKLAEAQIEELRQKTQEEGEERAESEQEAYLRED

SEQ ID NO: 5912 - protein, 195 aa, Homo sapiens
MAALKSWLSRSVTSFFRYRQCLCVPVVANFKKRCFSELIRPWHKTVTIGFGVTLCAVPIAQAVYTLTSLYRQYTSLLGKMNSEEEDEVWQVIIGARAEMTSKHQEYLKLETTWMTAVGLSEMAAEAAYQTGADQASITARNHIQLVKLQVEEVHQLSRKAETKLAEAQIEELRQKTQEEGEERAESEQEAYLRED

SEQ ID NO: 5913 - protein, 195 aa, Homo sapiens; identical to SEQ ID NO: 5912

SEQ ID NO: 5914 - protein, 239 aa, Homo sapiens
MAALKSWLSRSVTSFFRYRQCLCVPVVANFKKRCFSELIRPWHKTVTIGFGVTLCAVPIAQKSEPHSLSSEALMRRAVSLVTDSTSTFLSQTTYALIEAITEYTKAVYTLTSLYRQYTSLLGKMNSEEEDEVWQVIIGARAEMTSKHQEYLKLETTWMTAVGLSEMAAEAAYQTGADQASITARNHIQLVKLQVEEVHQLSRKAETKLAEAQIEELRQKTQEEGEERAESEQEAYLRED

SEQ ID NO: 5915 - protein, 186 aa, Homo sapiens; identical to SEQ ID NO: 5911

SEQ ID NO: 5916 - protein, 1273 aa, Homo sapiens
MEPPGGSLGPGRGTRDKKKGRSPDELPSAGGDGGKSKKFTLKRLMADELERFTSMRIKKEKEKPNSAHRNSSASYGDDPTAQSLQDVSDEQVLVLFEQMLLDMNLNEEKQQPLREKDIIIKREMVSQYLYTSKAGMSQKESSKSAMMYIQELRSGLRDMPLLSCLESLRVSLNNNPVSWVQTFGAEGLASLLDILKRLHDEKEETAGSYDSRNKHEIIRCLKAFMNNKFGIKTMLETEEGILLLVRAMDPAVPNMMIDAAKLLSALCILPQPEDMNERVLEAMTERAEMDEVERFQPLLDGLKSGTTIALKVGCLQLINALITPAEELDFRVHIRSELMRLGLHQVLQDLREIENEDMRVQLNVFDEQGEEDSYDLKGRLDDIRMEMDDFNEVFQILLNTVKDSKAEPHFLSILQHLLLVRNDYEARPQYYKLIEECISQIVLHKNGADPDFKCRHLQIEIEGLIDQMIDKTKVEKSEAKAAELEKKLDSELTARHELQVEMKKMESDFEQKLQDLQGEKDALHSEKQQIATEKQDLEAEVSQLTGEVAKLTKELEDAKKEMASLSAAAITVPPSVPSRAPVPPAPPLPGDSGTIIPPPPAPGDSTTPPPPPPPPPPPPPLPGGVCISSPPSLPGGTAISPPPPLSGDATIPPPPPLPEGVGIPSPSSLPGGTAIPPPPPLPGSARIPPPPPPLPGSAGIPPPPPPLPGEAGMPPPPPPLPGGPGIPPPPPFPGGPGIPPPPPGMGMPPPPPFGFGVPAAPVLPFGLTPKKLYKPEVQLRRPNWSKLVAEDLSQDCFWTKVKEDRFENNELFAKLTLTFSAQTKRTKKAKKDQEGGEEKKSVQKKKVKELKVLDSKTAQNLSIFLGSFRMPYQEIKNVILEVNEAVLTESMIQNLIKQMPEPEQLKMLSELKDEYDDLAESEQFGVVMGTVPRLRPRLNAILFKLQFSEQVENIKPEIVSVTAACEELRKSESFSNLLEITLLVGNYMNAGSRNAGAFGFNISFLCKLRDTKSTDQKMTLLHFLAELCENDYPDVLKFPDELAHVEKASRVSAENLQKNLDQMKKQISDVERDVQNFPAATDEKDKFVEKMTIFVKDAQEQYNKLRMMHSNMETLYKELGEYFLFDPKKLSVEEFFMDLHNFRNMFLQAVKENQKRRETEEKMRRAKLAKEKAEKERLEKQQKREQLIDMNAEGDETGVMDSLLEALQSGAAFRRKRGPRQANRKAGCAVTSLLASELTKDDAMAAVPAKVSKNSETFPTILEEAKELVGRAS

SEQ ID NO: 5917 - protein, 1269 aa, Homo sapiens
MEPPGGSLGPGRGTRDKKKGRSPDELPSAGGDGGKSKKFTLKRLMADELERFTSMRIKKEKEKPNSAHRNSSASYGDDPTAQSLQDVSDEQVLVLFEQMLLDMNLNEEKQQPLREKDIIIKREMVSQYLYTSKAGMSQKESSKSAMMYIQELRSGLRDMPLLSCLESLRVSLNNNPVSWVQTFGAEGLASLLDILKRLHDEKEETAGSYDSRNKHEIIRCLKAFMNNKFGIKTMLETEEGILLLVRAMDPAVPNMMIDAAKLLSALCILPQPEDMNERVLEAMTERAEMDEVERFQPLLDGLKSGTTIALKVGCLQLINALITPAEELDFRVHIRSELMRLGLHQVLQDLREIENEDMRVQLNVFDEQGEEDSYDLKGRLDDIRMEMDDFNEVFQILLNTVKDSKAEPHFLSILQHLLLVRNDYEARPQYYKLIEECISQIVLHKNGADPDFKCRHLQIEIEGLIDQMIDKTKVEKSEAKAAELEKKLDSELTARHELQVEMKKMESDFEQKLQDLQGEKDALHSEKQQIATEKQDLEAEVSQLTGEVAKLTKELEDAKKEMASLSAAAITVPPSVPSRAPVPPAPPLPGDSGTIIPPPPAPGDSTTPPPPPPPPPPPPPLPGGVCISSPPSLPGGTAISPPPPLSGDATIPPPPPLPEGVGIPSPSSLPGGTAIPPPPPLPGSARIPPPPPPLPGSAGIPPPPPPLPGEAGMPPPPPPLPGGPGIPPPPPFPGGPGIPPPPPGMGMPPPPPFGFGVPAAPVLPFGLTPKKLYKPEVQLRRPNWSKLVAEDLSQDCFWTKVKEDRFENNELFAKLTLTFSAQTKTKKDQEGGEEKKSVQKKKVKELKVLDSKTAQNLSIFLGSFRMPYQEIKNVILEVNEAVLTESMIQNLIKQMPEPEQLKMLSELKDEYDDLAESEQFGVVMGTVPRLRPRLNAILFKLQFSEQVENIKPEIVSVTAACEELRKSESFSNLLEITLLVGNYMNAGSRNAGAFGFNISFLCKLRDTKSTDQKMTLLHFLAELCENDYPDVLKFPDELAHVEKASRVSAENLQKNLDQMKKQISDVERDVQNFPAATDEKDKFVEKMTSFVKDAQEQYNKLRMMHSNMETLYKELGEYFLFDPKKLSVEEFFMDLHNFRNMFLQAVKENQKRRETEEKMRRAKLAKEKAEKERLEKQQKREQLIDMNAEGDETGVMDSLLEALQSGAAFRRKRGPRQANRKAGCAVTSLLASELTKDDAMAAVPAKVSKNSETFPTILEEAKELVGRAS

SEQ ID NO: 5918 - protein, 1263 aa, Homo sapiens
MEPPGGSLGPGRGTRDKKKGRSPDELPSAGGDGGKSKKFLERFTSMRIKKEKEKPNSAHRNSSASYGDDPTAQSLQDVSDEQVLVLFEQMLLDMNLNEEKQQPLREKDIIIKREMVSQYLYTSKAGMSQKESSKSAMMYIQELRSGLRDMPLLSCLESLRVSLNNNPVSWVQTFGAEGLASLLDILKRLHDEKEETAGSYDSRNKHEIIRCLKAFMNNKFGIKTMLETEEGILLLVRAMDPAVPNMMIDAAKLLSALCILPQPEDMNERVLEAMTERAEMDEVERFQPLLDGLKSGTTIALKVGCLQLINALITPAEELDFRVHIRSELMRLGLHQVLQDLREIENEDMRVQLNVFDEQGEEDSYDLKGRLDDIRMEMDDFNEVFQILLNTVKDSKAEPHFLSILQHLLLVRNDYEARPQYYKLIEECISQIVLHKNGADPDFKCRHLQIEIEGLIDQMIDKTKVEKSEAKAAELEKKLDSELTARHELQVEMKKMESDFEQKLQDLQGEKDALHSEKQQIATEKQDLEAEVSQLTGEVAKLTKELEDAKKEMASLSAAAITVPPSVPSRAPVPPAPPLPGDSGTIIPPPPAPGDSTTPPPPPPPPPPPPPLPGGVCISSPPSLPGGTAISPPPPLSGDATIPPPPPLPEGVGIPSPSSLPGGTAIPPPPPLPGSARIPPPPPPLPGSAGIPPPPPPLPGEAGMPPPPPPLPGGPGIPPPPPFPGGPGIPPPPPGMGMPPPPPFGFGVPAAPVLPFGLTPKKLYKPEVQLRRPNWSKLVAEDLSQDCFWTKVKEDRFENNELFAKLTLTFSAQTKTSKAKKDQEGGEEKKSVQKKKVKELKVLDSKTAQNLSIFLGSFRMPYQEIKNVILEVNEAVLTESMIQNLIKQMPEPEQLKMLSELKDEYDDLAESEQFGVVMGTVPRLRPRLNAILFKLQFSEQVENIKPEIVSVTAACEELRKSESFSNLLEITLLVGNYMNAGSRNAGAFGFNISFLCKLRDTKSTDQKMTLLHFLAELCENDYPDVLKFPDELAHVEKASRVSAENLQKNLDQMKKQISDVERDVQNFPAATDEKDKFVEKMTSFVKDAQEQYNKLRMMHSNMETLYKELGEYFLFDPKKLSVEEFFMDLHNFRNMFLQAVKENQKRRETEEKMRRAKLAKEKAEKERLEKQQKREQLIDMNAEGDETGVMDSLLEALQSGAAFRRKRGPRQANRKAGCAVTSLLASELTKDDAMAAVPAKVSKNSETFPTILEEAKELVGRAS

SEQ ID NO: 5919 - protein, 1272 aa, Homo sapiens
MEPPGGSLGPGRGTRDKKKGRSPDELPSAGGDGGKSKKFTLKRLMADELERFTSMRIKKEKEKPNSAHRNSSASYGDDPTAQSLQDVSDEQVLVLFEQMLLDMNLNEEKQQPLREKDIIIKREMVSQYLYTSKAGMSQKESSKSAMMYIQELRSGLRDMPLLSCLESLRVSLNNNPVSWVQTFGAEGLASLLDILKRLHDEKEETAGSYDSRNKHEIIRCLKAFMNNKFGIKTMLETEEGILLLVRAMDPAVPNMMIDAAKLLSALCILPQPEDMNERVLEAMTERAEMDEVERFQPLLDGLKSGTTIALKVGCLQLINALITPAEELDFRVHIRSELMRLGLHQVLQDLREIENEDMRVQLNVFDEQGEEDSYDLKGRLDDIRMEMDDFNEVFQILLNTVKDSKAEPHFLSILQHLLLVRNDYEARPQYYKLIEECISQIVLHKNGADPDFKCRHLQIEIEGLIDQMIDKTKVEKSEAKAAELEKKLDSELTARHELQVEMKKMESDFEQKLQDLQGEKDALHSEKQQIATEKQDLEAEVSQLTGEVAKLTKELEDAKKEMASLSAAAITVPPSVPSRAPVPPAPPLPGDSGTIIPPPPAPGDSTTPPPPPPPPPPPPPLPGGVCISSPPSLPGGTAISPPPPLSGDATIPPPPPLPEGVGIPSPSSLPGGTAIPPPPPLPGSARIPPPPPPLPGSAGIPPPPPPLPGEAGMPPPPPPLPGGPGIPPPPPFPGGPGIPPPPPGMGMPPPPPFGFGVPAAPVLPFGLTPKKLYKPEVQLRRPNWSKLVAEDLSQDCFWTKVKEDRFENNELFAKLTLTFSAQTKTSKAKKDQEGGEEKKSVQKKKVKELKVLDSKTAQNLSIFLGSFRMPYQEIKNVILEVNEAVLTESMIQNLIKQMPEPEQLKMLSELKDEYDDLAESEQFGVVMGTVPRLRPRLNAILFKLQFSEQVENIKPEIVSVTAACEELRKSESFSNLLEITLLVGNYMNAGSRNAGAFGFNISFLCKLRDTKSTDQKMTLLHFLAELCENDYPDVLKFPDELAHVEKASRVSAENLQKNLDQMKKQISDVERDVQNFPAATDEKDKFVEKMTSFVKDAQEQYNKLRMMHSNMETLYKELGEYFLFDPKKLSVEEFFMDLHNFRNMFLQAVKENQKRRETEEKMRRAKLAKEKAEKERLEKQQKREQLIDMNAEGDETGVMDSLLEALQSGAAFRRKRGPRQANRKAGCAVTSLLASELTKDDAMAAVPAKVSKNSETFPTILEEAKELVGRAS

SEQ ID NO: 5920 - protein, 1248 aa, Homo sapiens [sequence omitted]

SEQ ID NO: 5921 - protein, 1264 aa, Homo sapiens
MEPPGGSLGPGRGTRDKKKGRSPDELPSAGGDGGKSKKFLERFTSMRIKKEKEKPNSAHRNSSASYGDDPTAQSLQDVSDEQVLVLFEQMLLDMNLNEEKQQPLREKDIIIKREMVSQYLYTSKAGMSQKESSKSAMMYIQELRSGLRDMPLLSCLESLRVSLNNNPVSWVQTFGAEGLASLLDILKRLHDEKEETAGSYDSRNKHEIIRCLKAFMNNKFGIKTMLETEEGILLLVRAMDPAVPNMMIDAAKLLSALCILPQPEDMNERVLEAMTERAEMDEVERFQPLLDGLKSGTTIALKVGCLQLINALITPAEELDFRVHIRSELMRLGLHQVLQDLREIENEDMRVQLNVFDEQGEEDSYDLKGRLDDIRMEMDDFNEVFQILLNTVKDSKAEPHFLSILQHLLLVRNDYEARPQYYKLIEECISQIVLHKNGADPDFKCRHLQIEIEGLIDQMIDKTKVEKSEAKAAELEKKLDSELTARHELQVEMKKMESDFEQKLQDLQGEKDALHSEKQQIATEKQDLEAEVSQLTGEVAKLTKELEDAKKEMASLSAAAITVPPSVPSRAPVPPAPPLPGDSGTIIPPPPAPGDSTTPPPPPPPPPPPPPLPGGVCISSPPSLPGGTAISPPPPLSGDATIPPPPPLPEGVGIPSPSSLPGGTAIPPPPPLPGSARIPPPPPPLPGSAGIPPPPPPLPGEAGMPPPPPPLPGGPGIPPPPPFPGGPGIPPPPPGMGMPPPPPFGFGVPAAPVLPFGLTPKKLYKPEVQLRRPNWSKLVAEDLSQDCFWTKVKEDRFENNELFAKLTLTFSAQTKRTKKAKKDQEGGEEKKSVQKKKVKELKVLDSKTAQNLSIFLGSFRMPYQEIKNVILEVNEAVLTESMIQNLIKQMPEPEQLKMLSELKDEYDDLAESEQFGVVMGTVPRLRPRLNAILFKLQFSEQVENIKPEIVSVTAACEELRKSESFSNLLEITLLVGNYMNAGSRNAGAFGFNISFLCKLRDTKSTDQKMTLLHFLAELCENDYPDVLKFPDELAHVEKASRVSAENLQKNLDQMKKQISDVERDVQNFPAATDEKDKFVEKMTIFVKDAQEQYNKLRMMHSNMETLYKELGEYFLFDPKKLSVEEFFMDLHNFRNMFLQAVKENQKRRETEEKMRRAKLAKEKAEKERLEKQQKREQLIDMNAEGDETGVMDSLLEALQSGAAFRRKRGPRQANRKAGCAVTSLLASELTKDDAMAAVPAKVSKNSETFPTILEEAKELVGRAS

SEQ ID NO: 5922 - protein, 284 aa, Homo sapiens
MASLSAAAITVPPSVPSRAPVPPAPPLPGDSGTIIPPPPAPGDSTTPPPPPPPPPPPPPLPGGVCISSPPSLPGGTAISPPPPLSGDATIPPPPPLPEGVGIPSPSSLPGGTAIPPPPPLPGSARIPPPPPPLPGSAGIPPPPPPLPGEAGMPPPPPPLPGGPGIPPPPPFPGGPGIPPPPPGMGMPPPPPFGFGVPAAPVLPFGLTPKKLYKPEVQLRRPNWSKLVAEDLSQDCFWTKVKEDRFENNELFAKLTLTFSAQTKSEKAKKDQEGGEEKKSVQKKK

SEQ ID NO: 5923 - protein, 170 aa, Homo sapiens
MYCQFASFQYTCQPCRGQRMLCTRDSECCGDQLCVWGHCTKMATRGSNGTICDNQRDCQPGLCCAFQRGLLFPVCTPLPVEGELCHDPASRLLDLITWELEPDGALDRCPCASGLLCQPHSHSLVYVCKPTFVGSRDQDGEILLPREVPDEYLAASWRRCARSWRTWRGA

SEQ ID NO: 5924 - protein, 350 aa, Homo sapiens
MQRLGATLLCLLLAAAVPTAPAPAPTATSAPVKPGPALSYPQEEATLNEMFREVEELMEDTQHKLRSAVEEMEAEEAAAKASSEVNLANLPPSYHNETNTDTKVGNNTIHVHREIHKITNNQTGQMVFSETVITSVGDEEGRRSHECIIDEDCGPSMYCQFASFQYTCQPCRGQRMLCTRDSECCGDQLCVWGHCTKMATRGSNGTICDNQRDCQPGLCCAFQRGLLFPVCTPLPVEGELCHDPASRLLDLITWELEPDGALDRCPCASGLLCQPHSHSLVYVCKPTFVGSRDQDGEILLPREVPDEYEVGSFMEEVRQELEDLERSLTEEMALREPAAAAAALLGGEEI

SEQ ID NO: 5925 - protein, 293 aa, Homo sapiens
MEDTQHKLRSAVEEMEAEEAAAKASSEVNLANLPPSYHNETNTDTKVGNNTIHVHREIHKITNNQTGQMVFSETVITSVGDEEGRRSHECIIDEDCGPSMYCQFASFQYTCQPCRGQRMLCTRDSECCGDQLCVWGHCTKMATRGSNGTICDNQRDCQPGLCCAFQRGLLFPVCTPLPVEGELCHDPASRLLDLITWELEPDGALDRCPCASGLLCQPHSHSLVYVCKPTFVGSRDQDGEILLPREVPDEYEVGSFMEEVRQELEDLERSLTEEMALREPAAAAAALLGGEEI

SEQ ID NO: 5926 - protein, 350 aa, Homo sapiens; identical to SEQ ID NO: 5924

SEQ ID NO: 5927 - protein, 322 aa, Homo sapiens
MQRLGATLLCLLLAAAVPTAPAPAPTATSAPVKPGPALSYPQEEATLNEMFREVEELMEDTQHKLRSAVEEMEAEEAAAKASSEVNLANLPPSYHNETNTDTKVGNNTIHVHREIHKECIIDEDCGPSMYCQFASFQYTCQPCRGQRMLCTRDSECCGDQLCVWGHCTKMATRGSNGTICDNQRDCQPGLCCAFQRGLLFPVCTPLPVEGELCHDPASRLLDLITWELEPDGALDRCPCASGLLCQPHSHSLVYVCKPTFVGSRDQDGEILLPREVPDEYEVGSFMEEVRQELEDLERSLTEEMALREPAAAAAALLGGEEI

SEQ ID NO: 5928 - protein, 235 aa, Homo sapiens
MQRLGATLLCLLLAAAVPTAPAPAPTATSAPVKPGPALSYPQEEATLNEMFREVEELMEDTQHKLRSAVEEMEAEEAAAKASSEVNLANLPPSYHNETNTDTKVGNNTIHVHREIHKITNNQTGQMVFSETVITSVGDEEGRRSHECIIDEDCGPSMYCQFASFQYTCQPCRGQRMLCTRDSECCGDQLCVWGHCTKMATRGSNGTICDNQRDCQPGLCCAFQRGLLFPVCTPLP

SEQ ID NO: 5929 - protein, 766 aa, Homo sapiens
MKTPWKVLLGLLGAAALVTIITVPVVLLNKGTDDATADSRKTYTLTDYLKNTYRLKLYSLRWISDHEYLYKQENNILVFNAEYGNSSVFLENSTFDEFGHSINDYSISPDGQFILLEYNYVKQWRHSYTASYDIYDLNKRQLITEERIPNNTQWVTWSPVGHKLAYVWNNDIYVKIEPNLPSYRITWTGKEDIIYNGITDWVYEEEVFSAYSALWWSPNGTFLAYAQFNDTEVPLIEYSFYSDESLQYPKTVRVPYPKAGAVNPTVKFFVVNTDSLSSVTNATSIQITAPASMLIGDHYLCDVTWATQERISLQWLRRIQNYSVMDICDYDESSGRWNCLVARQHIEMSTTGWVGRFRPSEPHFTLDGNSFYKIISNEEGYRHICYFQIDKKDCTFITKGTWEVIGIEALTSDYLYYISNEYKGMPGGRNLYKIQLSDYTKVTCLSCELNPERCQYYSVSFSKEAKYYQLRCSGPGLPLYTLHSSVNDKGLRVLEDNSALDKMLQNVQMPSKKLDFIILNETKFWYQMILPPHFDKSKKYPLLLDVYAGPCSQKADTVFRLNWATYLASTENIIVASFDGRGSGYQGDKIMHAINRRLGTFEVEDQIEAARQFSKMGFVDNKRIAIWGWSYGGYVTSMVLGSGSGVFKCGIAVAPVSRWEYYDSVYTERYMGLPTPEDNLDHYRNSTVMSRAENFKQVEYLLIHGTADDNVHFQQSAQISKALVDVGVDFQAMWYTDEDHGIASSTAHQHIYTHMSHFIKQCFSLP

SEQ ID NO: 5930 - protein, 340 aa, Homo sapiens
MKEDQVVAEEPGFQDEEESLFQDIDLLQKHGINVADIKKLKSVGICTIKGIQMTTRRALCNVKGLSEAKVDKIKEAANKLIEPGFLTAFEYSEKRKMVFHITTGSQEFDKLLGGGIESMAITEAFGEFRTGKTQLSHTLCVTAQLPGAGGYPGGKIIFIDTENTFRPDRLRDIADRFNVDHDAVLDNVLYARAYTSEHQMELLDYVAAKFHEEAGIFKLLIIDSIMALFRVDFSGRGELAERQQKLAQMLSRLQKISEEYNVAVFVTNQMTADPGATMTFQADPKKPIGGHILAHASTTRISLRKGRGELRIAKIYDSPEMPENEATFAITAGGIGDAKE

SEQ ID NO: 5931 - protein, 165 aa, Homo sapiens
MKEDQVVAEEPGFQDEEESLFQDIDLLQKHGINVADIKKLKSVGICTIKGIQMTTRRALCNVKGLSEAKVDKIKEAANKLIEPGFLTAFEYSEKRKMVFHITTGSQEFDKLLGGGIESMAITEAFGEFRTGKTQLSHTLCVTAQLPGAGGYPGGKIIFIDTENTL

SEQ ID NO: 5932 - protein, 139 aa, Homo sapiens
MKEDQVVAEEPGFQDEEESLFQDIDLLQKHGINVADIKKLKSVGICTIKGIQMTTRRALCNVKGLSEAKVDKIKEAANKLIEPGFLTAFEYSEKRKMVFHITTGSQEFDKLLGGGIESMAITEAFGEFRTGKTQLSHTL

SEQ ID NO: 5933 - protein, 285 aa, Homo sapiens
MKEDQVVAEEPGFQDEEESLFQDIDLLQKHGINVADIKKLKSVGICTIKGIQMTTRRALCNVKGLSEAKVDKIKEAANKLIEPGFLTAFEYSEKRKMVFHITTGSQEFDKLLGGGIESMAITEAFGEFRTGKTQLSHTLCGEHQMELLDYVAAKFHEEAGIFKLLIIDSIMALFRVDFSGRGELAERQQKLAQMLSRLQKISEEYNVAVFVTNQMTADPGATMTFQADPKKPIGGHILAHASTTRISLRKGRGELRIAKIYDSPEMPENEATFAITAGGIGDAKE

SEQ ID NO: 5934 - protein, 203 aa, Homo sapiens
MKEDQVVAEEPGFQDEEESLFQDIDLLQKHGINVADIKKLKSVGICTIKGIQMTTRRALCNVKGLSEAKVDKIKEAANKLIEPGFLTAFEYSEKRKMVFHITTGSQEFDKLLGGGIESMAITEAFGEFRTGKTQLSHTLCGEHQMELLDYVAAKFHEEAGIFKLLIIDSIMALFRVDFSGRGELAERQQKLAQMLSRLQKISE

SEQ ID NO: 5935 - protein, 532 aa, Homo sapiens
MNGVLIPHTPIAVDFWSLRRAGTARLFFLSHMHSDHTVGLSSTWARPLYCSPITAHLLHRHLQVSKQWIQALEVGESHVLPLDEIGQETMTVTLLDANHCPGSVMFLFEGYFGTILYTGDFRYTPSMLKEPALTLGKQIHTLYLDNTNCNPALVLPSRQEAAHQIVQLIRKHPQHNIKIGLYSLGKESLLEQLALEFQTWVVLSPRRLELVQLLGLADVFTVEEKAGRIHAVDHMEICHSNMLRWNQTHPTIAILPTSRKIHSSHPDIHVIPYSDHSSYSELRAFVAALKPCQVVPIVSRRPCGGFQDSLSPRISVPLIPDSVQQYMSSSSRKPSLLWLLERRLKRPRTQGVVFESPEESADQSQADRDSKKAKKEKLSPWPADLEKQPSHHPLRIKKQLFPDLYSKEWNKAVPFCESQKRVTMLTAPLGFSVHLRSTDEEFISQKTREEIGLGSPLVPMGDDDGGPEATGNQSAWMGHGSPLSHSSKGTPLLATEFRGLALKYLLTPVNFFQAGYSSRRFDQQVEKYHKPC

SEQ ID NO: 5936 - protein, 577 aa, Homo sapiens
MKHQERFLFQGNNGTVLYTGDFRLAQGEAARMELLHSGGRVKDIQSVYLDTTFCDPRFYQIPSREECLSGVLELVRSWITRSPYHVVWLNCKAAYGYEYLFTNLSEELGVQVHVNKLDMFRNMPEILHHLTTDRNTQIHACRHPKAEEYFQWSKLPCGITSRNRIPLHIISIKPSTMWFGERSRKTNVIVRTGESSYRACFSFHSSYSEIKDFLSYLCPVNAYPNVIPVGTTMDKVVEILKPLCRSSQSTEPKYKPLGKLKRARTVHRDSEEEDDYLFDDPLPIPLRHKVPYPETFHPEVFSMTAVSEKQPEKLRQTPGCCRAECMQSSRFTNFVDCEESNSESEEEVGIPASLQGDLGSVLHLQKADGDVPQWEVFFKRNDEITDESLENFPSSTVAGGSQSPKLFSDSDGESTHISSQNSSQSTHITEQGSQGWDSQSDTVLLSSQERNSGDITSLDKADYRPTIKENIPASLMEQNVICPKDTYSDLKSRDKDVTIVPSTGEPTTLSSETHIPEEKSLLNLSTNADSQSSSDFEVPSTPEAELPKREHLQYLYEKLATGESIAVKKRKCSLLDT

SEQ ID NO: 5937 - protein, 84 aa, Homo sapiens
MFLFQGNNGTVLYTGDFRLAQGEAARMELLHSGGRVKDIQSVYLDTTFCDPRFYQIPSREECLSGVLELVRSWITRSPYHVVWL

SEQ ID NO: 5938 - protein, 345 aa, Homo sapiens
MDKVVEILKPLCRSSQSTEPKYKPLGKLKRARTVHRDSEEEDDYLFDDPLPIPLRHKVPYPETFHPEVFSMTAVSEKQPEKLRQTPGCCRAECMQSSRFTNFVDCEESNSESEEEVGIPASLQGDLGSVLHLQKADGDVPQWEVFFKRNDEITDESLENFPSSTVAGGSQSPKLFSDSDGESTHISSQNSSQSTHITEQGSQGWDSQSDTVLLSSQERNSGDITSLDKADYRPTIKENIPASLMEQNVICPKDTYSDLKSRDKDVTIVPSTGEPTTLSSETHIPEEKSLLNLSTNADSQSSSDFEVPSTPEAELPKREHLQYLYEKLATGESIAVKKRKCSLLDT

SEQ ID NO: 5939 - protein, 577 aa, Homo sapiens; identical to SEQ ID NO: 5936

SEQ ID NO: 5940 - protein, 577 aa, Homo sapiens; identical to SEQ ID NO: 5936

SEQ ID NO: 5941 - protein, 572 aa, Homo sapiens
MFLFQGNNGTVLYTGDFRLAQGEAARMELLHSGGRVKDIQSVYLDTTFCDPRFYQIPSREECLSGVLELVRSWITRSPYHVVWLNCKAAYGYEYLFTNLSEELGVQVHVNKLDMFRNMPEILHHLTTDRNTQIHACRHPKAEEYFQWSKLPCGITSRNRIPLHIISIKPSTMWFGERSRKTNVIVRTGESSYRACFSFHSSYSEIKDFLSYLCPVNAYPNVIPVGTTMDKVVEILKPLCRSSQSTEPKYKPLGKLKRARTVHRDSEEEDDYLFDDPLPIPLRHKVPYPETFHPEVFSMTAVSEKQPEKLRQTPGCCRAECMQSSRFTNFVDCEESNSESEEEVGIPASLQGDLGSVLHLQKADGDVPQWEVFFKRNDEITDESLENFPSSTVAGGSQSPKLFSDSDGESTHISSQNSSQSTHITEQGSQGWDSQSDTVLLSSQERNSGDITSLDKADYRPTIKENIPASLMEQNVICPKDTYSDLKSRDKDVTIVPSTGEPTTLSSETHIPEEKSLLNLSTNADSQSSSDFEVPSTPEAELPKREHLQYLYEKLATGESIAVKKRKCSLLDT

SEQ ID NO: 5942 - protein, 572 aa, Homo sapiens; identical to SEQ ID NO: 5941

SEQ ID NO: 5943 - protein, 572 aa, Homo sapiens; identical to SEQ ID NO: 5941

SEQ ID NO: 5944 - protein, 692 aa, Homo sapiens
MSSFEGQMAEYPTISIDRFDRENLRARAYFLSHCHKDHMKGLRAPTLKRRLECSLKVYLYCSPVTKELLLTSPKYRFWKKRIISIEIETPTQISLVDEASGEKEEIVVTLLPAGHCPGSVMFLFQGNNGTVLYTGDFRLAQGEAARMELLHSGGRVKDIQSVYLDTTFCDPRFYQIPSREECLSGVLELVRSWITRSPYHVVWLNCKAAYGYEYLFTNLSEELGVQVHVNKLDMFRNMPEILHHLTTDRNTQIHACRHPKAEEYFQWSKLPCGITSRNRIPLHIISIKPSTMWFGERSRKTNVIVRTGESSYRACFSFHSSYSEIKDFLSYLCPVNAYPNVIPVGTTMDKVVEILKPLCRSSQSTEPKYKPLGKLKRARTVHRDSEEEDDYLFDDPLPIPLRHKVPYPETFHPEVFSMTAVSEKQPEKLRQTPGCCRAECMQSSRFTNFVDCEESNSESEEEVGIPASLQGDLGSVLHLQKADGDVPQWEVFFKRNDEITDESLENFPSSTVAGGSQSPKLFSDSDGESTHISSQNSSQSTHITEQGSQGWDSQSDTVLLSSQERNSGDITSLDKADYRPTIKENIPASLMEQNVICPKDTYSDLKSRDKDVTIVPSTGEPTTLSSETHIPEEKSLLNLSTNADSQSSSDFEVPSTPEAELPKREHLQYLYEKLATGESIAVKKRKCSLLDT

SEQ ID NO: 5945 - protein, 434 aa, Homo sapiens
MSSFEGQMAEYPTISIDRFDRENLRARAYFLSHCHKDHMKGLRAPTLKRRLECSLKVYLYCSPVTKELLLTSPKYRFWKKRIISIEIETPTQISLVDEASGEKEEIVVTLLPAGHCPGSVMFLFQGNNGTVLYTGDFRLAQGEAARMELLHSGGRVKDIQSVYLDTTFCDPRFYQIPSREECLSGVLELVRSWITRSPYHVVWLNCKAAYGYEYLFTNLSEELGVQVHVNKLDMFRNMPEILHHLTTDRNTQIHACRHPKAEEYFQWSKLPCGITSRNRIPLHIISIKPSTMWFGERSRKTNVIVRTGESSYRACFSFHSSYSEIKDFLSYLCPVNAYPNVIPVGTTMDKVVEILKPLCRSSQSTEPKYKPLGKLKRARTVHRDSGSHSVTQARMRWCHHDSLYPLTPGIKRSSCLSLLTSWITGAYRHAQLMI

SEQ ID NO: 5946 - protein, 572 aa, Homo sapiens; identical to SEQ ID NO: 5941

SEQ ID NO: 5947 - protein, 117 aa, Homo sapiens
MELLHSGGRVKDIQSVYLDTTFCDPRFYQIPSREECLSGVLELVRSWITRSPYHVVWLNCKAAYGYEYLFTNLSEELGVQVHVNKLDMFRNMPEILHHLTTDRNTQIHACRHPKAEE

SEQ ID NO: 5948 - protein, 572 aa, Homo sapiens; identical to SEQ ID NO: 5941

SEQ ID NO: 5949 - protein, 57 aa, Homo sapiens
MKHQERFLFQGNNGTVLYTGDFRLAQGEAARMELLHSGGRVKDIQSVYLDTTFCDPR

SEQ ID NO: 5950 - protein, 268 aa, Homo sapiens
MEVTGDAGVPESGEIRTLKPCLLRRNYSREQHGVAASCLEDLRSKACDILAIDKSLTPVTLVLAEDGTIVDDDDYFLCLPSNTKFVALASNEKWAYNNSDGGTAWISQESFDVDETDSGAGLKWKNVARQLKEDLSSIILLSEEDLQMLVDAPCSDLAQELRQSCATVQRLQHTLQQVLDQREEVRQSKQLLQLYLQALEKEGSLLSKQEESKAAFGEEVDAVDTGISRETSSDVALASHILTALREKQAPELSLSSQDLEVGGNQGH

SEQ ID NO: 5951 - protein, 331 aa, Homo sapiens
MEVTGDAGVPESGEIRTLKPCLLRRNYSREQHGVAASCLEDLRSKACDILAIDKSLTPVTLVLAEDGTIVDDDDYFLCLPSNTKFVALASNEKWAYNNSDGGTAWISQESFDVDETDSGAGLKWKNVARQLKEDLSSIILLSEEDLQMLVDAPCSDLAQELRQSCATVQRLQHTLQQVLDQREEVRQSKQLLQLYLQALEKEGSLLSKQEESKAAFGEEVDAVDTGISRETSSDVALASHILTALREKQAPELSLSSQDLELVTKEDPKALAVALNWDIKKTETVQEACERELALRLQQTQSLHSLRSISASKASPPGDLQNPKRARQDPT

SEQ ID NO: 5952 - protein, 169 aa, Homo sapiens
MAAESLPFSFGTLSSWELEAWYEDLQEVLSSDENGGTYVSPPGNEEEESKIFTTLDPASLAWLTEEEPEPAEVTSTSQSPHSPDSSQSSLAQEEEEEDQGRTRKRKQSGHSPARAGKQRMKEKEQENERKVAQLAEENERLKQEIERLTREVEATRRALIDRMVNLHQA

SEQ ID NO: 5953 - protein, 169 aa, Homo sapiens; identical to SEQ ID NO: 5952

SEQ ID NO: 5954 - protein, 145 aa, Homo sapiens
MELVPATPHYPADVLFQTDPTAEMAAESLPFSFGTLSSWELEAWYEDLQEVLSSDENGGTYVSPPGNEEEESKIFTTLDPASLAWLTEEEPEPAEVTSTSQSPHSPDSSQSSLAQEEEEEDQGRTRKRKQSGHSPARAGKQRMKE

SEQ ID NO: 5955 - protein, 192 aa, Homo sapiens
MELVPATPHYPADVLFQTDPTAEMAAESLPFSFGTLSSWELEAWYEDLQEVLSSDENGGTYVSPPGNEEEESKIFTTLDPASLAWLTEEEPEPAEVTSTSQSPHSPDSSQSSLAQEEEEEDQGRTRKRKQSGHSPARAGKQRMKEKEQENERKVAQLAEENERLKQEIERLTREVEATRRALIDRMVNLHQA

SEQ ID NO: 5956 - protein, 192 aa, Homo sapiens; identical to SEQ ID NO: 5955

SEQ ID NO: 5957 - protein, 287 aa, Homo sapiens
MASLEVSRSPRRSRRELEVRSPRQNKYSVLLPTYNERENLPLIVWLLVKSFSESGINYEIIIIDDGSPDGTRDVAEQLEKIYGSDRILLRPREKKLGLGTAYIHGMKHATGNYIIIMDADLSHHPKFIPEFIRKQKEGNFDIVSGTRYKGNGGVYGWDLKRKIISDGVLPCCPGWSLLGSSDPAILASWDYSRGANFLTQILLRPGASDLTGSFRLYRKEVLEKLIEKCVSKGYVFQMEMIVRARQLNYTIGEVPISFVDRVYGESKLGGNEIVSFLKGLLTLFATT

SEQ ID NO: 5958 - protein, 255 aa, Homo sapiens
MASLEVSRSPRRSRRELEVRSPRQNKYSVLLPTYNERENLPLIVWLLVKSFSESGINYEIIIIDDGSPDGTRDVAEQLEKIYGSDRILLRPREKKLGLGTAYIHGMKHATGNYIIIMDADLSHHPKFIPEFISDGVLPCCPGWSLLGSSDPAILASWDYSRGANFLTQILLRPGASDLTGSFRLYRKEVLEKLIEKCVSKGYVFQMEMIVRARQLNYTIGEVPISFVDRVYGESKLGGNEIVSFLKGLLTLFATT

SEQ ID NO: 5959 - protein, 295 aa, Homo sapiens
  VARIANT 1: note = MOD_RES - Any amino acid
XASLEVSRSPRRSRRELEVRSPRQNKYSVLLPTYNERENLPLIVWLLVKSFSESGINYEIIIIDDGSPDGTRDVAEQLEKIYGSDRILLRPREKKLGLGTAYIHGMKHATGNYIIIMDADLSHHPKFIPEFIRKQKEGNFDIVSGTRYKGNGGVYGWDLKRKIISDGVLPCCPGWSLLGSSDPAILASWDYRCEPPRLASRGANFLTQILLRPGASDLTGSFRLYRKEVLEKLIEKCVSKGYVFQMEMIVRARQLNYTIGEVPISFVDRVYGESKLGGNEIVSFLKGLLTLFATT

SEQ ID NO: 5960 - protein, 260 aa, Homo sapiens
MASLEVSRSPRRSRRELEVRSPRQNKYSVLLPTYNERENLPLIVWLLVKSFSESGINYEIIIIDDGSPDGTRDVAEQLEKIYGSDRILLRPREKKLGLGTAYIHGMKHATGNYIIIMDADLSHHPKFIPEFIRKQKEGNFDIVSGTRYKGNGGVYGWDLKRKIISRGANFLTQILLRPGASDLTGSFRLYRKEVLEKLIEKCVSKGYVFQMEMIVRARQLNYTIGEVPISFVDRVYGESKLGGNEIVSFLKGLLTLFATT

SEQ ID NO: 5961 - protein, 221 aa, Homo sapiens
MASLEVSRSPRRSRRELEVRSPRQNKYSVLLPTYNERENLPLIVWLLVKSFSESGINYEIIIIDDGSPDGTRDVAEQLEKIYGSDRILLRPREKKLGLGTAYIHGMKHATGNYIIIMDADLSHHPKFIPEFISDGVLPCCPGWSLLGSSDPAILASWDYSRGANFLTQILLRPGASDLTGSFRLYRKEVLEKLIEKCVSKGYVFQMEMIVRARQLNYTIGE

SEQ ID NO: 5962 - protein, 295 aa, Homo sapiens
MASLEVSRSPRRSRRELEVRSPRQNKYSVLLPTYNERENLPLIVWLLVKSFSESGINYEIIIIDDGSPDGTRDVAEQLEKIYGSDRILLRPREKKLGLGTAYIHGMKHATGNYIIIMDADLSHHPKFIPEFIRKQKEGNFDIVSGTRYKGNGGVYGWDLKRKIISDGVLPCCPGWSLLGSSDPAILASWDYRCEPPRLASRGANFLTQILLRPGASDLTGSFRLYRKEVLEKLIEKCVSKGYVFQMEMIVRARQLNYTIGEVPISFVDRVYGESKLGGNEIVSFLKGLLTLFATT

SEQ ID NO: 5963 - protein, 443 aa, Homo sapiens
MRRQVMAALVVSGAAEQGGRDGPGRGRAPRGRVANQIPPEILKNPQLQAAIRVLPSNYNFEIPKTIWRIQQAQAKKVALQMPEGLLLFACTIVDILERFTEAEVMVMGDVTYGACCVDDFTARALGADFLVHYGHSCLIPMDTSAQDFRVLYVFVDIRIDTTHLLDSLRLTFPPATALALVSTIQFVSTLQAAAQELKAEYRVSVPQCKPLSPGEILGCTSPRLSKEVEAVVYLGDGRFHLESVMIANPNVPAYRYDPYSKVLSREHYDHQRMQAARQEAIATARSAKSWGLILGTLGRQGSPKILEHLESRLRALGLSFVRLLLSEIFPSKLSLLPEVDVWVQVACPRLSIDWGTAFPKPLLTPYEAAVALRDISWQQPYPMDFYAGSSLGPWTVNHGQDRRPHAPGRPARGKVQEGSARPPSAVACEDCSCRDEKVAPLAP

SEQ ID NO: 5964 - protein, 381 aa, Homo sapiens
MIDTLRPVPFASEMAISKTVAWLNEQLELGNERLLLMDCRPQELYESSHIESAINVAIPGIMLRRLQKGNLPVRALFTRGEDRDRFTRRCGTDTVVLYDESSSDWNENTGGESVLGLLLKKLKDEGCRAFYLEGGFSKFQAEFSLHCETNLDGSCSSSSPPLPVLGLGGLRISSDSSSDIESDLDRDPNSATDSDGSPLSNSQPSFPVEILPFLYLGCAKDSTNLDVLEEFGIKYILNVTPNLPNLFENAGEFKYKQIPISDHWSQNLSQFFPEAISFIDEARGKNCGVLVHCLAGISRSVTVTVAYLMQKLNLSMNDAYDIVKMKKSNISPNFNFMGQLLDFERTLGLSSPCDNRVPAQQLYFTTPSNQNVYQVDSLQST

SEQ ID NO: 5965 - protein, 235 aa, Homo sapiens
MIDTLRPVPFASEMAISKTVAWLNEQLELGNERLLLMDCRPQELYESSHIESAINVAIPGIMLRRLQKGNLPVRALFTRGEDRDRFTRRCGTDTVVLYDESSSDWNENTGGESVLGLLLKKLKDEGCRAFYLEDEARGKNCGVLVHCLAGISRSVTVTVAYLMQKLNLSMNDAYDIVKMKKSNISPNFNFMGQLLDFERTLGLSSPCDNRVPAQQLYFTTPSNQNVYQVDSLQST

SEQ ID NO: 5966 - protein, 117 aa, Homo sapiens
MIDTLRPVPFASEMAISKTVAWLNEQLELGNERLLLMDCRPQELYESSHIESAINVAIPGIMLRRLQKGNLPVRALFTRGEDRDRFTRRCGTDTVVLYDESSSDWNENTGGESVLGL

SEQ ID NO: 5967 - protein, 514 aa, Homo sapiens
MADAEVIILPKKHKKKKERKSLPEEDVAEIQHAEEFLIKPESKVAKLDTSQWPLLLKNFDKLNVRTTHYTPLACGSNPLKREIGDYIRTGFINLDKPSNPSSHEVVAWIRRILRVEKTGHSGTLDPKVTGCLIVCIERATRLVKSQQSAGKEYVGIVRLHNAIEGGTQLSRALETLTGALFQRPPLIAAVKRQLRVRTIYESKMIEYDPERRLGIFWVSCEAGTYIRTLCVHLGLLLGVGGQMQELRRVRSGVMSEKDHMVTMHDVLDAQWLYDNHKDESYLRRVVYPLEKLLTSHKRLVMKDSAVNAICYGAKIMLPGVLRYEDGIEVNQEIVVITTKGEAICMAIALMTTAVISTCDHGIVAKIKRVIMERDTYPRKWGLGPKASQKKLMIKQGLLDKHGKPTDSTPATWKQEYVDYSESAKKEVVAEVVKAPQVVAEAAKTAKRKRESESESDETPPAAPQLIKKEKKKSKKDKKAKAGLESGAEPGDGDSDTTKKKKKKKKAKEVELVSE

SEQ ID NO: 5968 - protein, 2414 aa, Homo sapiens
MAENVVEPGPPSAKRPKLSSPALSASASDGTDFGSLFDLEHDLPDELINSTELGLTNGGDINQLQTSLGMVQDAASKHKQLSELLRSGSSPNLNMGVGGPGQVMASQAQQSSPGLGLINSMVKSPMTQAGLTSPNMGMGTSGPNQGPTQSTGMMNSPVNQPAMGMNTGMNAGMNPGMLAAGNGQGIMPNQVMNGSIGAGRGRQNMQYPNPGMGSAGNLLTEPLQQGSPQMGGQTGLRGPQPLKMGMMNNPNPYGSPYTQNPGQQIGASGLGLQIQTKTVLSNNLSPFAMDKKAVPGGGMPNMGQQPAPQVQQPGLVTPVAQGMGSGAHTADPEKRKLIQQQLVLLLHAHKCQRREQANGEVRQCNLPHCRTMKNVLNHMTHCQSGKSCQVAHCASSRQIISHWKNCTRHDCPVCLPLKNAGDKRNQQPILTGAPVGLGNPSSLGVGQQSAPNLSTVSQIDPSSIERAYAALGLPYQVNQMPTQPQVQAKNQQNQQPGQSPQGMRPMSNMSASPMGVNGGVGVQTPSLLSDSMLHSAINSQNPMMSENASVPSLGPMPTAAQPSTTGIRKQWHEDITQDLRNHLVHKLVQAIFPTPDPAALKDRRMENLVAYARKVEGDMYESANNRAEYYHLLAEKIYKIQKELEEKRRTRLQKQNMLPNAAGMVPVSMNPGPNMGQPQPGMTSNGPLPDPSMIRGSVPNQMMPRITPQSGLNQFGQMSMAQPPIVPRQTPPLQHHGQLAQPGALNPPMGYGPRMQQPSNQGQFLPQTQFPSQGMNVTNIPLAPSSGQAPVSQAQMSSSSCPVNSPIMPPGSQGSHIHCPQLPQPALHQNSPSPVPSRTPTPHHTPPSIGAQQPPATTIPAPVPTPPAMPPGPQSQALHPPPRQTPTPPTTQLPQQVQPSLPAAPSADQPQQQPRSQQSTAASVPTPTAPLLPPQPATPLSQPAVSIEGQVSNPPSTSSTEVNSQAIAEKQPSQEVKMEAKMEVDQPEPADTQPEDISESKVEDCKMESTETEERSTELKTEIKEEEDQPSTSATQSSPAPGQSKKKIFKPEELRQALMPTLEALYRQDPESLPFRQPVDPQLLGIPDYFDIVKSPMDLSTIKRKLDTGQYQEPWQYVDDIWLMFNNAWLYNRKTSRVYKYCSKLSEVFEQEIDPVMQSLGYCCGRKLEFSPQTLCCYGKQLCTIPRDATYYSYQNRYHFCEKCFNEIQGESVSLGDDPSQPQTTINKEQFSKRKNDTLDPELFVECTECGRKMHQICVLHHEIIWPAGFVCDGCLKKSARTRKENKFSAKRLPSTRLGTFLENRVNDFLRRQNHPESGEVTVRVVHASDKTVEVKPGMKARFVDSGEMAESFPYRTKALFAFEEIDGVDLCFFGMHVQEYGSDCPPPNQRRVYISYLDSVHFFRPKCLRTAVYHEILIGYLEYVKKLGYTTGHIWACPPSEGDDYIFHCHPPDQKIPKPKRLQEWYKKMLDKAVSERIVHDYKDIFKQATEDRLTSAKELPYFEGDFWPNVLEESIKELEQEEEERKREENTSNESTDVTKGDSKNAKKKNNKKTSKNKSSLSRGNKKKPGMPNVSNDLSQKLYATMEKHKEVFFVIRLIAGPAANSLPPIVDPDPLIPCDLMDGRDAFLTLARDKHLEFSSLRRAQWSTMCMLVELHTQSQDRFVYTCNECKHHVETRWHCTVCEDYDLCITCYNTKNHDHKMEKLGLGLDDESNNQQAAATQSPGDSRRLSIQRCIQSLVHACQCRNANCSLPSCQKMKRVVQHTKGCKRKTNGGCPICKQLIALCCYHAKHCQENKCPVPFCLNIKQKLRQQQLQHRLQQAQMLRRRMASMQRTGVVGQQQGLPSPTPATPTTPTGQQPTTPQTPQPTSQPQPTPPNSMPPYLPRTQAAGPVSQGKAAGQVTPPTPPQTAQPPLPGPPPAAVEMAMQIQRAAETQRQMAHVQIFQRPIQHQMPPMTPMAPMGMNPPPMTRGPSGHLEPGMGPTGMQQQPPWSQGGLPQPQQLQSGMPRPAMMSVAQHGQPLNMAPQPGLGQVGISPLKPGTVSQQALQNLLRTLRSPSSPLQQQQVLSILHANPQLLAAFIKQRAAKYANSNPQPIPGQPGMPQGQPGLQPPTMPGQQGVHSNPAMQNMNPMQAGVQRAGLPQQQPQQQLQPPMGGMSPQAQQMNMNHNTMPSQFRDILRRQQMMQQQQQQGAGPGIGPGMANHNQFQQPQGVGYPPQQQQRMQHHMQQMQQGNMGQIGQLPQALGAEAGASLQAYQQRLLQQQMGSPVQPNPMSPQQHMLPNQAQSPHLQGQQIPNSLSNQVRSPQPVPSPRPQSQPPHSSPSPRMQPQPSPHHVSPQTSSPHPGLVAAQANPMEQGHFASPDQNSMLSQLASNPGMANLHGASATDLGLSTDNSDLNSNLSQSTLDIH

SEQ ID NO: 5969 - protein, 437 aa, Homo sapiens
MALAGAPAGGPCAPALEALLGAGALRLLDSSQIVIISAAQDASAPPAPTGPAAPAAGPCDPDLLLFATPQAPRPTPSAPRPALGRPPVKRRLDLETDHQYLAESSGPARGRGRHPGKGVKSPGEKSRYETSLNLTTKRFLELLSHSADGVVDLNWAAEVLKVQKRRIYDITNVLEGIQLIAKKSKNHIQWLGSHTTVGVGGRLEGLTQDLRQLQESEQQLDHLMNICTTQLRLLSEDTDSQRLAYVTCQDLRSIADPAEQMVMVIKAPPETQLQAVDSSENFQISLKSKQGPIDVFLCPEETVGGISPGKTPSQEVTSEEENRATDSATIVSPPPSSPPSSLTTDPSQSLLSLEQEPLLSRMGSLRAPVDEDRLSPLVAADSLLEHVREDFSGLLPEEFISLSPPHEALDYHFGLEEGEGIRDLFDCDFGDLTPLDF

SEQ ID NO: 5970 - protein, 413 aa, Homo sapiens
MAEAGPQAPPPPGTPSRHEKSLGLLTTKFVSLLQEAKDGVLDLKLAADTLAVRQKRRIYDITNVLEGIGLIEKKSKNSIQWKGVGPGCNTREIADKLIELKAEIEELQQREQELDQHKVWVQQSIRNVTEDVQNSCLAYVTHEDICRCFAGDTLLAIRAPSGTSLEVPIPEGLNGQKKYQIHLKSVSGPIEVLLVNKEAWSSPPVAVPVPPPEDLLQSPSAVSTPPPLPKPALAQSQEASRPNSPQLTPTAVPGSAEVQGMAGPAAEITVSGGPGTDSKDSGELSSLPLGPTTLDTRPLQSSALLDSSSSSSSSSSSSSNSNSSSSSGPNPSTSFEPIKADPTGVLELPKELSEIFDPTRECMSSELLEELMSSEVFAPLLRLSPPPGDHDYIYNLDESEGVCDLFDVPVLNL

SEQ ID NO: 5971 - protein, 387 aa, Homo sapiens
MTGKLAEKLPVTMSSLLNQLPDNLYPEEIPSALNLFSGSSDSVVHYNQMATENVMDIGLTNEKPNPELSYSGSFQPAPGNKTVTYLGKFAFDSPSNWCQDNIISLMSAGILGVPPASGALSTQTSTASMVQPPQGDVEAMYPALPPYSNCGDLYSEPVSFHDPQGNPGLAYSPQDYQSAKPALDSNLFPMIPDYNLYHHPNDMGSIPEHKPFQGMDPIRVNPPPITPLETIKAFKDKQIHPGFGSLPQPPLTLKPIRPRKYPNRPSKTPLHERPHACPAEGCDRRFSRSDELTRHLRIHTGHKPFQCRICMRSFSRSDHLTTHIRTHTGEKPFACEFCGRKFARSDERKRHAKIHLKQKEKKAEKGGAPSASSAPPVSLAPVVTTCA

SEQ ID NO: 5972 - protein, 228 aa, Homo sapiens
MDIGLTNEKPNPELSYSGSFQPAPGNKTVTMIPDYNLYHHPNDMGSIPEHKPFQGMDPIRVNPPPITPLETIKAFKDKQIHPGFGSLPQPPLTLKPIRPRKYPNRPSKTPLHERPHACPAEGCDRRFSRSDELTRHLRIHTGHKPFQCRICMRSFSRSDHLTTHIRTHTGEKPFACEFCGRKFARSDERKRHAKIHLKQKEKKAEKGGAPSASSAPPVSLAPVVTTCA

SEQ ID NO: 5973 - protein, 349 aa, Homo sapiens
MEPCAAWSPRGGRENVMDIGLTNEKPNPELSYSGSFQPAPGNKTVTYLGKFAFDSPSNWCQDNIISLMSAGILGVPPASGALSTQTSTASMVQPPQGDVEAMYPALPPYSNCGDLYSEPVSFHDPQGNPGLAYSPQDYQSAKPALDSNLFPMIPDYNLYHHPNDMGSIPEHKPFQGMDPIRVNPPPITPLETIKAFKDKQIHPGFGSLPQPPLTLKPIRPRKYPNRPSKTPLHERPHACPAEGCDRRFSRSDELTRHLRIHTGHKPFQCRICMRSFSRSDHLTTHIRTHTGEKPFACEFCGRKFARSDERKRHAKIHLKQKEKKAEKGGAPSASSAPPVSLAPVVTTCA

SEQ ID NO: 5974 - protein, 1231 aa, Homo sapiens
MASVWKRLQRVGKHASKFQFVASYQELMVECTKKWQPDKLVVVWTRRSRRKSSKAHSWQPGIKNPYRGVVVWPVPENIEITVTLFKDPHAEEFEDKEWTFVIENESPSGRRKALATSSINMKQYASPMPTQTDVKLKFKPLSKKVVSAALQFSLSCIFLREGKATDEDMQSLASLMSMKQADIGNLDDFEEDNEDDDENRVNQEEKAAKITEIVNQLNALSSLDEDQDDCIKQANMRSAKSASSSEELINKLNFLDEAEKDLATVNSNPFDDPDAAELNPFGDPDSEEPITETASPRKTEDSFYNNSYNPFKEVQTPQYLNPFDEPEAFVTIKDSPPQSTKRKNIRPVDMSKYLYADSSKTEEEELDESNPFYEPKSTPPPNNLVNPVQELETERRVKRKAPAPPVLSPKTGVLNENTVSAGKDLSTSPKPSPIPSPVLGRKPNASQSLLVWCKEVTKNYRGVKITNFTTSWRNGLSFCAILHHFRPDLIDYKSLNPQDIKENNKKAYDGFASIGISRLLEPSDMVLLAIPDKLTVMTYLYQIRAHFSGQELNVVQIEENSSKSTYKVGNYETDTNSSVDQEKFYAELSDLKREPELQQPISGAVDFLSQDDSVFVNDSGVGESESEHQTPDDHLSPSTASPYCRRTKSDTEPQKSQQSSGRTSGSDDPGICSNTDSTQAQVLLGKKRLLKAETLELSDLYVSDKKKDMSPPFICEETDEQKLQTLDIGSNLEKEKLENSRSLECRSDPESPIKKTSLSPTSKLGYSYSRDLDLAKKKHASLRQTESDPDADRTTLNHADHSSKIVQHRLLSRQEELKERARVLLEQARRDAALKAGNKHNTNTATPFCNRQLSDQQDEERRRQLRERARQLIAEARSGVKMSELPSYGEMAAEKLKERSKASGDENDNIEIDTNEEIPEGFVVGGGDELTNLENDLDTPEQNSKLVDLKLKKLLEVQPQVANSPSSAAQKAVTESSEQDMKSGTEDLRTERLQKTTERFRNPVVFSKDSTVRKTQLQSFSQYIENRPEMKRQRSIQEDTKKGNEEKAAITETQRKPSEDEVLNKGFKDTSQYVVGELAALENEQKQIDTRAALVEKRLRYLMDTGRNTEEEEAMMQEWFMLVNKKNALIRRMNQLSLLEKEHDLERRYELLNRELRAMLAIEDWQKTEAQKRREQLLLDELVALVNKRDALVRDLDAQEKQAEEEDEHLERTLEQNKGKMAKKEEKCVLQ

SEQ ID NO: 5975 - protein, 1196 aa, Homo sapiens
MASVWKRLQRVGKHASKFQFVASYQELMVECTKKWQPDKLVVVWTRRSRRKSSKAHSWQPGIKNPYRGVVVWPVPENIEITVTLFKDPHAEEFEDKEWTFVIENESPSGRRKALATSSINMKQYASPMPTQTDVKLKFKPLSKKVVSAALQFSLSCIFLREGKATDEDMQSLASLMSMKQADIGNLDDFEEDNEDDDENRVNQEEKAAKITELINKLNFLDEAEKDLATVNSNPFDDPDAAELNPFGDPDSEEPITETASPRKTEDSFYNNSYNPFKEVQTPQYLNPFDEPEAFVTIKDSPPQSTKRKNIRPVDMSKYLYADSSKTEEEELDESNPFYEPKSTPPPNNLVNPVQELETERRVKRKAPAPPVLSPKTGVLNENTVSAGKDLSTSPKPSPIPSPVLGRKPNASQSLLVWCKEVTKNYRGVKITNFTTSWRNGLSFCAILHHFRPDLIDYKSLNPQDIKENNKKAYDGFASIGISRLLEPSDMVLLAIPDKLTVMTYLYQIRAHFSGQELNVVQIEENSSKSTYKVGNYETDTNSSVDQEKFYAELSDLKREPELQQPISGAVDFLSQDDSVFVNDSGVGESESEHQTPDDHLSPSTASPYCRRTKSDTEPQKSQQSSGRTSGSDDPGICSNTDSTQAQVLLGKKRLLKAETLELSDLYVSDKKKDMSPPFICEETDEQKLQTLDIGSNLEKEKLENSRSLECRSDPESPIKKTSLSPTSKLGYSYSRDLDLAKKKHASLRQTESDPDADRTTLNHADHSSKIVQHRLLSRQEELKERARVLLEQARRDAALKAGNKHNTNTATPFCNRQLSDQQDEERRRQLRERARQLIAEARSGVKMSELPSYGEMAAEKLKERSKASGDENDNIEIDTNEEIPEGFVVGGGDELTNLENDLDTPEQNSKLVDLKLKKLLEVQPQVANSPSSAAQKAVTESSEQDMKSGTEDLRTERLQKTTERFRNPVVFSKDSTVRKTQLQSFSQYIENRPEMKRQRSIQEDTKKGNEEKAAITETQRKPSEDEVLNKGFKDTSQYVVGELAALENEQKQIDTRAALVEKRLRYLMDTGRNTEEEEAMMQEWFMLVNKKNALIRRMNQLSLLEKEHDLERRYELLNRELRAMLAIEDWQKTEAQKRREQLLLDELVALVNKRDALVRDLDAQEKQAEEEDEHLERTLEQNKGKMAKKEEKCVLQ

SEQ ID NO: 5976 - protein, 1160 aa, Homo sapiens
MASVWKRLQRVGKHASKFQFVASYQELMVECTKKWQPDKLVVVWTRRSRRKSSKAHSWQPGIKNPYRGVVVWPVPENIEITVTLFKDPHAEEFEDKEWTFVIENESPSGRRKALATSSINMKQYASPMPTQTDVKLKFKPLSKKVVSAALQFSLSCIFLREGKATDEDMQSLASLMSMKQADIGNLDDFEEDNEDDDENRVNQEEKAAKITELINKLNFLDEAEKDLATVNSNPFDDPDAAELNPFGDPDSEEPITETASPRKTEDSFYNNSYNPFKEVQTPQYLNPFDEPEAFVTIKDSPPQSTKRKNIRPVDMSKYLYADSSKTEEEELDESNPFYEPKSTPPPNNLVNPVQELETERRVKRKAPAPPVLSPKTGVLNENTVSAGKDLSTSPKPSPIPSPVLGRKPNASQSLLVWCKEVTKNYRGVKITNFTTSWRNGLSFCAILHHFRPDLIDYKSLNPQDIKENNKKAYDGFASIGISRLLEPSDMVLLAIPDKLTVMTYLYQIRAHFSGQELNVVQIEENSSKSTYKVGNYETDTNSSVDQEKFYAELSDLKREPELQQPISGAVDFLSQDDSVFVNDSGVGESESEHQTPDDHLSPSTASPYCRRTKSDTEPQKSQQSSGRTSGSDDPGICSNTDSTQAQVLLGKKRLLKAETLELSDLYVSDKKKDMSPPFICEETDEQKLQTLDIGSNLEKEKLENSRSLECRSDPESPIKKTSLSPTSKLGYSYSRDLDLAKKKHASLRQTESDPDADRTTLNHADHSSKIVQHRLLSRQEELKERARVLLEQARRDAALKAGNKHNTNTATPFCNRQLSDQQDEERRRQLRERARQLIAEARSGVKMSELPSYGEMAAEKLKERSKASGEQNSKLVDLKLKKLLEVQPQVANSPSSAAQKAVTESSEQDMKSGTEDLRTERLQKTTERFRNPVVFSKDSTVRKTQLQSFSQYIENRPEMKRQRSIQEDTKKGNEEKAAITETQRKPSEDEVLNKGFKDTSQYVVGELAALENEQKQIDTRAALVEKRLRYLMDTGRNTEEEEAMMQEWFMLVNKKNALIRRMNQLSLLEKEHDLERRYELLNRELRAMLAIEDWQKTEAQKRREQLLLDELVALVNKRDALVRDLDAQEKQAEEEDEHLERTLEQNKGKMAKKEEKCVLQ

SEQ ID NO: 5977 - protein, 1196 aa, Homo sapiens; identical to SEQ ID NO: 5975

SEQ ID NO: 5978 - protein, 310 aa, Homo sapiens
MASVWKRLQRVGKHASKFQFVASYQELMVECTKKWQPDKLVVVWTRRSRRKSSKAHSWQPGIKNPYRGVVVWPVPENIEITVTLFKDPHAEEFEDKEWTFVIENESPSGRRKALATSSINMKQYASPMPTQTDVKLKFKPLSKKVVSAALQFSLSCIFLREGKATDEDMQSLASLMSMKQADIGNLDDFEEDNEDDDENRVNQEEKAAKITELINKLNFLDEAEKDLATVNSNPFDDPDAAELNPFGDPDSEEPITETASPRKTEDSFYNNSYNPFKEVQTPQYLNPFDEPEAFVTIKDSPPQSTKRKNI

SEQ ID NO: 5979 - protein, 77 aa, Homo sapiens
MASVWKRLQRVGKHASKFQFVASYQELMVECTKKWQPDKLVVVWTRRSRRKSSKAHSWQPGIKNPYRGVVVWPVPEN

SEQ ID NO: 5980 - protein, 1160 aa, Homo sapiens; identical to SEQ ID NO: 5976

SEQ ID NO: 5981 - protein, 202 aa, Homo sapiens
MKRQRSIQEDTKKGNEEKAAITETQRKPSEDEVLNKGFKDTSQYVVGELAALENEQKQIDTRAALVEKRLRYLMDTGRNTEEEEAMMQEWFMLVNKKNALIRRMNQLSLLEKEHDLERRYELLNRELRAMLAIEDWQKTEAQKRREQLLLDELVALVNKRDALVRDLDAQEKQAEEEDEHLERTLEQNKGKMAKKEEKCVLQ

SEQ ID NO: 5982 - protein, 428 aa, Homo sapiens
MDPSVTLWQFLLQLLREQGNGHIISWTSRDGGEFKLVDAEEVARLWGLRKNKTNMNYDKLSRALRYYYDKNIIRKVSGQKFVYKFVSYPEVAGCSTEDCPPQPEVSVTSTMPNVAPAAIHAAPGDTVSGKPGTPKGAGMAGPGGLARSSRNEYMRSGLYSTFTIQSLQPQPPPHPRPAVVLPSAAPAGAAAPPSGSRSTSPSPLEACLEAEEAGLPLQVILTPPEAPNLKSEELNVEPGLGRALPPEVKVEGPKEELEVAGERGFVPETTKAEPEVPPQEGVPARLPAVVMDTAGQAGGHAASSPEISQPQKGRKPRDLELPLSPSLLGGPGPERTPGSGSGSGLQAPGPALTPSLLPTHTLTPVLLTPSSLPPSIHFWSTLSPIAPRSPAKLSFQFPSSGSAQVHIPSISVDGLSTPVVLSPGPQKP

SEQ ID NO: 5983 - protein, 95 aa, Homo sapiens
MDPSVTLWQFLLQLLREQGNGHIISWTSRDGGEFKLVDAEEVARLWGLRKNKTNMNYDKLSRALRYYYDKNIIRKVSGQKFVYKFVSYPESHCAP

SEQ ID NO: 5984 - protein, 428 aa, Homo sapiens; identical to SEQ ID NO: 5982

SEQ ID NO: 5985 - protein, 121 aa, Homo sapiens
MDTAGQAGGHAASSPEISQPQKGRKPRDLELPLSPSLLGGPGPERTPALLPTHTLTPVLLTPSSLPPSIHFWSTLSPIAPRSPAKLSFQFPSSGSAQVHIPSISVDGLSTPVVLSPGPQKP

SEQ ID NO: 5986 - protein, 570 aa, Homo sapiens
MSEQSICQARAAVMVYDDANKKWVPAGGSTGFSRVHIYHHTGNNTFRVVGRKIQDHQVVINCAIPKGLKYNQATQTFHQWRDARQVYGLNFGSKEDANVFASAMMHALEVLNSQETGPTLPRQNSQLPAQVQNGPSQEELEIQRRQLQEQQRQKELERERLERERMERERLERERLERERLERERLEQEQLERERQERERQERLERQERLERQERLERQERLDRERQERQERERLERLERERQERERQEQLEREQLEWERERRISSAAAPASVETPLNSVLGDSSASEPGLQAASQPAETPSQQGIVLGPLAPPPPPPLPPGPAQASVALPPPPGPPPPPPLPSTGPPPPPPPPPLPNQVPPPPPPPPAPPLPASGFFLASMSEDNRPLTGLAAAIAGAKLRKVSRMEDTSFPSGGNAIGVNSASSKTDTGRGNGPLPLGGSGLMEEMSALLARRRRIAEKGSTIETEQKEDKGEDSEPVTSKASSTSTPEPTRKPWERTNTMNGSKSPVISRPKSTPLSQPSANGVQTEGLDYDRLKQDILDEMRKELTKLKEELIDAIRQELSKSNTA

SEQ ID NO: 5987 - protein, 591 aa, Homo sapiens
MSEQSICQARAAVMVYDDANKKWVPAGGSTGFSRVHIYHHTGNNTFRVVGRKIQDHQVVINCAIPKGLKYNQATQTFHQWRDARQVYGLNFGSKEDANVFASAMMHALEVLNSQETGPTLPRQNSQLPAQVQNGPSQEELEIQRRQLQEQQRQKELERERLERERMERERLERERLERERLERERLEQEQLERERQERERQERLERQERLERQERLERQERLDRERQERQERERLERLERERQERERQEQLEREQLEWERERRISSAAAPASVETPLNSVLGDSSASEPGLQAASQPAETPSQQGIVLGPLAPPPPPPLPPGPAQASVALPPPPGPPPPPPLPSTGPPPPPPPPPLPNQVPPPPPPPPAPPLPASGFFLASMSEDNRPLTGLAAAIAGAKLRKVSRMEDTSFPSGGNAIGVNSASSKTDTGRGNGPLPLGGSGLMEEMSALLARRRRIAEKGSTIETEQKEDKGEDSEPVTSKASSTSTPEPTRKPWERTNTMNGSKSPVISRRDSPRKNQIVFDNRSYDSLHRPKSTPLSQPSANGVQTEGLDYDRLKQDILDEMRKELTKLKEELIDAIRQELSKSNTA

SEQ ID NO: 5988 - protein, 532 aa, Homo sapiens
SEQSICQARAAVMVYDDANKKWVPAGGSTGFSRVHIYHHTGNNTFRVVGRKIQDHQVVINCAIPKGLKYNQATQTFHQWRDARQVYGLNFGSKEDANVFASAMMHALEVLNSQETGPTLPRQNSQLPAQVQNGPSQEELEIQRRQLQEQQRQKELERERLERERMERERLERERLERERLERERLEQEQLERERQERERQERLERQERLERQERLERQERLDRERQERQERERLERLERERQERERQEQLEREQLEWERERRISSAGIVLGPLAPPPPPPLPPGPAQASVALPPPPGPPPPPPLPSTGPPPPPPPPPLPNQVPPPPPPPPAPPLPASGFFLASMSEDNRPLTGLAAAIAGAKLRKVSRMEDTSFPSGGNAIGVNSASSKTDTGRGNGPLPLGGSGLMEEMSALLARRRRIAEKGSTIETEQKEDKGEDSEPVTSKASSTSTPEPTRKPWERTNTMNGSKSPVISRPKSTPLSQPSANGVQTEGLDYDRLKQDILDEMRKELTKLKEELIDAIRQELSKSNTA

SEQ ID NO: 5989 - protein, 625 aa, Homo sapiens
MDRGTLPLAVALLLASCSLSPTSLAETVHCDLQPVGPERGEVTYTTSQVSKGCVAQAPNAILEVHVLFLEFPTGPSQLELTLQASKQNGTWPREVLLVLSVNSSVFLHLQALGIPLHLAYNSSLVTFQEPPGVNTTELPSFPKTQILEWAAERGPITSAAELNDPQSILLRLGQAQGSLSFCMLEASQDMGRTLEWRPRTPALVRGCHLEGVAGHKEAHILRVLPGHSAGPRTVTVKVELSCAPGDLDAVLILQGPPYVSWLIDANHNMQIWTTGEYSFKIFPEKNIRGFKLPDTPQGLLGEARMLNASIVASFVELPLASIVSLHASSCGGRLQTSPAPIQTTPPKDTCSPELLMSLIQTKCADDAMTLVLKKELVAHLKCTITGLTFWDPSCEAEDRGDKFVLRSAYSSCGMQVSASMISNEAVVNILSSSSPQRKKVHCLNMDSLSFQLGLYLSPHFLQASNTIEPGQQSFVQVRVSPSVSEFLLQLDSCHLDLGPEGGTVELIQGRAAKGNCVSLLSPSPEGDPRFSFLLHFYTVPIPKTGTLSCTVALRPKTGSQDQEVHRTVFMRLNIISPDLSGCTSKGLVLPAVLGITFGAFLIGALLTAALWYIYSHTREYPRPPQ

SEQ ID NO: 5990 - protein, 658 aa, Homo sapiens
MDRGTLPLAVALLLASCSLSPTSLAETVHCDLQPVGPERGEVTYTTSQVSKGCVAQAPNAILEVHVLFLEFPTGPSQLELTLQASKQNGTWPREVLLVLSVNSSVFLHLQALGIPLHLAYNSSLVTFQEPPGVNTTELPSFPKTQILEWAAERGPITSAAELNDPQSILLRLGQAQGSLSFCMLEASQDMGRTLEWRPRTPALVRGCHLEGVAGHKEAHILRVLPGHSAGPRTVTVKVELSCAPGDLDAVLILQGPPYVSWLIDANHNMQIWTTGEYSFKIFPEKNIRGFKLPDTPQGLLGEARMLNASIVASFVELPLASIVSLHASSCGGRLQTSPAPIQTTPPKDTCSPELLMSLIQTKCADDAMTLVLKKELVAHLKCTITGLTFWDPSCEAEDRGDKFVLRSAYSSCGMQVSASMISNEAVVNILSSSSPQRKKVHCLNMDSLSFQLGLYLSPHFLQASNTIEPGQQSFVQVRVSPSVSEFLLQLDSCHLDLGPEGGTVELIQGRAAKGNCVSLLSPSPEGDPRFSFLLHFYTVPIPKTGTLSCTVALRPKTGSQDQEVHRTVFMRLNIISPDLSGCTSKGLVLPAVLGITFGAFLIGALLTAALWYIYSHTRSPSKREPVVAVAAPASSESSSTNHSIGSTQSTPCSTSSMA

SEQ ID NO: 5991 - protein, 658 aa, Homo sapiens; identical to SEQ ID NO: 5990

SEQ ID NO: 5992 - protein, 476 aa, Homo sapiens
MLEASQDMGRTLEWRPRTPALVRGCHLEGVAGHKEAHILRVLPGHSAGPRTVTVKVELSCAPGDLDAVLILQGPPYVSWLIDANHNMQIWTTGEYSFKIFPEKNIRGFKLPDTPQGLLGEARMLNASIVASFVELPLASIVSLHASSCGGRLQTSPAPIQTTPPKDTCSPELLMSLIQTKCADDAMTLVLKKELVAHLKCTITGLTFWDPSCEAEDRGDKFVLRSAYSSCGMQVSASMISNEAVVNILSSSSPQRKKVHCLNMDSLSFQLGLYLSPHFLQASNTIEPGQQSFVQVRVSPSVSEFLLQLDSCHLDLGPEGGTVELIQGRAAKGNCVSLLSPSPEGDPRFSFLLHFYTVPIPKTGTLSCTVALRPKTGSQDQEVHRTVFMRLNIISPDLSGCTSKGLVLPAVLGITFGAFLIGALLTAALWYIYSHTRSPSKREPVVAVAAPASSESSSTNHSIGSTQSTPCSTSSMA

SEQ ID NO: 5993 - protein, 212 aa, Homo sapiens
MDYLLMIFSLLFVACQGAPETAVLGAELSAVGENGGEKPTPSPPWRLRRSKRCSCSSLMDKECVYFCHLDIIWVNTPEHVVPYGLGSPRSKRALENLLPTKATDRENRCQCASQKDKKCWNFCQAGKELRAEDIMEKDWNNHKKGKDCSKLGKKCIYQQLVRGRKIRRSSEEHLRQTRSETMRNSVKSSFHDPKLKGKPSRERYVTHNRAHW

SEQ ID NO: 5994 - protein, 442 aa, Homo sapiens
MQPPPSLCGRALVALVLACGLSRIWGEERGFPPDRATPLLQTAEIMTPPTKTLWPKGSNASLARSLAPAEVPKGDRTAGSPPRTISPPPCQGPIEIKETFKYINTVVSCLVFVLGIIGNSTLLRIIYKNKCMRNGPNILIASLALGDLLHIVIDIPINVYKLLAEDWPFGAEMCKLVPFIQKASVGITVLSLCALSIDRYRAVASWSRIKGIGVPKWTAVEIVLIWVVSVVLAVPEAIGFDIITMDYKGSYLRICLLHPVQKTAFMQFYKTAKDWWLFSFYFCLPLAITAFFYTLMTCEMLRKKSGMQIALNDHLKQRREVAKTVFCLVLVFALCWLPLHLSRILKLTLYNQNDPNRCELLSFLLVLDYIGINMASLNSCINPIALYLVSKRFKNCFKSCLCCWCQSFEEKQSLEEKQSCLKFKANDHGYDNFRSSNKYSSS

SEQ ID NO: 5995 - protein, 532 aa, Homo sapiens
MNKSTCLMAAETPSKRWRLHCLAFSQRFVRAGPACSSREACSSPRAGWNPAGFRLPGRWSPFVALHLVCQIREALKLRSGHRTPSGAGSSMQPPPSLCGRALVALVLACGLSRIWGEERGFPPDRATPLLQTAEIMTPPTKTLWPKGSNASLARSLAPAEVPKGDRTAGSPPRTISPPPCQGPIEIKETFKYINTVVSCLVFVLGIIGNSTLLRIIYKNKCMRNGPNILIASLALGDLLHIVIDIPINVYKLLAEDWPFGAEMCKLVPFIQKASVGITVLSLCALSIDRYRAVASWSRIKGIGVPKWTAVEIVLIWVVSVVLAVPEAIGFDIITMDYKGSYLRICLLHPVQKTAFMQFYKTAKDWWLFSFYFCLPLAITAFFYTLMTCEMLRKKSGMQIALNDHLKQRREVAKTVFCLVLVFALCWLPLHLSRILKLTLYNQNDPNRCELLSFLLVLDYIGINMASLNSCINPIALYLVSKRFKNCFKSCLCCWCQSFEEKQSLEEKQSCLKFKANDHGYDNFRSSNKYSSS

SEQ ID NO: 5996 - protein, 436 aa, Homo sapiens
MQPPPSLCGRALVALVLACGLSRIWGEERGFPPDRATPLLQTAEIMTPPTKTLWPKGSNASLARSLAPAEVPKGDRTAGSPPRTISPPPCQGPIEIKETFKYINTVVSCLVFVLGIIGNSTLLRIIYKNKCMRNGPNILIASLALGDLLHIVIDIPINVYKLLAEDWPFGAEMCKLVPFIQKASVGITVLSLCALSIDRYRAVASWSRIKGIGVPKWTAVEIVLIWVVSVVLAVPEAIGFDIITMDYKGSYLRICLLHPVQKTAFMQFYKTAKDWWLFSFYFCLPLAITAFFYTLMTCEMLRKKSGMQIALNDHLKQRREVAKTVFCLVLVFALCWLPLHLSRILKLTLYNQNDPNRCELLSFLLVLDYIGINMASLNSCINPIALYLVSKRFKNCFKAGPHVGNKLVMLFSVNIECDGTVNQNPTMWPERKSNNN

SEQ ID NO: 5997 - protein, 928 aa, Homo sapiens
MALRRLGAALLLLPLLAAVEETLMDSTTATAELGWMVHPPSGWEEVSGYDENMNTIRTYQVCNVFESSQNNWLRTKFIRRRGAHRIHVEMKFSVRDCSSIPSVPGSCKETFNLYYYEADFDSATKTFPNWMENPWVKVDTIAADESFSQVDLGGRVMKINTEVRSFGPVSRSGFYLAFQDYGGCMSLIAVRVFYRKCPRIIQNGAIFQETLSGAESTSLVAARGSCIANAEEVDVPIKLYCNGDGEWLVPIGRCMCKAGFEAVENGTVCRGCPSGTFKANQGDEACTHCPINSRTTSEGATNCVCRNGYYRADLDPLDMPCTTIPSAPQAVISSVNETSLMLEWTPPRDSGGREDLVYNIICKSCGSGRGACTRCGDNVQYAPRQLGLTEPRIYISDLLAHTQYTFEIQAVNGVTDQSPFSPQFASVNITTNQAAPSAVSIMHQVSRTVDSITLSWSQPDQPNGVILDYELQYYEKELSEYNATAIKSPTNTVTVQGLKAGAIYVFQVRARTVAGYGRYSGKMYFQTMTEVTPGMKIYIDPFTYEDPNEAVREFAKEIDISCVKIEQVIGAGEFGEVCSGHLKLPGKREIFVAIKTLKSGYTEKQRRDFLSEASIMGQFDHPNVIHLEGVVTKSTPVMIITEFMENGSLDSFLRQNDGQFTVIQLVGMLRGIAAGMKYLADMNYVHRDLAARNILVNSNLVCKVSDFGLSRFLEDDTSDPTYTSALGGKIPIRWTAPEAIQYRKFTSASDVWSYGIVMWEVMSYGERPYWDMTNQDVINAIEQDYRLPPPMDCPSALHQLMLDCWQKDRNHRPKFGQIVNTLDKMIRNPNSLKAMAPLSSGINLPLLDRTIPDYTSFNTVDEWLEAIKMGQYKESFANAGFTSFDVVSQMMMEDILRVGVTLAGHQKKILNSIQVMRAQMNQIQSVEV

SEQ ID NO: 5998 - protein, 946 aa, Homo sapiens
MWVPVLALPVCTYAETLMDSTTATAELGWMVHPPSGWEEVSGYDENMNTIRTYQVCNVFESSQNNWLRTKFIRRRGAHRIHVEMKFSVRDCSSIPSVPGSCKETFNLYYYEADFDSATKTFPNWMENPWVKVDTIAADESFSQVDLGGRVMKINTEVRSFGPVSRSGFYLAFQDYGGCMSLIAVRVFYRKCPRIIQNGAIFQETLSGAESTSLVAARGSCIANAEEVDVPIKLYCNGDGEWLVPIGRCMCKAGFEAVENGTVCRGCPSGTFKANQGDEACTHCPINSRTTSEGATNCVCRNGYYRADLDPLDMPCTTIPSAPQAVISSVNETSLMLEWTPPRDSGGREDLVYNIICKSCGSGRGACTRCGDNVQYAPRQLGLTEPRIYISDLLAHTQYTFEIQAVNGVTDQSPFSPQFASVNITTNQAAPSAVSIMHQVSRTVDSITLSWSQPDQPNGVILDYELQYYEKQELSEYNATAIKSPTNTVTVQGLKAGAIYVFQVRARTVAGYGRYSGKMYFQTMTEAEYQTSIQEKLPLIIGSSAAGLVFLIAVVVIAIVCNRRGFERADSEYTDKLQHYTSGHMTPGMKIYIDPFTYEDPNEAVREFAKEIDISCVKIEQVIGAGEFGEVCSGHLKLPGKREIFVAIKTLKSGYTEKQRRDFLSEASIMGQFDHPNVIHLEGVVTKSTPVMIITEFMENGSLDSFLRQNDGQFTVIQLVGMLRGIAAGMKYLADMNYVHRDLAARNILVNSNLVCKVSDFGLSRFLEDDTSDPTYTSALGGKIPIRWTAPEAIQYRKFTSASDVWSYGIVMWEVMSYGERPYWDMTNQDVINAIEQDYRLPPPMDCPSALHQLMLDCWQKDRNHRPKFGQIVNTLDKMIRNPNSLKAMAPLSSGINLPLLDRTIPDYTSFNTVDEWLEAIKMGQYKESFANAGFTSFDVVSQMMME

SEQ ID NO: 5999 - protein, 986 aa, Homo sapiens
MALRRLGAALLLLPLLAAVEETLMDSTTATAELGWMVHPPSGWEEVSGYDENMNTIRTYQVCNVFESSQNNWLRTKFIRRRGAHRIHVEMKFSVRDCSSIPSVPGSCKETFNLYYYEADFDSATKTFPNWMENPWVKVDTIAADESFSQVDLGGRVMKINTEVRSFGPVSRSGFYLAFQDYGGCMSLIAVRVFYRKCPRIIQNGAIFQETLSGAESTSLVAARGSCIANAEEVDVPIKLYCNGDGEWLVPIGRCMCKAGFEAVENGTVCRGCPSGTFKANQGDEACTHCPINSRTTSEGATNCVCRNGYYRADLDPLDMPCTTIPSAPQAVISSVNETSLMLEWTPPRDSGGREDLVYNIICKSCGSGRGACTRCGDNVQYAPRQLGLTEPRIYISDLLAHTQYTFEIQAVNGVTDQSPFSPQFASVNITTNQAAPSAVSIMHQVSRTVDSITLSWSQPDQPNGVILDYELQYYEKELSEYNATAIKSPTNTVTVQGLKAGAIYVFQVRARTVAGYGRYSGKMYFQTMTEAEYQTSIQEKLPLIIGSSAAGLVFLIAVVVIAIVCNRRGFERADSEYTDKLQHYTSGHMTPGMKIYIDPFTYEDPNEAVREFAKEIDISCVKIEQVIGAGEFGEVCSGHLKLPGKREIFVAIKTLKSGYTEKQRRDFLSEASIMGQFDHPNVIHLEGVVTKSTPVMIITEFMENGSLDSFLRQNDGQFTVIQLVGMLRGIAAGMKYLADMNYVHRDLAARNILVNSNLVCKVSDFGLSRFLEDDTSDPTYTSALGGKIPIRWTAPEAIQYRKFTSASDVWSYGIVMWEVMSYGERPYWDMTNQDVINAIEQDYRLPPPMDCPSALHQLMLDCWQKDRNHRPKFGQIVNTLDKMIRNPNSLKAMAPLSSGINLPLLDRTIPDYTSFNTVDEWLEAIKMGQYKESFANAGFTSFDVVSQMMMEDILRVGVTLAGHQKKILNSIQVMRAQMNQIQSVEV

SEQ ID NO: 6000 - protein, 987 aa, Homo sapiens
MALRRLGAALLLLPLLAAVEETLMDSTTATAELGWMVHPPSGWEEVSGYDENMNTIRTYQVCNVFESSQNNWLRTKFIRRRGAHRIHVEMKFSVRDCSSIPSVPGSCKETFNLYYYEADFDSATKTFPNWMENPWVKVDTIAADESFSQVDLGGRVMKINTEVRSFGPVSRSGFYLAFQDYGGCMSLIAVRVFYRKCPRIIQNGAIFQETLSGAESTSLVAARGSCIANAEEVDVPIKLYCNGDGEWLVPIGRCMCKAGFEAVENGTVCRGCPSGTFKANQGDEACTHCPINSRTTSEGATNCVCRNGYYRADLDPLDMPCTTIPSAPQAVISSVNETSLMLEWTPPRDSGGREDLVYNIICKSCGSGRGACTRCGDNVQYAPRQLGLTEPRIYISDLLAHTQYTFEIQAVNGVTDQSPFSPQFASVNITTNQAAPSAVSIMHQVSRTVDSITLSWSQPDQPNGVILDYELQYYEKELSEYNATAIKSPTNTVTVQGLKAGAIYVFQVRARTVAGYGRYSGKMYFQTMTEAEYQTSIQEKLPLIIGSSAAGLVFLIAVVVIAIVCNRRRGFERADSEYTDKLQHYTSGHMTPGMKIYIDPFTYEDPNEAVREFAKEIDISCVKIEQVIGAGEFGEVCSGHLKLPGKREIFVAIKTLKSGYTEKQRRDFLSEASIMGQFDHPNVIHLEGVVTKSTPVMIITEFMENGSLDSFLRQNDGQFTVIQLVGMLRGIAAGMKYLADMNYVHRDLAARNILVNSNLVCKVSDFGLSRFLEDDTSDPTYTSALGGKIPIRWTAPEAIQYRKFTSASDVWSYGIVMWEVMSYGERPYWDMTNQDVINAIEQDYRLPPPMDCPSALHQLMLDCWQKDRNHRPKFGQIVNTLDKMIRNPNSLKAMAPLSSGINLPLLDRTIPDYTSFNTVDEWLEAIKMGQYKESFANAGFTSFDVVSQMMMEDILRVGVTLAGHQKKILNSIQVMRAQMNQIQSVEV

SEQ ID NO: 6001 - protein, 1055 aa, Homo sapiens
MALRRLGAALLLLPLLAAVEETLMDSTTATAELGWMVHPPSGWEEVSGYDENMNTIRTYQVCNVFESSQNNWLRTKFIRRRGAHRIHVEMKFSVRDCSSIPSVPGSCKETFNLYYYEADFDSATKTFPNWMENPWVKVDTIAADESFSQVDLGGRVMKINTEVRSFGPVSRSGFYLAFQDYGGCMSLIAVRVFYRKCPRIIQNGAIFQETLSGAESTSLVAARGSCIANAEEVDVPIKLYCNGDGEWLVPIGRCMCKAGFEAVENGTVCRGCPSGTFKANQGDEACTHCPINSRTTSEGATNCVCRNGYYRADLDPLDMPCTTIPSAPQAVISSVNETSLMLEWTPPRDSGGREDLVYNIICKSCGSGRGACTRCGDNVQYAPRQLGLTEPRIYISDLLAHTQYTFEIQAVNGVTDQSPFSPQFASVNITTNQAAPSAVSIMHQVSRTVDSITLSWSQPDQPNGVILDYELQYYEKELSEYNATAIKSPTNTVTVQGLKAGAIYVFQVRARTVAGYGRYSGKMYFQTMTEAEYQTSIQEKLPLIIGSSAAGLVFLIAVVVIAIVCNRRGFERADSEYTDKLQHYTSGHMTPGMKIYIDPFTYEDPNEAVREFAKEIDISCVKIEQVIGAGEFGEVCSGHLKLPGKREIFVAIKTLKSGYTEKQRRDFLSEASIMGQFDHPNVIHLEGVVTKSTPVMIITEFMENGSLDSFLRQNDGQFTVIQLVGMLRGIAAGMKYLADMNYVHRDLAARNILVNSNLVCKVSDFGLSRFLEDDTSDPTYTSALGGKIPIRWTAPEAIQYRKFTSASDVWSYGIVMWEVMSYGERPYWDMTNQDVINAIEQDYRLPPPMDCPSALHQLMLDCWQKDRNHRPKFGQIVNTLDKMIRNPNSLKAMAPLSSGINLPLLDRTIPDYTSFNTVDEWLEAIKMGQYKESFANAGFTSFDVVSQMMMEDILRVGVTLAGHQKKILNSIQVMRAQMNQIQSVEGQPLARRPRATGRTKRCQPRDVTKKTCNSNDGKKKGMGKKKTDPGRGREIQGIFFKEDSHKESNDCSCGG

SEQ ID NO: 6002 - protein, 482 aa, Homo sapiens
MALRRLGAALLLLPLLAAVEETLMDSTTATAELGWMVHPPSGWEEVSGYDENMNTIRTYQVCNVFESSQNNWLRTKFIRRRGAHRIHVEMKFSVRDCSSIPSVPGSCKETFNLYYYEADFDSATKTFPNWMENPWVKVDTIAADESFSQVDLGGRVMKINTEVRSFGPVSRSGFYLAFQDYGGCMSLIAVRVFYRKCPRIIQNGAIFQETLSGAESTSLVAARGSCIANAEEVDVPIKLYCNGDGEWLVPIGRCMCKAGFEAVENGTVCRGCPSGTFKANQGDEACTHCPINSRTTSEGATNCVCRNGYYRADLDPLDMPCTTIPSAPQAVISSVNETSLMLEWTPPRDSGGREDLVYNIICKSCGSGRGACTRCGDNVQYAPRQLGLTEPRIYISDLLAHTQYTFEIQAVNGVTDQSPFSPQFASVNITTNQAAPSAVSIMHQVSRTVDSITLSWSQPDQPNGVILDYELQYYEKMKTQRS

SEQ ID NO: 6003 - protein, 987 aa, Homo sapiens
MELRVLLCWASLAAALEETLLNTKLETADLKWVTFPQVDGQWEELSGLDEEQHSVRTYEVCDVQRAPGQAHWLRTGWVPRRGAVHVYATLRFTMLECLSLPRAGRSCKETFTVFYYESDADTATALTPAWMENPYIKVDTVAAEHLTRKRPGAEATGKVNVKTLRLGPLSKAGFYLAFQDQGACMALLSLHLFYKKCAQLTVNLTRFPETVPRELVVPVAGSCVVDAVPAPGPSPSLYCREDGQWAEQPVTGCSCAPGFEAAEGNTKCRACAQGTFKPLSGEGSCQPCPANSHSNTIGSAVCQCRVGYFRARTDPRGAPCTTPPSAPRSVVSRLNGSSLHLEWSAPLESGGREDLTYALRCRECRPGGSCAPCGGDLTFDPGPRDLVEPWVVVRGLRPDFTYTFEVTALNGVSSLATGPVPFEPVNVTTDREVPPAVSDIRVTRSSPSSLSLAWAVPRAPSGAVLDYEVKYHEKGAEGPSSVRFLKTSENRAELRGLKRGASYLVQVRARSEAGYGPFGQEHHSQTQLDESEGWREQLALIAGTAVVGVVLVLVVIVVAVLCLRKQSNGREAEYSDKHGQYLIGHGTKVYIDPFTYEDPNEAVREFAKEIDVSYVKIEEVIGAGEFGEVCRGRLKAPGKKESCVAIKTLKGGYTERQRREFLSEASIMGQFEHPNIIRLEGVVTNSMPVMILTEFMENGALDSFLRLNDGQFTVIQLVGMLRGIASGMRYLAEMSYVHRDLAARNILVNSNLVCKVSDFGLSRFLEENSSDPTYTSSLGGKIPIRWTAPEAIAFRKFTSASDAWSYGIVMWEVMSFGERPYWDMSNQDVINAIEQDYRLPPPPDCPTSLHQLMLDCWQKDRNARPRFPQVVSALDKMIRNPASLKIVARENGGASHPLLDQRQPHYSAFGSVGEWLRAIKMGRYEESFAAAGFGSFELVSQISAEDLLRIGVTLAGHQKKILASVQHMKSQAKPGTPGGTGGPAPQY

SEQ ID NO: 6004 - protein, 935 aa, Homo sapiens
MELRVLLCWASLAAALEETLLNTKLETADLKWVTFPQVDGQWEELSGLDEEQHSVRTYEVCDVQRAPGQAHWLRTGWVPRRGAVHVYATLRFTMLECLSLPRAGRSCKETFTVFYYESDADTATALTPAWMENPYIKVDTVAAEHLTRKRPGAEATGKVNVKTLRLGPLSKAGFYLAFQDQGACMALLSLHLFYKKCAQLTVNLTRFPETVPRELVVPVAGSCVVDAVPAPGPSPSLYCREDGQWAEQPVTGCSCAPGFEAAEGNTKCRACAQGTFKPLSGEGSCQPCPANSHSNTIGSAVCQCRVGYFRARTDPRGAPCTTPPSAPRSVVSRLNGSSLHLEWSAPLESGGREDLTYALRCRECRPGGSCAPCGGDLTFDPGPRDLVEPWVVVRGLRPDFTYTFEVTALNGVSSLATGPVPFEPVNVTTDREVPPAVSDIRVTRSSPSSLSLAWAVPRAPSGAVLDYEVKYHEKGAEGPSSVRFLKTSENRAELRGLKRGASYLVQVRARSEAGYGPFGQEHHSQTQLDESEGWREQLALIAGTAVVGVVLVLVVIVVAVLCLRKQSNGREAEYSDKHGQYLIGHGTKVYIDPFTYEDPNEAVREFAKEIDVSYVKIEEVIGAGEFGEVCRGRLKAPGKKESCVAIKTLKGGYTERQRREFLSEASIMGQFEHPNIIRLEGVVTNSMPVMILTEFMENGALDSFLRLNDGQFTVIQLVGMLRGIASGMRYLAEMSYVHRDLAARNILVNSNLVCKVSDFGLSRFLEENSSDPTYTSSLGGKIPIRWTAPEAIAFRKFTSASDAWSYGIVMWEVMSFGERPYWDMSNQDVINAIEQDYRLPPPPDCPTSLHQLMLDCWQKDRNARPRFPQVVSALDKMIRNPASLKIVARENGGDLLRIGVTLAGHQKKILASVQHMKSQAKPGTPGGTGGPAPQY

SEQ ID NO: 6005 - protein, 183 aa, Homo sapiens
MEFLWAPLLGLCCSLAAADRHTVFWNSSNPKFRNEDYTIHVQLNDYVDIICPHYEDHSVADAAMEQYILYLVEHEEYQLCQPQSKDQVRWQCNRPSAKHGPEKLSEKFQRFTPFTLGKEFKEGHSYYYISHSPQAHDNPQEKRLAADDPEVRVLHSIGHSAAPRLFPLAWTVLLLPLLLLQTP

SEQ ID NO: 6006 - protein, 205 aa, Homo sapiens
MEFLWAPLLGLCCSLAAADRHTVFWNSSNPKFRNEDYTIHVQLNDYVDIICPHYEDHSVADAAMEQYILYLVEHEEYQLCQPQSKDQVRWQCNRPSAKHGPEKLSEKFQRFTPFTLGKEFKEGHSYYYISKPIHQHEDRCLRLKVTVSGKITHSPQAHDNPQEKRLAADDPEVRVLHSIGHSAAPRLFPLAWTVLLLPLLLLQTP

SEQ ID NO: 6007 - protein, 333 aa, Homo sapiens
MAVRRDSVWKYCWGVLMVLCRTAISKSIVLEPIYWNSSNSKFLPGQGLVLYPQIGDKLDIICPKVDSKTVGQYEYYKVYMVDKDQADRCTIKKENTPLLNCAKPDQDIKFTIKFQEFSPNLWGLEFQKNKDYYIISTSNGSLEGLDNQEGGVCQTRAMKILMKVGQDASSAGSTRNKDPTRRPELEAGTNGRSSTTSPFVKPNPGSSTDGNSAGHSGNNILGSEVALFAGIASGCIIFIVIIITLVVLLLKYRRRHRKHSPQHTTTLSLSTLATPKRSGNNNGSEPSDIIIPLRTADSVFCPHYEKVSGDYGHPVYIVQEMPPQSPANIYYKV

SEQ ID NO: 6008 - protein, 1207 aa, Homo sapiens
MLLTLIILLPVVSKFSFVSLSAPQHWSCPEGTLAGNGNSTCVGPAPFLIFSHGNSIFRIDTEGTNYEQLVVDAGVSVIMDFHYNEKRIYWVDLERQLLQRVFLNGSRQERVCNIEKNVSGMAINWINEEVIWSNQQEGIITVTDMKGNNSHILLSALKYPANVAVDPVERFIFWSSEVAGSLYRADLDGVGVKALLETSEKITAVSLDVLDKRLFWIQYNREGSNSLICSCDYDGGSVHISKHPTQHNLFAMSLFGDRIFYSTWKMKTIWIANKHTGKDMVRINLHSSFVPLGELKVVHPLAQPKAEDDTWEPEQKLCKLRKGNCSSTVCGQDLQSHLCMCAEGYALSRDRKYCEDVNECAFWNHGCTLGCKNTPGSYYCTCPVGFVLLPDGKRCHQLVSCPRNVSECSHDCVLTSEGPLCFCPEGSVLERDGKTCSGCSSPDNGGCSQLCVPLSPVSWECDCFPGYDLQLDEKSCAASGPQPFLLFANSQDIRHMHFDGTDYGTLLSQQMGMVYALDHDPVENKIYFAHTALKWIERANMDGSQRERLIEEGVDVPEGLAVDWIGRRFYWTDRGKSLIGRSDLNGKRSKIITKENISQPRGIAVHPMAKRLFWTDTGINPRIESSSLQGLGRLVIASSDLIWPSGITIDFLTDKLYWCDAKQSVIEMANLDGSKRRRLTQNDVGHPFAVAVFEDYVWFSDWAMPSVMRVNKRTGKDRVRLQGSMLKPSSLVVVHPLAKPGADPCLYQNGGCEHICKKRLGTAWCSCREGFMKASDGKTCLALDGHQLLAGGEVDLKNQVTPLDILSKTRVSEDNITESQHMLVAEIMVSDQDDCAPVGCSMYARCISEGEDATCQCLKGFAGDGKLCSDIDECEMGVPVCPPASSKCINTEGGYVCRCSEGYQGDGIHCLDIDECQLGEHSCGENASCTNTEGGYTCMCAGRLSEPGLICPDSTPPPHLREDDHHYSVRNSDSECPLSHDGYCLHDGVCMYIEALDKYACNCVVGYIGERCQYRDLKWWELRHAGHGQQQKVIVVAVCVVVLVMLLLLSLWGAHYYRTQKLLSKNPKNPYEESSRDVRSRRPADTEDGMSSCPQPWFVVIKEHQDLKNGGQPVAGEDGQAADGSMQPTSWRQEPQLCGMGTEQGCWIPVSSDKGSCPQVMERSFHMPSYGTQTLEGGVEKPHSLLSANPLWQQRALDPPHQMELTQ

SEQ ID NO: 6009 - protein, 1166 aa, Homo sapiens
MLLTLIILLPVVSKFSFVSLSAPQHWSCPEGTLAGNGNSTCVGPAPFLIFSHGNSIFRIDTEGTNYEQLVVDAGVSVIMDFHYNEKRIYWVDLERQLLQRVFLNGSRQERVCNIEKNVSGMAINWINEEVIWSNQQEGIITVTDMKGNNSHILLSALKYPANVAVDPVERFIFWSSEVAGSLYRADLDGVGVKALLETSEKITAVSLDVLDKRLFWIQYNREGSNSLICSCDYDGGSVHISKHPTQHNLFAMSLFGDRIFYSTWKMKTIWIANKHTGKDMVRINLHSSFVPLGELKVVHPLAQPKAEDDTWEPEQKLCKLRKGNCSSTVCGQDLQSHLCMCAEGYALSRDRKYCEDVNECAFWNHGCTLGCKNTPGSYYCTCPVGFVLLPDGKRCHQLVSCPRNVSECSHDCVLTSEGPLCFCPEGSVLERDGKTCSGCSSPDNGGCSQLCVPLSPVSWECDCFPGYDLQLDEKSCAASGPQPFLLFANSQDIRHMHFDGTDYGTLLSQQMGMVYALDHDPVENKIYFAHTALKWIERANMDGSQRERLIEEGVDVPEGLAVDWIGRRFYWTDRGKSLIGRSDLNGKRSKIITKENISQPRGIAVHPMAKRLFWTDTGINPRIESSSLQGLGRLVIASSDLIWPSGITIDFLTDKLYWCDAKQSVIEMANLDGSKRRRLTQNDVGHPFAVAVFEDYVWFSDWAMPSVMRVNKRTGKDRVRLQGSMLKPSSLVVVHPLAKPGADPCLYQNGGCEHICKKRLGTAWCSCREGFMKASDGKTCLALDGHQLLAGGEVDLKNQVTPLDILSKTRVSEDNITESQHMLVAEIMVSDQDDCAPVGCSMYARCISEGEDATCQCLKGFAGDGKLCSDIDECEMGVPVCPPASSKCINTEGGYVCRCSEGYQGDGIHCLDSTPPPHLREDDHHYSVRNSDSECPLSHDGYCLHDGVCMYIEALDKYACNCVVGYIGERCQYRDLKWWELRHAGHGQQQKVIVVAVCVVVLVMLLLLSLWGAHYYRTQKLLSKNPKNPYEESSRDVRSRRPADTEDGMSSCPQPWFVVIKEHQDLKNGGQPVAGEDGQAADGSMQPTSWRQEPQLCGMGTEQGCWIPVSSDKGSCPQVMERSFHMPSYGTQTLEGGVEKPHSLLSANPLWQQRALDPPHQMELTQ

SEQ ID NO: 6010 - protein, 1165 aa, Homo sapiens
MLLTLIILLPVVSKFSFVSLSAPQHWSCPEGTLAGNGNSTCVGPAPFLIFSHGNSIFRIDTEGTNYEQLVVDAGVSVIMDFHYNEKRIYWVDLERQLLQRVFLNGSRQERVCNIEKNVSGMAINWINEEVIWSNQQEGIITVTDMKGNNSHILLSALKYPANVAVDPVERFIFWSSEVAGSLYRADLDGVGVKALLETSEKITAVSLDVLDKRLFWIQYNREGSNSLICSCDYDGGSVHISKHPTQHNLFAMSLFGDRIFYSTWKMKTIWIANKHTGKDMVRINLHSSFVPLGELKVVHPLAQPKAEDDTWEPDVNECAFWNHGCTLGCKNTPGSYYCTCPVGFVLLPDGKRCHQLVSCPRNVSECSHDCVLTSEGPLCFCPEGSVLERDGKTCSGCSSPDNGGCSQLCVPLSPVSWECDCFPGYDLQLDEKSCAASGPQPFLLFANSQDIRHMHFDGTDYGTLLSQQMGMVYALDHDPVENKIYFAHTALKWIERANMDGSQRERLIEEGVDVPEGLAVDWIGRRFYWTDRGKSLIGRSDLNGKRSKIITKENISQPRGIAVHPMAKRLFWTDTGINPRIESSSLQGLGRLVIASSDLIWPSGITIDFLTDKLYWCDAKQSVIEMANLDGSKRRRLTQNDVGHPFAVAVFEDYVWFSDWAMPSVMRVNKRTGKDRVRLQGSMLKPSSLVVVHPLAKPGADPCLYQNGGCEHICKKRLGTAWCSCREGFMKASDGKTCLALDGHQLLAGGEVDLKNQVTPLDILSKTRVSEDNITESQHMLVAEIMVSDQDDCAPVGCSMYARCISEGEDATCQCLKGFAGDGKLCSDIDECEMGVPVCPPASSKCINTEGGYVCRCSEGYQGDGIHCLDIDECQLGEHSCGENASCTNTEGGYTCMCAGRLSEPGLICPDSTPPPHLREDDHHYSVRNSDSECPLSHDGYCLHDGVCMYIEALDKYACNCVVGYIGERCQYRDLKWWELRHAGHGQQQKVIVVAVCVVVLVMLLLLSLWGAHYYRTQKLLSKNPKNPYEESSRDVRSRRPADTEDGMSSCPQPWFVVIKEHQDLKNGGQPVAGEDGQAADGSMQPTSWRQEPQLCGMGTEQGCWIPVSSDKGSCPQVMERSFHMPSYGTQTLEGGVEKPHSLLSANPLWQQRALDPPHQMELTQ

SEQ ID NO: 6011 - protein, 1210 aa, Homo sapiens [sequence omitted]

SEQ ID NO: 6012 - protein, 628 aa, Homo sapiens
MRPSGTAGAALLALLAALCPASRALEEKKVCQGTSNKLTQLGTFEDHFLSLQRMFNNCEVVLGNLEITYVQRNYDLSFLKTIQEVAGYVLIALNTVERIPLENLQIIRGNMYYENSYALAVLSNYDANKTGLKELPMRNLQEILHGAVRFSNNPALCNVESIQWRDIVSSDFLSNMSMDFQNHLGSCQKCDPSCPNGSCWGAGEENCQKLTKIICAQQCSGRCRGKSPSDCCHNQCAAGCTGPRESDCLVCRKFRDEATCKDTCPPLMLYNPTTYQMDVNPEGKYSFGATCVKKCPRNYVVTDHGSCVRACGADSYEMEEDGVRKCKKCEGPCRKVCNGIGIGEFKDSLSINATNIKHFKNCTSISGDLHILPVAFRGDSFTHTPPLDPQELDILKTVKEITGFLLIQAWPENRTDLHAFENLEIIRGRTKQHGQFSLAVVSLNITSLGLRSLKEISDGDVIISGNKNLCYANTINWKKLFGTSGQKTKIISNRGENSCKATGQVCHALCSPEGCWGPEPRDCVSCRNVSRGRECVDKCNLLEGEPREFVENSECIQCHPECLPQAMNITCTGRGPDNCIQCAHYIDGPHCVKTCPAGVMGENNTLVWKYADAGHVCHLCHPNCTYGS

SEQ ID NO: 6013 - protein, 705 aa, Homo sapiens
MRPSGTAGAALLALLAALCPASRALEEKKVCQGTSNKLTQLGTFEDHFLSLQRMFNNCEVVLGNLEITYVQRNYDLSFLKTIQEVAGYVLIALNTVERIPLENLQIIRGNMYYENSYALAVLSNYDANKTGLKELPMRNLQEILHGAVRFSNNPALCNVESIQWRDIVSSDFLSNMSMDFQNHLGSCQKCDPSCPNGSCWGAGEENCQKLTKIICAQQCSGRCRGKSPSDCCHNQCAAGCTGPRESDCLVCRKFRDEATCKDTCPPLMLYNPTTYQMDVNPEGKYSFGATCVKKCPRNYVVTDHGSCVRACGADSYEMEEDGVRKCKKCEGPCRKVCNGIGIGEFKDSLSINATNIKHFKNCTSISGDLHILPVAFRGDSFTHTPPLDPQELDILKTVKEITGFLLIQAWPENRTDLHAFENLEIIRGRTKQHGQFSLAVVSLNITSLGLRSLKEISDGDVIISGNKNLCYANTINWKKLFGTSGQKTKIISNRGENSCKATGQVCHALCSPEGCWGPEPRDCVSCRNVSRGRECVDKCNLLEGEPREFVENSECIQCHPECLPQAMNITCTGRGPDNCIQCAHYIDGPHCVKTCPAGVMGENNTLVWKYADAGHVCHLCHPNCTYGPGNESLKAMLFCLFKLSSCNQSNDGSVSHQSGSPAAQESCLGWIPSLLPSEFQLGWGGCSHLHAWPSASVIITASSCH

SEQ ID NO: 6014 - protein, 1080 aa, Homo sapiens
NRTEGAAHEKFTGNPAWRRAVQQQPCPVVESIQWRDIVSSDFLSNMSMDFQNHLGSCQKCDPSCPNGSCWGAGEENCQKLTKIICAQQCSGRCRGKSPSDCCHNQCAAGCTGPRESDCLVCRKFRDEATCKDTCPPLMLYNPTTYQMDVNPEGKYSFGATCVKKCPRNYVVTDHGSCVRACGADSYEMEEDGVRKCKKCEGPCRKVCNGIGIGEFKDSLSINATNIKHFKNCTSISGDLHILPVAFRGDSFTHTPPLDPQELDILKTVKEITGFLLIQAWPENRTDLHAFENLEIIRGRTKQHGQFSLAVVSLNITSLGLRSLKEISDGDVIISGNKNLCYANTINWKKLFGTSGQKTKIISNRGENSCKATGQVCHALCSPEGCWGPEPRDCVSCRNVSRGRECVDKCNLLEGEPREFVENSECIQCHPECLPQAMNITCTGRGPDNCIQCAHYIDGPHCVKTCPAGVMGENNTLVWKYADAGHVCHLCHPNCTYGCTGPGLEGCPTNGPKIPSIATGMVGALLLLLVVALGIGLFMRRRHIVRKRTLRRLLQERELVEPLTPSGEAPNQALLRILKETEFKKIKVLGSGAFGTVYKGLWIPEGEKVKIPVAIKELREATSPKANKEILDEAYVMASVDNPHVCRLLGICLTSTVQLITQLMPFGCLLDYVREHKDNIGSQYLLNWCVQIAKGMNYLEDRRLVHRDLAARNVLVKTPQHVKITDFGLAKLLGAEEKEYHAEGGKVPIKWMALESILHRIYTHQSDVWSYGVTVWELMTFGSKPYDGIPASEISSILEKGERLPQPPICTIDVYMIMVKCWMIDADSRPKFRELIIEFSKMARDPQRYLVIQGDERMHLPSPTDSNFYRALMDEEDMDDVVDADEYLIPQQGFFSSPSTSRTPLLSSLSATSNNSTVACIDRNGLQSCPIKEDSFLQRYSSDPTGALTEDSIDDTFLPVPEYINQSVPKRPAGSVQNPVYHNQPLNPAPSRDPHYQDPHSTAVGNPEYLNTVQPTCVNSTFDSPAHWAQKGSHQISLDNPDYQQDFFPKEAKPNGIFKGSTAENAEYLRVAPQSSEFIGA

SEQ ID NO: 6015 - protein, 405 aa, Homo sapiens
MRPSGTAGAALLALLAALCPASRALEEKKVCQGTSNKLTQLGTFEDHFLSLQRMFNNCEVVLGNLEITYVQRNYDLSFLKTIQEVAGYVLIALNTVERIPLENLQIIRGNMYYENSYALAVLSNYDANKTGLKELPMRNLQEILHGAVRFSNNPALCNVESIQWRDIVSSDFLSNMSMDFQNHLGSCQKCDPSCPNGSCWGAGEENCQKLTKIICAQQCSGRCRGKSPSDCCHNQCAAGCTGPRESDCLVCRKFRDEATCKDTCPPLMLYNPTTYQMDVNPEGKYSFGATCVKKCPRNYVVTDHGSCVRACGADSYEMEEDGVRKCKKCEGPCRKVCNGIGIGEFKDSLSINATNIKHFKNCTSISGDLHILPVAFRGDSFTHTPPLDPQELDILKTVKEITGLS

SEQ ID NO: 6016 - protein, 657 aa, Homo sapiens
MRPSGTAGAALLALLAALCPASRALEEKKVCQGTSNKLTQLGTFEDHFLSLQRMFNNCEVVLGNLEITYVQRNYDLSFLKTIQEVAGYVLIALNTVERIPLENLQIIRGNMYYENSYALAVLSNYDANKTGLKELPMRNLQEILHGAVRFSNNPALCNVESIQWRDIVSSDFLSNMSMDFQNHLGSCQKCDPSCPNGSCWGAGEENCQKLTKIICAQQCSGRCRGKSPSDCCHNQCAAGCTGPRESDCLVCRKFRDEATCKDTCPPLMLYNPTTYQMDVNPEGKYSFGATCVKKCPRNYVVTDHGSCVRACGADSYEMEEDGVRKCKKCEGPCRKVCNGIGIGEFKDSLSINATNIKHFKNCTSISGDLHILPVAFRGDSFTHTPPLDPQELDILKTVKEITGFLLIQAWPENRTDLHAFENLEIIRGRTKQHGQFSLAVVSLNITSLGLRSLKEISDGDVIISGNKNLCYANTINWKKLFGTSGQKTKIISNRGENSCKATGQVCHALCSPEGCWGPEPRDCVSCRNVSRGRECVDKCNLLEGEPREFVENSECIQCHPECLPQAMNITCTGRGPDNCIQCAHYIDGPHCVKTCPAGVMGENNTLVWKYADAGHVCHLCHPNCTYGCTGPGLEGCPTNGSYIVSHFPRSFYKMSVH

SEQ ID NO: 6017 - protein, 1157 aa, Homo sapiens
MFNNCEVVLGNLEITYVQRNYDLSFLKTIQEVAGYVLIALNTVERIPLENLQIIRGNMYYENSYALAVLSNYDANKTGLKELPMRNLQEILHGAVRFSNNPALCNVESIQWRDIVSSDFLSNMSMDFQNHLGSCQKCDPSCPNGSCWGAGEENCQKLTKIICAQQCSGRCRGKSPSDCCHNQCAAGCTGPRESDCLVCRKFRDEATCKDTCPPLMLYNPTTYQMDVNPEGKYSFGATCVKKCPRNYVVTDHGSCVRACGADSYEMEEDGVRKCKKCEGPCRKVCNGIGIGEFKDSLSINATNIKHFKNCTSISGDLHILPVAFRGDSFTHTPPLDPQELDILKTVKEITGFLLIQAWPENRTDLHAFENLEIIRGRTKQHGQFSLAVVSLNITSLGLRSLKEISDGDVIISGNKNLCYANTINWKKLFGTSGQKTKIISNRGENSCKATGQVCHALCSPEGCWGPEPRDCVSCRNVSRGRECVDKCNLLEGEPREFVENSECIQCHPECLPQAMNITCTGRGPDNCIQCAHYIDGPHCVKTCPAGVMGENNTLVWKYADAGHVCHLCHPNCTYGCTGPGLEGCPTNGPKIPSIATGMVGALLLLLVVALGIGLFMRRRHIVRKRTLRRLLQERELVEPLTPSGEAPNQALLRILKETEFKKIKVLGSGAFGTVYKGLWIPEGEKVKIPVAIKELREATSPKANKEILDEAYVMASVDNPHVCRLLGICLTSTVQLITQLMPFGCLLDYVREHKDNIGSQYLLNWCVQIAKGMNYLEDRRLVHRDLAARNVLVKTPQHVKITDFGLAKLLGAEEKEYHAEGGKVPIKWMALESILHRIYTHQSDVWSYGVTVWELMTFGSKPYDGIPASEISSILEKGERLPQPPICTIDVYMIMVKCWMIDADSRPKFRELIIEFSKMARDPQRYLVIQGDERMHLPSPTDSNFYRALMDEEDMDDVVDADEYLIPQQGFFSSPSTSRTPLLSSLSATSNNSTVACIDRNGLQSCPIKEDSFLQRYSSDPTGALTEDSIDDTFLPVPEYINQSVPKRPAGSVQNPVYHNQPLNPAPSRDPHYQDPHSTAVGNPEYLNTVQPTCVNSTFDSPAHWAQKGSHQISLDNPDYQQDFFPKEAKPNGIFKGSTAENAEYLRVAPQSSEFIGA

SEQ ID NO: 6018 - protein, 1091 aa, Homo sapiens
MRPSGTAGAALLALLAALCPASRALEEKKVCQGTSNKLTQLGTFEDHFLSLQRMFNNCEVVLGNLEITYVQRNYDLSFLKTIQEVAGYVLIALNTVERIPLENLQIIRGNMYYENSYALAVLSNYDANKTGLKELPMRNLQGQKCDPSCPNGSCWGAGEENCQKLTKIICAQQCSGRCRGKSPSDCCHNQCAAGCTGPRESDCLVCRKFRDEATCKDTCPPLMLYNPTTYQMDVNPEGKYSFGATCVKKCPRNYVVTDHGSCVRACGADSYEMEEDGVRKCKKCEGPCRKVCNGIGIGEFKDSLSINATNIKHFKNCTSISGDLHILPVAFRGDSFTHTPPLDPQELDILKTVKEITGFLLIQAWPENRTDLHAFENLEIIRGRTKQHGQFSLAVVSLNITSLGLRSLKEISDGDVIISGNKNLCYANTINWKKLFGTSGQKTKIISNRGENSCKATGQVCHALCSPEGCWGPEPRDCVSCRNVSRGRECVDKCNLLEGEPREFVENSECIQCHPECLPQAMNITCTGRGPDNCIQCAHYIDGPHCVKTCPAGVMGENNTLVWKYADAGHVCHLCHPNCTYGCTGPGLEGCPTNGPKIPSIATGMVGALLLLLVVALGIGLFMRRRHIVRKRTLRRLLQERELVEPLTPSGEAPNQALLRILKETEFKKIKVLGSGAFGTVYKGLWIPEGEKVKIPVAIKELREATSPKANKEILDEAYVMASVDNPHVCRLLGICLTSTVQLITQLMPFGCLLDYVREHKDNIGSQYLLNWCVQIAKGMNYLEDRRLVHRDLAARNVLVKTPQHVKITDFGLAKLLGAEEKEYHAEGGKVPIKWMALESILHRIYTHQSDVWSYGVTVWELMTFGSKPYDGIPASEISSILEKGERLPQPPICTIDVYMIMVKCWMIDADSRPKFRELIIEFSKMARDPQRYLVIQGDERMHLPSPTDSNFYRALMDEEDMDDVVDADEYLIPQQGFFSSPSTSRTPLLSSLSATSNNSTVACIDRNGLQSCPIKEDSFLQRYSSDPTGALTEDSIDDTFLPVPGEWLVWKQSCSSTSSTHSAAASLQCPSQVLPPASPEGETVADLQTQ

SEQ ID NO: 6019 - protein, 464 aa, Homo sapiens
MSSLTKIICAQQCSGRCRGKSPSDCCHNQCAAGCTGPRESDCLVCRKFRDEATCKDTCPPLMLYNPTTYQMDVNPEGKYSFGATCVKKCPRNYVVTDHGSCVRACGADSYEMEEDGVRKCKKCEGPCRKVCNGIGIGEFKDSLSINATNIKHFKNCTSISGDLHILPVAFRGDSFTHTPPLDPQELDILKTVKEITGFLLIQAWPENRTDLHAFENLEIIRGRTKQHGQFSLAVVSLNITSLGLRSLKEISDGDVIISGNKNLCYANTINWKKLFGTSGQKTKIISNRGENSCKATGQVCHALCSPEGCWGPEPRDCVSCRNVSRGRECVDKCNLLEGEPREFVENSECIQCHPECLPQAMNITCTGRGPDNCIQCAHYIDGPHCVKTCPAGVMGENNTLVWKYADAGHVCHLCHPNCTYGCTGPGLEGCPTNGPKIPSIATGMVGALLLLLVVALGIGLFMRR

SEQ ID NO: 6020 - protein, 883 aa, Homo sapiens
MAENSVLTSTTGRTSLADSSIFDSKVTEISKENLLIGSTSYVEEEMPQIETRVILVQEAGKQEELIKALKDIKVGFVKMESVEEFEGLDSPEFENVFVVTDFQDSVFNDLYKADCRVIGPPVVLNCSQKGEPLPFSCRPLYCTSMMNLVLCFTGFRKKEELVRLVTLVHHMGGVIRKDFNSKVTHLVANCTQGEKFRVAVSLGTPIMKPEWIYKAWERRNEQDFYAAVDDFRNEFKVPPFQDCILSFLGFSDEEKTNMEEMTEMQGGKYLPLGDERCTHLVVEENIVKDLPFEPSKKLYVVKQEWFWGSIQMDARAGETMYLYEKANTPELKKSVSMLSLNTPNSNRKRRRLKETLAQLSRETDVSPFPPRKRPSAEHSLSIGSLLDISNTPESSINYGDTPKSCTKSSKSSTPVPSKQSARWQVAKELYQTESNYVNILATIIQLFQVPLEEEGQRGGPILAPEEIKTIFGSIPDIFDVHTKIKDDLEDLIVNWDESKSIGDIFLKYSKDLVKTYPPFVNFFEMSKETIIKCEKQKPRFHAFLKINQAKPECGRQSLVELLIRPVQRLPSVALLLNDLKKHTADENPDKSTLEKAIGSLKEVMTHINEDKRKTEAQKQIFDVVYEVDGCPANLLSSHRSLVQRVETISLGEHPCDRGEQVTLFLFNDCLEIARKRHKVIGTFRSPHGQTRPPASLKHIHLMPLSQIKKVLDIRETEDCHNAFALLVRPPTEQANVLLSFQMTSDELPKENWLKMLCRHVANTICKADAENLIYTADPESFEVNTKDMDSTLSRASRAIKKTSKKVTRAFSFSKTPKRALRRALMTSHGSVEGRSPSSNDKHVMSRLSSTSSLAGIPSPSLVSLPSFFERRSHTLSRSTTHLI

SEQ ID NO: 6021 - protein, 18 aa, Homo sapiens
MAENSVLTSTTGRTSLAD

SEQ ID NO: 6022 - protein, 914 aa, Homo sapiens
MAENSVLTSTTGRTSLADSSIFDSKVTEISKENLLIGSTSYVEEEMPQIETRVILVQEAGKQEELIKALKTIKIMEVPVIKIKESCPGKSDEKLIKSVINMDIKVGFVKMESVEEFEGLDSPEFENVFVVTDFQDSVFNDLYKADCRVIGPPVVLNCSQKGEPLPFSCRPLYCTSMMNLVLCFTGFRKKEELVRLVTLVHHMGGVIRKDFNSKVTHLVANCTQGEKFRVAVSLGTPIMKPEWIYKAWERRNEQDFYAAVDDFRNEFKVPPFQDCILSFLGFSDEEKTNMEEMTEMQGGKYLPLGDERCTHLVVEENIVKDLPFEPSKKLYVVKQEWFWGSIQMDARAGETMYLYEKANTPELKKSVSMLSLNTPNSNRKRRRLKETLAQLSRETDVSPFPPRKRPSAEHSLSIGSLLDISNTPESSINYGDTPKSCTKSSKSSTPVPSKQSARWQVAKELYQTESNYVNILATIIQLFQVPLEEEGQRGGPILAPEEIKTIFGSIPDIFDVHTKIKDDLEDLIVNWDESKSIGDIFLKYSKDLVKTYPPFVNFFEMSKETIIKCEKQKPRFHAFLKINQAKPECGRQSLVELLIRPVQRLPSVALLLNDLKKHTADENPDKSTLEKAIGSLKEVMTHINEDKRKTEAQKQIFDVVYEVDGCPANLLSSHRSLVQRVETISLGEHPCDRGEQVTLFLFNDCLEIARKRHKVIGTFRSPHGQTRPPASLKHIHLMPLSQIKKVLDIRETEDCHNAFALLVRPPTEQANVLLSFQMTSDELPKENWLKMLCRHVANTICKADAENLIYTADPESFEVNTKDMDSTLSRASRAIKKTSKKVTRAFSFSKTPKRALRRALMTSHGSVEGRSPSSNDKHVMSRLSSTSSLAGIPSPSLVSLPSFFERRSHTLSRSTTHLI

SEQ ID NO: 6023 - protein, 159 aa, Homo sapiens
MAENSVLTSTTGRTSLADSSIFDSKVTEISKENLLIGSTSYVEEEMPQIETRVILVQEAGKQEELIKALKDIKVGFVKMESVEEFEGLDSPEFENVFVVTDFQDSVFNDLYKADCRVIGPPVVLNCSQKGEPLPFSCRPLYCTSMMNLVLCFTGFRKKE

SEQ ID NO: 6024 - protein, 882 aa, Homo sapiens
MAENSVLTSTTGRTSLADSSIFDSKVTEISKENLLIGSTSYVEEMPQIETRVILVQEAGKQEELIKALKDIKVGFVKMESVEEFEGLDSPEFENVFVVTDFQDSVFNDLYKADCRVIGPPVVLNCSQKGEPLPFSCRPLYCTSMMNLVLCFTGFRKKEELVRLVTLVHHMGGVIRKDFNSKVTHLVANCTQGEKFRVAVSLGTPIMKPEWIYKAWERRNEQDFYAAVDDFRNEFKVPPFQDCILSFLGFSDEEKTNMEEMTEMQGGKYLPLGDERCTHLVVEENIVKDLPFEPSKKLYVVKQEWFWGSIQMDARAGETMYLYEKANTPELKKSVSMLSLNTPNSNRKRRRLKETLAQLSRETDVSPFPPRKRPSAEHSLSIGSLLDISNTPESSINYGDTPKSCTKSSKSSTPVPSKQSARWQVAKELYQTESNYVNILATIIQLFQVPLEEEGQRGGPILAPEEIKTIFGSIPDIFDVHTKIKDDLEDLIVNWDESKSIGDIFLKYSKDLVKTYPPFVNFFEMSKETIIKCEKQKPRFHAFLKINQAKPECGRQSLVELLIRPVQRLPSVALLLNDLKKHTADENPDKSTLEKAIGSLKEVMTHINEDKRKTEAQKQIFDVVYEVDGCPANLLSSHRSLVQRVETISLGEHPCDRGEQVTLFLFNDCLEIARKRHKVIGTFRSPHGQTRPPASLKHIHLMPLSQIKKVLDIRETEDCHNAFALLVRPPTEQANVLLSFQMTSDELPKENWLKMLCRHVANTICKADAENLIYTADPESFEVNTKDMDSTLSRASRAIKKTSKKVTRAFSFSKTPKRALRRALMTSHGSVEGRSPSSNDKHVMSRLSSTSSLAGIPSPSLVSLPSFFERRSHTLSRSTTHLI

SEQ ID NO: 6025 - protein, 106 aa, Homo sapiens
MAENSVLTSTTGRTSLADSSIFDSKVTEISKENLLIGSTSYVEEEMPQIETRVILVQEAGKQEELIKALKDIKVGFVKMESVEEFEGLDSPEFENVFVVTDFQDSV

SEQ ID NO: 6026 - protein, 927 aa, Homo sapiens
MAENSVLTSTTGRTSLADSSIFDSKVTEISKENLLIGSTSYVEEEMPQIETRVILVQEAGKQEELIKALKDIKVGFVKMESVEEFEGLDSPEFENVFVVTDFQDSVFNDLYKADCRVIGPPVVLNCSQKGEPLPFSCRPLYCTSMMNLVLCFTGFRKKEELVRLVTLVHHMGGVIRKDFNSKVTHLVANCTQGEKFRVAVSLGTPIMKPEWIYKAWERRNEQDFYAAVDDFRNEFKVPPFQDCILSFLGFSDEEKTNMEEMTEMQGGKYLPLGDERCTHLVVEENIVKDLPFEPSKKLYVVKQEWFWGSIQMDARAGETMYLYEKANTPELKKSVSMLSLNTPNSNRKRRRLKETLAQLSRETDVSPFPPRKRPSAEHSLSIGSLLDISNTPESSINYGDTPKSCTKSSKSSTPVPSKQSARWQVAKELYQTESNYVNILATIIQLFQVPLEEEGQRGGPILAPEEIKTIFGSIPDIFDVHTKIKDDLEDLIVNWDESKSIGDIFLKYSKDLVKTYPPFVNFFEMSKETIIKCEKQKPRFHAFLKINQAKPECGRQSLVELLIRPVQRLPSVALLLNDLKKHTADENPDKSTLEKAIGSLKEVMTHINEDKRKTEAQKQIFDVVYEVDGCPANLLSSHRSLVQRVETISLGEHPCDRGEQVTLFLFNDCLEIARKRHKVIGTFRSPHGQTRPPASLKHIHLMPLSQIKKVLDIRETEDCHNAFALLVRPPTEQANVLLSFQMTSDELPKENWLKMLCRHVANTICKADAENLIYTADPESFEVNTKDMDSTLSRASRAIKKTSKKVTRAFSFSKTPKRALRRALMTSHGSVEGRSPSSNDKHVMSRLSSTSSLAITHSVSTSNVIGFTKHVYVQRLNSTGGRSQYSWFQSVRHSAFRASFSEILEGNTDFSNFKKVLSKSSLTFVKN

SEQ ID NO: 6027 - protein, 883 aa, Homo sapiens; identical to SEQ ID NO: 6020

SEQ ID NO: 6028 - protein, 914 aa, Homo sapiens; identical to SEQ ID NO: 6022

SEQ ID NO: 6029 - protein, 462 aa, Homo sapiens
MSIAGVAAQEIRVPLKTGFLHNGRAMGNMRKTYWSSRSEFKNNFLNIDPITMAYSLNSSAQERLIPLGHASKSAPMNGHCFAENGPSQKSSLPPLLIPPSENLGPHEEDQVVCGFKKLTVNGVCASTPPLTPIKNSPSLFPCAPLCERGSRPLPPLPISEALSLDDTDCEVEFLTSSDTDFLLEDSTLSDFKYDVPGRRSFRGCGQINYAYFDTPAVSAADLSYVSDQNGGVPDPNPPPPQTHRRLRRSHSGPAGSFNKPAIRISNCCIHRASPNSDEDKPEVPPRVPIPPRPVKPDYRRWSAEVTSSTYSDEDRPPKVPPREPLSPSNSRTPSPKSLPSYLNGVMPPTQSFAPDPKYVSSKALQRQNSEGSASKVPCILPIIENGKKVSSTHYYLLPERPPYLDKYEKFFREAEETNGGAQIQPLPADCGISSATEKPDSKTKMDLGGHVKRKHLSYVVSP

SEQ ID NO: 6030 - protein, 570 aa, Homo sapiens
MALKKSSPSLDSGDSDSEELPTFAFLKKEPSSTKRRQPEREEKIVVVDISDCEASCPPAPELFSPPVPEIAETVTQTQPVRLLSSESEDEEEFIPLAQRLTCKFLTHKQLSPEDSSSPVKSVLDHQNNEGASCDWKKPFPKIPEVPLHDTPERSAADNKDLILDPCCQLPAYLSTCPGQSSSLAVTKTNSDILPPQKKTKPSQKVQGRGSHGCRQQRQARQKESTLRRQERKNAALVTRMKAQRPEECLKHIIVVLDPVLLQMEGGGQLLGALQTMECRCVIEAQAVPCSVTWRRRAGPSEDREDWVEEPTVLVLLRAEAFVSMIDNGKQGSLDSTMKGKETLQGFVTDITAKTAGKALSLVIVDQEKCFSAQNPPRRGKQGANKQTKKQQQRQPEASIGSMVSRVDAEEALVDLQLHTEAQAQIVQSWKELADFTCAFTKAVAEAPFKKLRDETTFSFCLESDWAGGVKVDLAGRGLALVWRRQIQQLNRVSLEMASAVVNAYPSPQLLVQAYQQCFSDKERQNLLADIQVRRGEGVTSTSRRIGPELSRRIYLQMTTLQPHLSLDSAD

SEQ ID NO: 6031 - protein, 583 aa, Homo sapiens
MALKKSSPSLDSGDSDSEELPTFAFLKKEPSSTKRRQPEREEKIVVVDISDCEASCPPAPELFSPPVPEIAETVTQTQPVRLLSSESEDEEEFIPLAQRLTCKFLTHKQLSPEDSSSPVKSVLDHQNNEGASCDWKKPFPKIPEVPLHDTPERSAADNKDLILDPCCQLPAYLSTCPGQSSSLAVTKTNSDILPPQKKTKPSQKVQGRGSHGCRQQRQARQKESTLRRQERKNAALVTRMKAQRPEECLKHIIVVLDPVLLQMEGGGQLLGALQTMECRCVIEAQAVPCSVTWRRRAGPSEDREDWVEEPTVLVLLRAEAFVSMIDNGKQGSLDSTMKGKETLQGFVTDITAKTAGKALSLVIVDQEKCFSLELLFFDFLPCTSAQNPPRRGKQGANKQTKKQQQRQPEASIGSMVSRVDAEEALVDLQLHTEAQAQIVQSWKELADFTCAFTKAVAEAPFKKLRDETTFSFCLESDWAGGVKVDLAGRGLALVWRRQIQQLNRVSLEMASAVVNAYPSPQLLVQAYQQCFSDKERQNLLADIQVRRGEGVTSTSRRIGPELSRRIYLQMTTLQPHLSLDSAD

SEQ ID NO: 6032 - protein, 583 aa, Homo sapiens; identical to SEQ ID NO: 6031

SEQ ID NO: 6033 - protein, 595 aa, Homo sapiens [sequence omitted]

SEQ ID NO: 6034 - protein, 595 aa, Homo sapiens [sequence omitted]

SEQ ID NO: 6035 - protein, 182 aa, Homo sapiens
MESAKETRYCAVCNDYASGYHYGVWSCEGCKAFFKRSIQGHNDYMCPATNQCTIDKNRRKSCQACRLRKCYEVGMMKGGIRKDRRGGRMLKHKLLLILSHIRHMSNKGMEHLYSMKCKNVVPLYDLLLEMLDAHRLHAPTSRGGASVEETDQSHLATAGSTSSHSLQKYYITGEAEGFPATV

SEQ ID NO: 6036 - protein, 84 aa, Homo sapiens
MTMTLHTKASGMALLHQIQGNELEPLNRPQLKIPLERPLGEVYLDSSKPAVYNYPEGAAYEFNAAAAANAQVYGQTGLPYGPGS

SEQ ID NO: 6037 - protein, 334 aa, Homo sapiens
MTMTLHTKASGMALLHQIQGNELEPLNRPQLKIPLERPLGEVYLDSSKPAVYNYPEGAAYEFNAAAAANAQVYGQTGLPYGPGSEAAAFGSNGLGGFPPLNSVSPSPLMLLHPPPQLSPFLQPHGQQVPYYLENEPSGYTVREAGPPAFYRNQGKCVEGMVEIFDMLLATSSRFRMMNLQGEEFVCLKSIILLNSGVYTFLSSTLKSLEEKDHIHRVLDKITDTLIHLMAKAGLTLQQQHQRLAQLLLILSHIRHMSNKGMEHLYSMKCKNVVPLYDLLLEMLDAHRLHAPTSRGGASVEETDQSHLATAGSTSSHSLQKYYITGEAEGFPATV

SEQ ID NO: 6038 - protein, 107 aa, Homo sapiens
HNDYMCPATNQCTIDKNRRKSCQACRLRKCYEVGMMKGGFVDLTLHDQVHLLECAWLEILMIGLVWRSMEHPGKLLFAPNLLLDRNQGKCVEGMVEIFDMLLATSSR

SEQ ID NO: 6039 - protein, 388 aa, Homo sapiens
  VARIANT 1: note = MOD_RES - Any amino acid
XLKIISCQPSDKPVPPGENAPEWRAGQPGSAPRSHCGRSAAGPGHRRPLCDFNGEGPNSDNRRQGGRERLASTNDKGSMAMESAKETRYCAVCNDYASGYHYGVWSCEGCKAFFKRSIQGHNDYMCPATNQCTIDKNRRKSCQACRLRKCYEVGMMKGGIRKDRRGGRMLKHKRQRDDGEGRGEVGSAGDMRAANLWPSPLMIKRSKKNSLALSLTADQMVSALLDAEPPILYSEYDPTRPFSEASMMGLLTNLADRELVHMINWAKRVPGFVDLTLHDQVHLLECAWLEILMIGLVWRSMEHPGKLLFAPNLLLDRNQGKCVEGMVEIFDMLLATSSRFRMMNLQGEEFVCLKSIILLNSGISHVEAKKRILNLHPKIFGNKWFPRV

SEQ ID NO: 6040 - protein, 270 aa, Homo sapiens
MCPATNQCTIDKNRRKSCQACRLRKCYEVGMMKGGIRKDRRGGRMLKHKRQRDDGEGRGEVGSAGDMRAANLWPSPLMIKRSKKNSLALSLTADQMVSALLDAEPPILYSEYDPTRPFSEASMMGLLTNLADRELVHMINWAKRVPGFVDLTLHDQVHLLECAWLEILMIGLVWRSMEHPGKLLFAPNLLLDSNKGMEHLYSMKCKNVVPLYDLLLEMLDAHRLHAPTSRGGASVEETDQSHLATAGSTSSHSLQKYYITGEAEGFPATV

SEQ ID NO: 6041 - protein, 523 aa, Homo sapiens
MTMTLHTKASGMALLHQIQGNELEPPPLNSVSPSPLMLLHPPPQLSPFLQPHGQQVPYYLENEPSGYTVREAGPPAFYRPNSDNRRQGGRERLASTNDKGSMAMESAKETRYCAVCNDYASGYHYGVWSCEGCKAFFKRSIQGHNDYMCPATNQCTIDKNRRKSCQACRLRKCYEVGMMKGGIRKDRRGGRMLKHKRQRDDGEGRGEVGSAGDMRAANLWPSPLMIKRSKKNSLALSLTADQMVSALLDAEPPILYSEYDPTRPFSEASMMGLLTNLADRELVHMINWAKRVPGFVDLTLHDQVHLLECAWLEILMIGLVWRSMEHPGKLLFAPNLLLDRNQGKCVEGMVEIFDMLLATSSRFRMMNLQGEEFVCLKSIILLNSGVYTFLSSTLKSLEEKDHIHRVLDKITDTLIHLMAKAGLTLQQQHQRLAQLLLILSHIRHMSNKGMEHLYSMKCKNVVPLYDLLLEMLDAHRLHAPTSRGGASVEETDQSHLATAGSTSSHSLQKYYITGEAEGFPATV

SEQ ID NO: 6042 - protein, 595 aa, Homo sapiens [sequence omitted]

SEQ ID NO: 6043 - protein, 595 aa, Homo sapiens [sequence omitted]

SEQ ID NO: 6044 - protein, 115 aa, Homo sapiens
MTMTLHTKASGMALLHQIQGNELEPLNRPQLKIPLERPLGEVYLDSSKPAVYNYPEGAAYEFNAAAAANAQVYGQTGLPYGPGSEAAAFGSNGLGGFPPLNSVSPSPLMLLHPPP

SEQ ID NO: 6045 - protein, 483 aa, Homo sapiens
MTMTLHTKASGMALLHQIQGNELEPLNRPQLKIPLERPLGEVYLDSSKPAVYNYPEGAAYEFNAAAAANAQVYGQTGLPYGPGSEAAAFGSNGLGGFPPLNSVSPSPLMLLHPPPQLSPFLQPHGQQVPYYLENEPSGYTVREAGPPAFYRPNSDNRRQGGRERLASTNDKGSMAMESAKETRYCAVCNDYASGYHYGVWSCEGCKAFFKRSIQGHNDYMCPATNQCTIDKNRRKSCQACRLRKCYEVGMMKGGFVDLTLHDQVHLLECAWLEILMIGLVWRSMEHPGKLLFAPNLLLDRNQGKCVEGMVEIFDMLLATSSRFRMMNLQGEEFVCLKSIILLNSGVYTFLSSTLKSLEEKDHIHRVLDKITDTLIHLMAKAGLTLQQQHQRLAQLLLILSHIRHMSNKGMEHLYSMKCKNVVPLYDLLLEMLDAHRLHAPTSRGGASVEETDQSHLATAGSTSSHSLQKYYITGEAEGFPATV

SEQ ID NO: 6046 - protein, 310 aa, Homo sapiens
MAMESAKETRYCAVCNDYASGYHYGVWSCEGCKAFFKRSIQGHNDYMCPATNQCTIDKNRRKSCQACRLRKCYEVGMMKGGIRKDRRGGRMLKHKRQRDDGEGRGEVGSAGDMRAANLWPSPLMIKRSKKNSLALSLTADQMVSALLDAEPPILYSEYDPTRPFSEASMMGLLTNLADRELVHMINWAKRVPGFVDLTLHDQVHLLECAWLEILMIGLVWRSMEHPGKLLFAPNLLLDRNQGKCVEGMVEIFDMLLATSSRFRMMNLQGEEFVCLKSIILLNSGISHVEAKKRILNLHPKIFGNKWFPRV

SEQ ID NO: 6047 - protein, 439 aa, Homo sapiens
MDIKNSPSSLNSPSSYNCSQSILPLEHGSIYIPSSYVDSHHEYPAMTFYSPAVMNYSIPSNVTNLEGGPGRQTTSPNVLWPTPGHLSPLVVHRQLSHLYAEPQKSPWCEARSLEHTLPVNRETLKRKVSGNRCASPVTGPGSKRDAHFCAVCSDYASGYHYGVWSCEGCKAFFKRSIQGHNDYICPATNQCTIDKNRRKSCQACRLRKCYEVGMVKCGSRRERCGYRLVRRQRSADEQLHCAGKAKRSGGHAPRVRELLLDALSPEQLVLTLLEAEPPHVLISRPSAPFTEASMMMSLTKLADKELVHMISWAKKIPGMYPLVTATQDADSSRKLAHLLNAVTDALVWVIAKSGISSQQQSMRLANLLMLLSHVRHASNKGMEHLLNMKCKNVVPVYDLLLEMLNAHVLRGCKSSITGSECSPAEDSKSKEGSQNPQSQ

SEQ ID NO: 6048 - protein, 530 aa, Homo sapiens
MDIKNSPSSLNSPSSYNCSQSILPLEHGSIYIPSSYVDSHHEYPAMTFYSPAVMNYSIPSNVTNLEGGPGRQTTSPNVLWPTPGHLSPLVVHRQLSHLYAEPQKSPWCEARSLEHTLPVNRETLKRKVSGNRCASPVTGPGSKRDAHFCAVCSDYASGYHYGVWSCEGCKAFFKRSIQGHNDYICPATNQCTIDKNRRKSCQACRLRKCYEVGMVKCGSRRERCGYRLVRRQRSADEQLHCAGKAKRSGGHAPRVRELLLDALSPEQLVLTLLEAEPPHVLISRPSAPFTEASMMMSLTKLADKELVHMISWAKKIPGFVELSLFDQVRLLESCWMEVLMMGLMWRSIDHPGKLIFAPDLVLDRDEGKCVEGILEIFDMLLATTSRFRELKLQHKEYLCVKAMILLNSSMYPLVTATQDADSSRKLAHLLNAVTDALVWVIAKSGISSQQQSMRLANLLMLLSHVRHASNKGMEHLLNMKCKNVVPVYDLLLEMLNAHVLRGCKSSITGSECSPAEDSKSKEGSQNPQSQ

SEQ ID NO: 6049 - protein, 495 aa, Homo sapiens
MDIKNSPSSLNSPSSYNCSQSILPLEHGSIYIPSSYVDSHHEYPAMTFYSPAVMNYSIPSNVTNLEGGPGRQTTSPNVLWPTPGHLSPLVVHRQLSHLYAEPQKSPWCEARSLEHTLPVNRETLKRKVSGNRCASPVTGPGSKRDAHFCAVCSDYASGYHYGVWSCEGCKAFFKRSIQGHNDYICPATNQCTIDKNRRKSCQACRLRKCYEVGMVKCGSRRERCGYRLVRRQRSADEQLHCAGKAKRSGGHAPRVRELLLDALSPEQLVLTLLEAEPPHVLISRPSAPFTEASMMMSLTKLADKELVHMISWAKKIPGFVELSLFDQVRLLESCWMEVLMMGLMWRSIDHPGKLIFAPDLVLDRDEGKCVEGILEIFDMLLATTSRFRELKLQHKEYLCVKAMILLNSSMYPLVTATQDADSSRKLAHLLNAVTDALVWVIAKSGISSQQQSMRLANLLMLLSHVRHARAEKASQTLTSFGMKMETLLPEATMEQ

SEQ ID NO: 6050 - protein, 481 aa, Homo sapiens
MDIKNSPSSLNSPSSYNCSQSILPLEHGSIYIPSSYVDSHHEYPAMTFYSPAVMNYSIPSNVTNLEGGPGRQTTSPNVLWPTPGHLSPLVVHRQLSHLYAEPQKSPWCEARSLEHTLPVNRETLKRKVSGNRCASPVTGPGSKRDAHFCAVCSDYASGYHYGVWSCEGCKAFFKRSIQGHNDYICPATNQCTIDKNRRKSCQACRLRKCYEVGMVKCGSRRERCGYRLVRRQRSADEQLHCAGKAKRSGGHAPRVRELLLDALSPEQLVLTLLEAEPPHVLISRPSAPFTEASMMMSLTKLADKELVHMISWAKKIPGFVELSLFDQVRLLESCWMEVLMMGLMWRSIDHPGKLIFAPDLVLDRDEGKCVEGILEIFDMLLATTSRFRELKLQHKEYLCVKAMILLNSSMYPLVTATQDADSSRKLAHLLNAVTDALVWVIAKSGISSQQQSMRLANLLMLLSHVRHARWGEKQFIHLKLS

SEQ ID NO: 6051 - protein, 495 aa, Homo sapiens; identical to SEQ ID NO: 6049

SEQ ID NO: 6052 - protein, 513 aa, Homo sapiens
MDIKNSPSSLNSPSSYNCSQSILPLEHGSIYIPSSYVDSHHEYPAMTFYSPAVMNYSIPSNVTNLEGGPGRQTTSPNVLWPTPGHLSPLVVHRQLSHLYAEPQKSPWCEARSLEHTLPVNRETLKRKVSGNRCASPVTGPGSKRDAHFCAVCSDYASGYHYGVWSCEGCKAFFKRSIQGHNDYICPATNQCTIDKNRRKSCQACRLRKCYEVGMVKCGSRRERCGYRLVRRQRSADEQLHCAGKAKRSGGHAPRVRELLLDALSPEQLVLTLLEAEPPHVLISRPSAPFTEASMMMSLTKLADKELVHMISWAKKIPGFVELSLFDQVRLLESCWMEVLMMGLMWRSIDHPGKLIFAPDLVLDRDEGKCVEGILEIFDMLLATTSRFRELKLQHKEYLCVKAMILLNSSMYPLVTATQDADSSRKLAHLLNAVTDALVWVIAKSGISSQQQSMRLANLLMLLSHVRHASSLSLSWRLFMLREASCHGVRQTPGGAHVSVSRSRSFEACQQPRE

SEQ ID NO: 6053 - protein, 495 aa, Homo sapiens; identical to SEQ ID NO: 6049

SEQ ID NO: 6054 - protein, 472 aa, Homo sapiens
MDIKNSPSSLNSPSSYNCSQSILPLEHGSIYIPSSYVDSHHEYPAMTFYSPAVMNYSIPSNVTNLEGGPGRQTTSPNVLWPTPGHLSPLVVHRQLSHLYAEPQKSPWCEARSLEHTLPVNRETLKRKVSGNRCASPVTGPGSKRDAHFCAVCSDYASGYHYGVWSCEGCKAFFKRSIQGHNDYICPATNQCTIDKNRRKSCQACRLRKCYEVGMVKCGSRRERCGYRLVRRQRSADEQLHCAGKAKRSGGHAPRVRELLLDALSPEQLVLTLLEAEPPHVLISRPSAPFTEASMMMSLTKLADKELVHMISWAKKIPGFVELSLFDQVRLLESCWMEVLMMGLMWRSIDHPGKLIFAPDLVLDRDEGKCVEGILEIFDMLLATTSRFRELKLQHKEYLCVKAMILLNSSMYPLVTATQDADSSRKLAHLLNAVTDALVWVIAKSGISSQQQSMRLANLLMLLSHVRHARYAP

SEQ ID NO: 6055 - protein, 481 aa, Homo sapiens; identical to SEQ ID NO: 6050

SEQ ID NO: 6056 - protein, 459 aa, Homo sapiens
MDGFYDQQVPYMVTNSQRGRNCNEKPTNVRKRKFINRDLAHDSEELFQDLSQLQETWLAEVAFHGLPLKIKKEPHSPCSEISSACSQEQPFKFSYGEKCLYNVSAYDQKPQVGMRPSNPPTPSSTPVSPLHHASPNSTHTPKPDRAFPAHLPPSQSIPDSSYPMDHRFRRQLSEPCNSFPPLPTMPREGRPMYQRQMSEPNIPFPPQGFKQEYHDPVYEHNTMVGSAASQSFPPPLMIKQEPRDFAYDSEVPSCHSIYMRQEGFLAHPSRTEGCMFEKGPRQFYDDTCVVPEKFDGDIKQEPGMYREGPTYQRRGSLQLWQFLVALLDDPSNSHFIAWTGRGMEFKLIEPEEVARRWGIQKNRPAMNYDKLSRSLRYYYEKGIMQKVAGERYVYKFVCDPEALFSMAFPDNQRPLLKTDMERHINEEDTVPLSHFDESMAYMPEGGCCNPHPYNEGYVY

SEQ ID NO: 6057 - protein, 459 aa, Homo sapiens; identical to SEQ ID NO: 6056

SEQ ID NO: 6058 - protein, 374 aa, Homo sapiens
MLQDLSASVFFPPCSQHRTLAQVPDNDEQFVPDYQAESLAFHGLPLKIKKEPHSPCSEISSACSQEQPFKFSYGEKCLYNVRFRRQLSEPCNSFPPLPTMPREGRPMYQRQMSEPNIPFPPQGFKQEYHDPVYEHNTMVGSAASQSFPPPLMIKQEPRDFAYDSEVPSCHSIYMRQEGFLAHPSRTEGCMFEKGPRQFYDDTCVVPEKFDGDIKQEPGMYREGPTYQRRGSLQLWQFLVALLDDPSNSHFIAWTGRGMEFKLIEPEEVARRWGIQKNRPAMNYDKLSRSLRYYYEKGIMQKVAGERYVYKFVCDPEALFSMAFPDNQRPLLKTDMERHINEEDTVPLSHFDESMAYMPEGGCCNPHPYNEGYVY

SEQ ID NO: 6059 - protein, 459 aa, Homo sapiens; identical to SEQ ID NO: 6056

SEQ ID NO: 6060 - protein, 477 aa, Homo sapiens
MDGFYDQQVPYMVTNSQRGRNCNEKPTNVRKRKFINRDLAHDSEELFQDLSQLQETWLAEAQVPDNDEQFVPDYQAESLAFHGLPLKIKKEPHSPCSEISSACSQEQPFKFSYGEKCLYNVSAYDQKPQVGMRPSNPPTPSSTPVSPLHHASPNSTHTPKPDRAFPAHLPPSQSIPDSSYPMDHRFRRQLSEPCNSFPPLPTMPREGRPMYQRQMSEPNIPFPPQGFKQEYHDPVYEHNTMVGSAASQSFPPPLMIKQEPRDFAYDSEVPSCHSIYMRQEGFLAHPSRTEGCMFEKGPRQFYDDTCVVPEKFDGDIKQEPGMYREGPTYQRRGSLQLWQFLVALLDDPSNSHFIAWTGRGMEFKLIEPEEVARRWGIQKNRPAMNYDKLSRSLRYYYEKGIMQKVAGERYVYKFVCDPEALFSMAFPDNQRPLLKTDMERHINEEDTVPLSHFDESMAYMPEGGCCNPHPYNEGYVY

SEQ ID NO: 6061 - protein, 419 aa, Homo sapiens
MLQDLSASVFFPPCSQHRTLVAFHGLPLKIKKEPHSPCSEISSACSQEQPFKFSYGEKCLYNVSAYDQKPQVGMRPSNPPTPSSTPVSPLHHASPNSTHTPKPDRAFPAHLPPSQSIPDSSYPMDHRFRRQLSEPCNSFPPLPTMPREGRPMYQRQMSEPNIPFPPQGFKQEYHDPVYEHNTMVGSAASQSFPPPLMIKQEPRDFAYDSEVPSCHSIYMRQEGFLAHPSRTEGCMFEKGPRQFYDDTCVVPEKFDGDIKQEPGMYREGPTYQRRGSLQLWQFLVALLDDPSNSHFIAWTGRGMEFKLIEPEEVARRWGIQKNRPAMNYDKLSRSLRYYYEKGIMQKVAGERYVYKFVCDPEALFSMAFPDNQRPLLKTDMERHINEEDTVPLSHFDESMAYMPEGGCCNPHPYNEGYVY

SEQ ID NO: 6062 - protein, 123 aa, Homo sapiens
MDGFYDQQVPYMVTNSQRGRNCNEKPTNVRKRKFINRDLAHDSEELFQDLSQLQETWLAEAQVPDNDEQFVPDYQAESLAFHGLPLKIKKEPHSPCSEISSACSQEQPFKFSYGEKCLYNVSA

SEQ ID NO: 6063 - protein, 477 aa, Homo sapiens; identical to SEQ ID NO: 6060

SEQ ID NO: 6064 - protein, 95 aa, Homo sapiens
MDGFYDQQVPYMVTNSQRGRNCNEKPTNVRKRKFINRDLAHDSEELFQDLSQLQETWLAEAQVPDNDEQFVPDYQAESLAFHGLPLKIKKEPHSP

SEQ ID NO: 6065 - protein, 20 aa, Homo sapiens
MDGFYDQQVPYMVTNSQRGR

SEQ ID NO: 6066 - protein, 437 aa, Homo sapiens
MLQDLSASVFFPPCSQHRTLAQVPDNDEQFVPDYQAESLAFHGLPLKIKKEPHSPCSEISSACSQEQPFKFSYGEKCLYNVSAYDQKPQVGMRPSNPPTPSSTPVSPLHHASPNSTHTPKPDRAFPAHLPPSQSIPDSSYPMDHRFRRQLSEPCNSFPPLPTMPREGRPMYQRQMSEPNIPFPPQGFKQEYHDPVYEHNTMVGSAASQSFPPPLMIKQEPRDFAYDSEVPSCHSIYMRQEGFLAHPSRTEGCMFEKGPRQFYDDTCVVPEKFDGDIKQEPGMYREGPTYQRRGSLQLWQFLVALLDDPSNSHFIAWTGRGMEFKLIEPEEVARRWGIQKNRPAMNYDKLSRSLRYYYEKGIMQKVAGERYVYKFVCDPEALFSMAFPDNQRPLLKTDMERHINEEDTVPLSHFDESMAYMPEGGCCNPHPYNEGYVY

SEQ ID NO: 6067 - protein, 454 aa, Homo sapiens
MDGFYDQQVPYMVTNSQRGRNCNEKPTNVRKRKFINRDLAHDSEELFQDLSQLQETWLAEAQVPDNDEQFVPDYQAESLAFHGLPLKIKKEPHSPCSEISSACSQEQPFKFSYGEKCLYNVSAYDQKPQVGMRPSNPPTPSSTPVSPLHHASPNSTHTPKPDRAFPAHLPPSQSIPDSSYPMDHRFRRQLSEPCNSFPPLPTMPREGRPMYQRQMSEPNIPFPPQGFKQEYHDPVYEHNTMVGSAASQSFPPPLMIKQEPRDFAYDSGCMFEKGPRQFYDDTCVVPEKFDGDIKQEPGMYREGPTYQRRGSLQLWQFLVALLDDPSNSHFIAWTGRGMEFKLIEPEEVARRWGIQKNRPAMNYDKLSRSLRYYYEKGIMQKVAGERYVYKFVCDPEALFSMAFPDNQRPLLKTDMERHINEEDTVPLSHFDESMAYMPEGGCCNPHPYNEGYVY

SEQ ID NO: 6068 - protein, 484 aa, Homo sapiens
MERRMKAGYLDQQVPYTFSSKSPGNGSLREALIGPLGKLMDPGSLPPLDSEDLFQDLSHFQETWLAEAQVPDSDEQFVPDFHSENLAFHSPTTRIKKEPQSPRTDPALSCSRKPPLPYHHGEQCLYSSAYDPPRQIAIKSPAPGALGQSPLQPFPRAEQRNFLRSSGTSQPHPGHGYLGEHSSVFQQPLDICHSFTSQGGGREPLPAPYQHQLSEPCPPYPQQSFKQEYHDPLYEQAGQPAVDQGGVNGHRYPGAGVVIKQEQTDFAYDSDVTGCASMYLHTEGFSGPSPGDGAMGYGYEKPLRPFPDDVCVVPEKFEGDIKQEGVGAFREGPPYQRRGALQLWQFLVALLDDPTNAHFIAWTGRGMEFKLIEPEEVARLWGIQKNRPAMNYDKLSRSLRYYYEKGIMQKVAGERYVYKFVCEPEALFSLAFPDNQRPALKAEFDRPVSEEDTVPLSHLDESPAYLPELAGPAQPFGPKGGYSY

SEQ ID NO: 6069 - protein, 484 aa, Homo sapiens; identical to SEQ ID NO: 6068

SEQ ID NO: 6070 - protein, 445 aa, Homo sapiens
MDPGSLPPLDSEDLFQDLSHFQETWLAEAQVPDSDEQFVPDFHSENLAFHSPTTRIKKEPQSPRTDPALSCSRKPPLPYHHGEQCLYSSAYDPPRQIAIKSPAPGALGQSPLQPFPRAEQRNFLRSSGTSQPHPGHGYLGEHSSVFQQPLDICHSFTSQGGGREPLPAPYQHQLSEPCPPYPQQSFKQEYHDPLYEQAGQPAVDQGGVNGHRYPGAGVVIKQEQTDFAYDSDVTGCASMYLHTEGFSGPSPGDGAMGYGYEKPLRPFPDDVCVVPEKFEGDIKQEGVGAFREGPPYQRRGALQLWQFLVALLDDPTNAHFIAWTGRGMEFKLIEPEEVARLWGIQKNRPAMNYDKLSRSLRYYYEKGIMQKVAGERYVYKFVCEPEALFSLAFPDNQRPALKAEFDRPVSEEDTVPLSHLDESPAYLPELAGPAQPFGPKGGYSY

SEQ ID NO: 6071 - protein, 430 aa, Homo sapiens
MERRMKAGYLDQQVPYTFSSKSPGNGSLREALIGPLGKLMDPGSLPPLDSEDLFQDLSHFQETWLAEAQVPDSDEQFVPDFHSENLAFHSPTTRIKKEPQSPRTDPALSCSRKPPLPYHHGEQCLYSSSVFQQPLDICHSFTSQGGGREPLPAPYQHQLSEPCPPYPQQSFKQEYHDPLYEQAGQPAVDQGGVNGHRYPGAGVVIKQEQTDFAYDSDVTGCASMYLHTEGFSGPSPGDGAMGYGYEKPLRPFPDDVCVVPEKFEGDIKQEGVGAFREGPPYQRRGALQLWQFLVALLDDPTNAHFIAWTGRGMEFKLIEPEEVARLWGIQKNRPAMNYDKLSRSLRYYYEKGIMQKVAGERYVYKFVCEPEALFSLAFPDNQRPALKAEFDRPVSEEDTVPLSHLDESPAYLPELAGPAQPFGPKGGYSY

SEQ ID NO: 6072 - protein, 445 aa, Homo sapiens; identical to SEQ ID NO: 6070

SEQ ID NO: 6073 - protein, 596 aa, Homo sapiens
MAGRRVNVNVGVLGHIDSGKTALARALSTTASTAAFDKQPQSRERGITLDLGFSCFSVPLPARLRSSLPEFQAAPEAEPEPGEPLLQVTLVDCPGHASLIRTIIGGAQIIDLMMLVIDVTKGMQTQSAECLVIGQIACQKLVVVLNKIDLLPEGKRQAAIDKMTKKMQKTLENTKFRGAPIIPVAAKPGGPEAPETEAPQGIPELIELLTSQISIPTRDPSGPFLMSVDHCFSIKGQGTVMTGTILSGSISLGDSVEIPALKVVKKVKSMQMFHMPITSAMQGDRLGICVTQFDPKLLERGLVCAPESLHTVHAALISVEKIPYFRGPLQTKAKFHITVGHETVMGRLMFFSPAPDNFDQEPILDSFNFSQEYLFQEQYLSKDLTPAVTDNDEADKKAGQATEGHCPRQQWALVEFEKPVTCPRLCLVIGSRLDADIHTNTCRLAFHGILLHGLEDRNYADSFLPRLKVYKLKHKHGLVERAMDDYSVIGRSLFKKETNIQLFVGLKVHLSTGELGIIDSAFGQSGKFKIHIPGGLSPESKKILTPALKKRARAGRGEATRQEESAERSEPSQHVVLSLTFKRYVFDTHKRMVQSP

SEQ ID NO: 6074 - protein, 551 aa, Homo sapiens
MAGDLSAGFFMEELNTYRQKQGVVLKYQELPNSGPPHDRRFTFQVIIDGREFPEGEGRSKKEAKNAAAKLAVEILNKEKKAVSPLLLTTTNSSEGLSMGNYIGLINRIAQKKRLTVNYEQCASGVHGPEGFHYKCKMGQKEYSIGTGSTKQEAKQLAAKLAYLQILSEETSVKSDYLSSGSFATTCESQSNSLVTSTLASESSSEGDFSADTSEINSNSDSLNSSSLLMNGLRNNQRKAKRSLAPRFDLPDMKETKYTVDKRFGMDFKEIELIGSGGFGQVFKAKHRIDGKTYVIKRVKYNNEKAEREVKALAKLDHVNIVHYNGCWDGFDYDPETSDDSLESSDYDPENSKNSSRSKTKCLFIQMEFCDKGTLEQWIEKRRGEKLDKVLALELFEQITKGVDYIHSKKLIHRDLKPSNIFLVDTKQVKIGDFGLVTSLKNDGKRTRSKGTLRYMSPEQISSQDYGKEVDLYALGLILAELLHVCDTAFETSKFFTDLRDGIISDIFDKKEKTLLQKLLSKKPEDRPNTSEILRTLTVWKKSPEKNERHTC

SEQ ID NO: 6075 - protein, 363 aa, Homo sapiens
MAGDLSAGFFMEELNTYRQKQGVVLKYQELPNSGPPHDRRFTFQVIIDGREFPEGEGRSKKEAKNAAAKLAVEILNKEKKAVSPLLLTTTNSSEGLSMGNYIGLINRIAQKKRLTVNYEQCASGVHGPEGFHYKCKMGQKEYSIGTGSTKQEAKQLAAKLAYLQILSEETSVKSDYLSSGSFATTCESQSNSLVTSTLASESSSEGDFSADTSEINSNSDSLNSSSLLMNGLRNNQRKAKRSLAPRFDLPDMKETKYTVDKRFGMDFKEIELIGSGGFGQVFKAKHRIDGKTYVIKRVKYNNESKTKCLFIQMEFCDKGTLEQWIEKRRGEKLDKVLALELFEQITKGVDYIHSKKKKKKKKK

SEQ ID NO: 6076 - protein, 102 aa, Homo sapiens
MAGDLSAGFFMEELNTYRQKQGVVLKYQELPNSGPPHDRRFTFQVIIDGREFPEGEGRSKKEAKNAAAKLAVEILNKEKKAVSPLLLTTTNSSEGLSMGNYI

SEQ ID NO: 6077 - protein, 551 aa, Homo sapiens; identical to SEQ ID NO: 6074

SEQ ID NO: 6078 - protein, 116 aa, Homo sapiens
MAGDLSAGFFMEELNTYRQKQGVVLKYQELPNSGPPHDRRFTFQVIIDGREFPEGEGRSKKEAKNAAAKLAVEILNKEKKAVSPLLLTTTNSSEGLSMGNYIGLINRIAQKKRLTV

SEQ ID NO: 6079 - protein, 510 aa, Homo sapiens
MAGDLSAGFFMEELNTYRQKQGVVLKYQELPNSGPPHDRRFTFQVIIDGREFPEGEGRSKKEAKNAAAKLAVEILNKEKKAVSPLLLTTTNSSEGLSMGNYIGLINRIAQKKRLTVNYEQCASGVHGPEGFHYKCKMGQKEYSIGTGSTKQEAKQLAAKLAYLQILSEETSVKSDYLSSGSFATTCESQSNSLVTSTLASESSSEGDFSADTSEINSNSDSLNSSSLLMNGLRNNQRKAKRSLAPRFDLPDMKETKYTVDKRKAEREVKALAKLDHVNIVHYNGCWDGFDYDPETSDDSLESSDYDPENSKNSSRSKTKCLFIQMEFCDKGTLEQWIEKRRGEKLDKVLALELFEQITKGVDYIHSKKLIHRDLKPSNIFLVDTKQVKIGDFGLVTSLKNDGKRTRSKGTLRYMSPEQISSQDYGKEVDLYALGLILAELLHVCDTAFETSKFFTDLRDGIISDIFDKKEKTLLQKLLSKKPEDRPNTSEILRTLTVWKKSPEKNERHTC

SEQ ID NO: 6080 - protein, 1599 aa, Homo sapiens
MNKAPQSTGPPPAPSPGLPQPAFPPGQTAPVVFSTPQATQMNTPSQPRQHFYPSRAQPPSSAASRVQSAAPARPGPAAHVYPAGSQVMMIPSQISYPASQGAYYIPGQGRSTYVVPTQQYPVQPGAPGFYPGASPTEFGTYAGAYYPAQGVQQFPTGVAPTPVLMNQPPQIAPKRERKTIRIRDPNQGGKDITEEIMSGARTASTPTPPQTGGGLEPQANGETPQVAVIVRPDDRSQGAIIADRPGLPGPEHSPSESQPSSPSPTPSPSPVLEPGSEPNLAVLSIPGDTMTTIQMSVEESTPISRETGEPYRLSPEPTPLAEPILEVEVTLSKPVPESEFSSSPLQAPTPLASHTVEIHEPNGMVPSEDLEPEVESSPELAPPPACPSESPVPIAPTAQPEELLNGAPSPPAVDLSPVSEPEEQAKEVTASMAPPTIPSATPATAPSATSPAQEEEMEEEEEEEEGEAGEAGEAESEKGGEELLPPESTPIPANLSQNLEAAAATQVAVSVPKRRRKIKELNKKEAVGDLLDAFKEANPAVPEVENQPPAGSNPGPESEGSGVPPRPEEADETWDSKEDKIHNAENIQPGEQKYEYKSDQWKPLNLEEKKRYDREFLLGFQFIFASMQKPEGLPHISDVVLDKANKTPLRPLDPTRLQGINCGPDFTPSFANLGRTTLSTRGPPRGGPGGELPRGPAGLGPRRSQQGPRKEPRKIIATVLMTEDIKLNKAEKAWKPSSKRTAADKDRGEEDADGSKTQDLFRRVRSILNKLTPQMFQQLMKQVTQLAIDTEERLKGVIDLIFEKAISEPNFSVAYANMCRCLMALKVPTTEKPTVTVNFRKLLLNRCQKEFEKDKDDDEVFEKKQKEMDEAATAEERGRLKEELEEARDIARRRSLGNIKFIGELFKLKMLTEAIMHDCVVKLLKNHDEESLECLCRLLTTIGKDLDFEKAKPRMDQYFNQMEKIIKEKKTSSRIRFMLQDVLDLRGSNWVPRRGDQGPKTIDQIHKEAEMEEHREHIKVQQLMAKGSDKRRGGPPGPPISRGLPLVDDGGWNTVPISKGSRPIDTSRLTKITKPGSIDSNNQLFAPGGRLSWGKGSSGGSGAKPSDAASEAARPATSTLNRFSALQQAVPTESTDNRRVVQRSSLSRERGEKAGDRGDRLERSERGGDRGDRLDRARTPATKRSFSKEVEERSRERPSQPEGLRKAASLTEDRDRGRDAVKREAALPPVSPLKAALSEEELEKKSKAIIEEYLHLNDMKEAVQCVQELASPSLLFIFVRHGVESTLERSAIAREHMGQLLHQLLCAGHLSTAQYYQGLYEILELAEDMEIDIPHVWLYLAELVTPILQEGGVPMGELFREITKPLRPLGKAASLLLEILGLLCKSMGPKKVGTLWREAGLSWKEFLPEGQDIGAFVAEQKVEYTLGEESEAPGQRALPSEELNRQLEKLLKEGSSNQRVFDWIEANLSEQQIVSNTLVRALMTAVCYSAIIFETPLRVDVAVLKARAKLLQKYLCDEQKELQALYALQALVVTLEQPPNLLRMFFDALYDEDVVKEDAFYSWESSKDPAEQQGKGVALKSVTAFFKWLREAEEESDHN

SEQ ID NO: 6081 - protein, 1600 aa, Homo sapiens
MNKAPQSTGPPPAPSPGLPQPAFPPGQTAPVVFSTPQATQMNTPSQPRQHFYPSRAQPPSSAASRVQSAAPARPGPAAHVYPAGSQVMMIPSQISYPASQGAYYIPGQGRSTYVVPTQQYPVQPGAPGFYPGASPTEFGTYAGAYYPAQGVQQFPTGVAPTPVLMNQPPQIAPKRERKTIRIRDPNQGGKDITEEIMSGARTASTPTPPQTGGGLEPQANGETPQVAVIVRPDDRSQGAIIADRPGLPGPEHSPSESQPSSPSPTPSPSPVLEPGSEPNLAVLSIPGDTMTTIQMSVEESTPISRETGEPYRLSPEPTPLAEPILEVEVTLSKPVPESEFSSSPLQAPTPLASHTVEIHEPNGMVPSEDLEPEVESSPELAPPPACPSESPVPIAPTAQPEELLNGAPSPPAVDLSPVSEPEEQAKEVTASMAPPTIPSATPATAPSATSPAQEEEMEEEEEEEEGEAGEAGEAESEKGGEELLPPESTPIPANLSQNLEAAAATQVAVSVPKRRRKIKELNKKEAVGDLLDAFKEANPAVPEVENQPPAGSNPGPESEGSGVPPRPEEADETWDSKEDKIHNAENIQPGEQKYEYKSDQWKPLNLEEKKRYDREFLLGFQFIFASMQKPEGLPHISDVVLDKANKTPLRPLDPTRLQGINCGPDFTPSFANLGRTTLSTRGPPRGGPGGELPRGPQAGLGPRRSQQGPRKEPRKIIATVLMTEDIKLNKAEKAWKPSSKRTAADKDRGEEDADGSKTQDLFRRVRSILNKLTPQMFQQLMKQVTQLAIDTEERLKGVIDLIFEKAISEPNFSVAYANMCRCLMALKVPTTEKPTVTVNFRKLLLNRCQKEFEKDKDDDEVFEKKQKEMDEAATAEERGRLKEELEEARDIARRRSLGNIKFIGELFKLKMLTEAIMHDCVVKLLKNHDEESLECLCRLLTTIGKDLDFEKAKPRMDQYFNQMEKIIKEKKTSSRIRFMLQDVLDLRGSNWVPRRGDQGPKTIDQIHKEAEMEEHREHIKVQQLMAKGSDKRRGGPPGPPISRGLPLVDDGGWNTVPISKGSRPIDTSRLTKITKPGSIDSNNQLFAPGGRLSWGKGSSGGSGAKPSDAASEAARPATSTLNRFSALQQAVPTESTDNRRVVQRSSLSRERGEKAGDRGDRLERSERGGDRGDRLDRARTPATKRSFSKEVEERSRERPSQPEGLRKAASLTEDRDRGRDAVKREAALPPVSPLKAALSEEELEKKSKAIIEEYLHLNDMKEAVQCVQELASPSLLFIFVRHGVESTLERSAIAREHMGQLLHQLLCAGHLSTAQYYQGLYEILELAEDMEIDIPHVWLYLAELVTPILQEGGVPMGELFREITKPLRPLGKAASLLLEILGLLCKSMGPKKVGTLWREAGLSWKEFLPEGQDIGAFVAEQKVEYTLGEESEAPGQRALPSEELNRQLEKLLKEGSSNQRVFDWIEANLSEQQIVSNTLVRALMTAVCYSAIIFETPLRVDVAVLKARAKLLQKYLCDEQKELQALYALQALVVTLEQPPNLLRMFFDALYDEDVVKEDAFYSWESSKDPAEQQGKGVALKSVTAFFKWLREAEEESDHN

SEQ ID NO: 6082 - protein, 1599 aa, Homo sapiens; identical to SEQ ID NO: 6080

SEQ ID NO: 6083 - protein, 1435 aa, Homo sapiens
MNQPPQIAPKRERKTIRIRDPNQGGKDITEEIMSGARTASTPTPPQTGGGLEPQANGETPQVAVIVRPDDRSQGAIIADRPGLPGPEHSPSESQPSSPSPTPSPSPVLEPGSEPNLAVLSIPGDTMTTIQMSVEESTPISRETGEPYRLSPEPTPLAEPILEVEVTLSKPVPESEFSSSPLQAPTPLASHTVEIHEPNGMVPSEDLEPEVESSPELAPPPACPSESPVPIAPTAQPEELLNGAPSPPAVDLSPVSEPEEQAKEVTASMAPPTIPSATPATAPSATSPAQEEEMEEEEEEEEGEAGEAGEAESEKGGEELLPPESTPIPANLSQNLEAAAATQVAVSVPKRRRKIKELNKKEAVGDLLDAFKEANPAVPEVENQPPAGSNPGPESEGSGVPPRPEEADETWDSKEDKIHNAENIQPGEQKYEYKSDQWKPLNLEEKKRYDREFLLGFQFIFASMQKPEGLPHISDVVLDKANKTPLRPLDPTRLQGINCGPDFTPSFANLGRTTLSTRGPPRGGPGGELPRGPAGLGPRRSQQGPRKEPRKIIATVLMTEDIKLNKAEKAWKPSSKRTAADKDRGEEDADGSKTQDLFRRVRSILNKLTPQMFQQLMKQVTQLAIDTEERLKGVIDLIFEKAISEPNFSVAYANMCRCLMALKVPTTEKPTVTVNFRKLLLNRCQKEFEKDKDDDEVFEKKQKEMDEAATAEERGRLKEELEEARDIARRRSLGNIKFIGELFKLKMLTEAIMHDCVVKLLKNHDEESLECLCRLLTTIGKDLDFEKAKPRMDQYFNQMEKIIKEKKTSSRIRFMLQDVLDLRGSNWVPRRGDQGPKTIDQIHKEAEMEEHREHIKVQQLMAKGSDKRRGGPPGPPISRGLPLVDDGGWNTVPISKGSRPIDTSRLTKITKPGSIDSNNQLFAPGGRLSWGKGSSGGSGAKPSDAASEAARPATSTLNRFSALQQAVPTESTDNRRVVQRSSLSRERGEKAGDRGDRLERSERGGDRGDRLDRARTPATKRSFSKEVEERSRERPSQPEGLRKAASLTEDRDRGRDAVKREAALPPVSPLKAALSEEELEKKSKAIIEEYLHLNDMKEAVQCVQELASPSLLFIFVRHGVESTLERSAIAREHMGQLLHQLLCAGHLSTAQYYQGLYEILELAEDMEIDIPHVWLYLAELVTPILQEGGVPMGELFREITKPLRPLGKAASLLLEILGLLCKSMGPKKVGTLWREAGLSWKEFLPEGQDIGAFVAEQKVEYTLGEESEAPGQRALPSEELNRQLEKLLKEGSSNQRVFDWIEANLSEQQIVSNTLVRALMTAVCYSAIIFETPLRVDVAVLKARAKLLQKYLCDEQKELQALYALQALVVTLEQPPNLLRMFFDALYDEDVVKEDAFYSWESSKDPAEQQGKGVALKSVTAFFKWLREAEEESDHN

SEQ ID NO: 6084 - protein, 1606 aa, Homo sapiens
MNKAPQSTGPPPAPSPGLPQPAFPPGQTAPVVFSTPQATQMNTPSQPRQGGFRSLQHFYPSRAQPPSSAASRVQSAAPARPGPAAHVYPAGSQVMMIPSQISYPASQGAYYIPGQGRSTYVVPTQQYPVQPGAPGFYPGASPTEFGTYAGAYYPAQGVQQFPTGVAPTPVLMNQPPQIAPKRERKTIRIRDPNQGGKDITEEIMSGARTASTPTPPQTGGGLEPQANGETPQVAVIVRPDDRSQGAIIADRPGLPGPEHSPSESQPSSPSPTPSPSPVLEPGSEPNLAVLSIPGDTMTTIQMSVEESTPISRETGEPYRLSPEPTPLAEPILEVEVTLSKPVPESEFSSSPLQAPTPLASHTVEIHEPNGMVPSEDLEPEVESSPELAPPPACPSESPVPIAPTAQPEELLNGAPSPPAVDLSPVSEPEEQAKEVTASMAPPTIPSATPATAPSATSPAQEEEMEEEEEEEEGEAGEAGEAESEKGGEELLPPESTPIPANLSQNLEAAAATQVAVSVPKRRRKIKELNKKEAVGDLLDAFKEANPAVPEVENQPPAGSNPGPESEGSGVPPRPEEADETWDSKEDKIHNAENIQPGEQKYEYKSDQWKPLNLEEKKRYDREFLLGFQFIFASMQKPEGLPHISDVVLDKANKTPLRPLDPTRLQGINCGPDFTPSFANLGRTTLSTRGPPRGGPGGELPRGPAGLGPRRSQQGPRKEPRKIIATVLMTEDIKLNKAEKAWKPSSKRTAADKDRGEEDADGSKTQDLFRRVRSILNKLTPQMFQQLMKQVTQLAIDTEERLKGVIDLIFEKAISEPNFSVAYANMCRCLMALKVPTTEKPTVTVNFRKLLLNRCQKEFEKDKDDDEVFEKKQKEMDEAATAEERGRLKEELEEARDIARRRSLGNIKFIGELFKLKMLTEAIMHDCVVKLLKNHDEESLECLCRLLTTIGKDLDFEKAKPRMDQYFNQMEKIIKEKKTSSRIRFMLQDVLDLRGSNWVPRRGDQGPKTIDQIHKEAEMEEHREHIKVQQLMAKGSDKRRGGPPGPPISRGLPLVDDGGWNTVPISKGSRPIDTSRLTKITKPGSIDSNNQLFAPGGRLSWGKGSSGGSGAKPSDAASEAARPATSTLNRFSALQQAVPTESTDNRRVVQRSSLSRERGEKAGDRGDRLERSERGGDRGDRLDRARTPATKRSFSKEVEERSRERPSQPEGLRKAASLTEDRDRGRDAVKREAALPPVSPLKAALSEEELEKKSKAIIEEYLHLNDMKEAVQCVQELASPSLLFIFVRHGVESTLERSAIAREHMGQLLHQLLCAGHLSTAQYYQGLYEILELAEDMEIDIPHVWLYLAELVTPILQEGGVPMGELFREITKPLRPLGKAASLLLEILGLLCKSMGPKKVGTLWREAGLSWKEFLPEGQDIGAFVAEQKVEYTLGEESEAPGQRALPSEELNRQLEKLLKEGSSNQRVFDWIEANLSEQQIVSNTLVRALMTAVCYSAIIFETPLRVDVAVLKARAKLLQKYLCDEQKELQALYALQALVVTLEQPPNLLRMFFDALYDEDVVKEDAFYSWESSKDPAEQQGKGVALKSVTAFFKWLREAEEESDHN

SEQ ID NO: 6085 - protein, 1606 aa, Homo sapiens; identical to SEQ ID NO: 6084

SEQ ID NO: 6086 - protein, 1512 aa, Homo sapiens
MMIPSQISYPASQGAYYIPGQGRSTYVVPTQQYPVQPGAPGFYPGASPTEFGTYAGAYYPAQGVQQFPTGVAPTPVLMNQPPQIAPKRERKTIRIRDPNQGGKDITEEIMSGARTASTPTPPQTGGGLEPQANGETPQVAVIVRPDDRSQGAIIADRPGLPGPEHSPSESQPSSPSPTPSPSPVLEPGSEPNLAVLSIPGDTMTTIQMSVEESTPISRETGEPYRLSPEPTPLAEPILEVEVTLSKPVPESEFSSSPLQAPTPLASHTVEIHEPNGMVPSEDLEPEVESSPELAPPPACPSESPVPIAPTAQPEELLNGAPSPPAVDLSPVSEPEEQAKEVTASMAPPTIPSATPATAPSATSPAQEEEMEEEEEEEEGEAGEAGEAESEKGGEELLPPESTPIPANLSQNLEAAAATQVAVSVPKRRRKIKELNKKEAVGDLLDAFKEANPAVPEVENQPPAGSNPGPESEGSGVPPRPEEADETWDSKEDKIHNAENIQPGEQKYEYKSDQWKPLNLEEKKRYDREFLLGFQFIFASMQKPEGLPHISDVVLDKANKTPLRPLDPTRLQGINCGPDFTPSFANLGRTTLSTRGPPRGGPGGELPRGPAGLGPRRSQQGPRKEPRKIIATVLMTEDIKLNKAEKAWKPSSKRTAADKDRGEEDADGSKTQDLFRRVRSILNKLTPQMFQQLMKQVTQLAIDTEERLKGVIDLIFEKAISEPNFSVAYANMCRCLMALKVPTTEKPTVTVNFRKLLLNRCQKEFEKDKDDDEVFEKKQKEMDEAATAEERGRLKEELEEARDIARRRSLGNIKFIGELFKLKMLTEAIMHDCVVKLLKNHDEESLECLCRLLTTIGKDLDFEKAKPRMDQYFNQMEKIIKEKKTSSRIRFMLQDVLDLRGSNWVPRRGDQGPKTIDQIHKEAEMEEHREHIKVQQLMAKGSDKRRGGPPGPPISRGLPLVDDGGWNTVPISKGSRPIDTSRLTKITKPGSIDSNNQLFAPGGRLSWGKGSSGGSGAKPSDAASEAARPATSTLNRFSALQQAVPTESTDNRRVVQRSSLSRERGEKAGDRGDRLERSERGGDRGDRLDRARTPATKRSFSKEVEERSRERPSQPEGLRKAASLTEDRDRGRDAVKREAALPPVSPLKAALSEEELEKKSKAIIEEYLHLNDMKEAVQCVQELASPSLLFIFVRHGVESTLERSAIAREHMGQLLHQLLCAGHLSTAQYYQGLYEILELAEDMEIDIPHVWLYLAELVTPILQEGGVPMGELFREITKPLRPLGKAASLLLEILGLLCKSMGPKKVGTLWREAGLSWKEFLPEGQDIGAFVAEQKVEYTLGEESEAPGQRALPSEELNRQLEKLLKEGSSNQRVFDWIEANLSEQQIVSNTLVRALMTAVCYSAIIFETPLRVDVAVLKARAKLLQKYLCDEQKELQALYALQALVVTLEQPPNLLRMFFDALYDEDVVKEDAFYSWESSKDPAEQQGKGVALKSVTAFFKWLREAEEESDHN

SEQ ID NO: 6087 - protein, 1512 aa, Homo sapiens; identical to SEQ ID NO: 6086

SEQ ID NO: 6088 - protein, 1560 aa, Homo sapiens
MNTPSQPRQHFYPSRAQPPSSAASRVQSAAPARPGPAAHVYPAGSQVMMIPSQISYPASQGAYYIPGQGRSTYVVPTQQYPVQPGAPGFYPGASPTEFGTYAGAYYPAQGVQQFPTGVAPTPVLMNQPPQIAPKRERKTIRIRDPNQGGKDITEEIMSGARTASTPTPPQTGGGLEPQANGETPQVAVIVRPDDRSQGAIIADRPGLPGPEHSPSESQPSSPSPTPSPSPVLEPGSEPNLAVLSIPGDTMTTIQMSVEESTPISRETGEPYRLSPEPTPLAEPILEVEVTLSKPVPESEFSSSPLQAPTPLASHTVEIHEPNGMVPSEDLEPEVESSPELAPPPACPSESPVPIAPTAQPEELLNGAPSPPAVDLSPVSEPEEQAKEVTASMAPPTIPSATPATAPSATSPAQEEEMEEEEEEEEGEAGEAGEAESEKGGEELLPPESTPIPANLSQNLEAAAATQVAVSVPKRRRKIKELNKKEAVGDLLDAFKEANPAVPEVENQPPAGSNPGPESEGSGVPPRPEEADETWDSKEDKIHNAENIQPGEQKYEYKSDQWKPLNLEEKKRYDREFLLGFQFIFASMQKPEGLPHISDVVLDKANKTPLRPLDPTRLQGINCGPDFTPSFANLGRTTLSTRGPPRGGPGGELPRGPQAGLGPRRSQQGPRKEPRKIIATVLMTEDIKLNKAEKAWKPSSKRTAADKDRGEEDADGSKTQDLFRRVRSILNKLTPQMFQQLMKQVTQLAIDTEERLKGVIDLIFEKAISEPNFSVAYANMCRCLMALKVPTTEKPTVTVNFRKLLLNRCQKEFEKDKDDDEVFEKKQKEMDEAATAEERGRLKEELEEARDIARRRSLGNIKFIGELFKLKMLTEAIMHDCVVKLLKNHDEESLECLCRLLTTIGKDLDFEKAKPRMDQYFNQMEKIIKEKKTSSRIRFMLQDVLDLRGSNWVPRRGDQGPKTIDQIHKEAEMEEHREHIKVQQLMAKGSDKRRGGPPGPPISRGLPLVDDGGWNTVPISKGSRPIDTSRLTKITKPGSIDSNNQLFAPGGRLSWGKGSSGGSGAKPSDAASEAARPATSTLNRFSALQQAVPTESTDNRRVVQRSSLSRERGEKAGDRGDRLERSERGGDRGDRLDRARTPATKRSFSKEVEERSRERPSQPEGLRKAASLTEDRDRGRDAVKREAALPPVSPLKAALSEEELEKKSKAIIEEYLHLNDMKEAVQCVQELASPSLLFIFVRHGVESTLERSAIAREHMGQLLHQLLCAGHLSTAQYYQGLYEILELAEDMEIDIPHVWLYLAELVTPILQEGGVPMGELFREITKPLRPLGKAASLLLEILGLLCKSMGPKKVGTLWREAGLSWKEFLPEGQDIGAFVAEQKVEYTLGEESEAPGQRALPSEELNRQLEKLLKEGSSNQRVFDWIEANLSEQQIVSNTLVRALMTAVCYSAIIFETPLRVDVAVLKARAKLLQKYLCDEQKELQALYALQALVVTLEQPPNLLRMFFDALYDEDVVKEDAFYSWESSKDPAEQQGKGVALKSVTAFFKWLREAEEESDHN

SEQ ID NO: 6089 - protein, 1559 aa, Homo sapiens
MNTPSQPRQHFYPSRAQPPSSAASRVQSAAPARPGPAAHVYPAGSQVMMIPSQISYPASQGAYYIPGQGRSTYVVPTQQYPVQPGAPGFYPGASPTEFGTYAGAYYPAQGVQQFPTGVAPTPVLMNQPPQIAPKRERKTIRIRDPNQGGKDITEEIMSGARTASTPTPPQTGGGLEPQANGETPQVAVIVRPDDRSQGAIIADRPGLPGPEHSPSESQPSSPSPTPSPSPVLEPGSEPNLAVLSIPGDTMTTIQMSVEESTPISRETGEPYRLSPEPTPLAEPILEVEVTLSKPVPESEFSSSPLQAPTPLASHTVEIHEPNGMVPSEDLEPEVESSPELAPPPACPSESPVPIAPTAQPEELLNGAPSPPAVDLSPVSEPEEQAKEVTASMAPPTIPSATPATAPSATSPAQEEEMEEEEEEEEGEAGEAGEAESEKGGEELLPPESTPIPANLSQNLEAAAATQVAVSVPKRRRKIKELNKKEAVGDLLDAFKEANPAVPEVENQPPAGSNPGPESEGSGVPPRPEEADETWDSKEDKIHNAENIQPGEQKYEYKSDQWKPLNLEEKKRYDREFLLGFQFIFASMQKPEGLPHISDVVLDKANKTPLRPLDPTRLQGINCGPDFTPSFANLGRTTLSTRGPPRGGPGGELPRGPAGLGPRRSQQGPRKEPRKIIATVLMTEDIKLNKAEKAWKPSSKRTAADKDRGEEDADGSKTQDLFRRVRSILNKLTPQMFQQLMKQVTQLAIDTEERLKGVIDLIFEKAISEPNFSVAYANMCRCLMALKVPTTEKPTVTVNFRKLLLNRCQKEFEKDKDDDEVFEKKQKEMDEAATAEERGRLKEELEEARDIARRRSLGNIKFIGELFKLKMLTEAIMHDCVVKLLKNHDEESLECLCRLLTTIGKDLDFEKAKPRMDQYFNQMEKIIKEKKTSSRIRFMLQDVLDLRGSNWVPRRGDQGPKTIDQIHKEAEMEEHREHIKVQQLMAKGSDKRRGGPPGPPISRGLPLVDDGGWNTVPISKGSRPIDTSRLTKITKPGSIDSNNQLFAPGGRLSWGKGSSGGSGAKPSDAASEAARPATSTLNRFSALQQAVPTESTDNRRVVQRSSLSRERGEKAGDRGDRLERSERGGDRGDRLDRARTPATKRSFSKEVEERSRERPSQPEGLRKAASLTEDRDRGRDAVKREAALPPVSPLKAALSEEELEKKSKAIIEEYLHLNDMKEAVQCVQELASPSLLFIFVRHGVESTLERSAIAREHMGQLLHQLLCAGHLSTAQYYQGLYEILELAEDMEIDIPHVWLYLAELVTPILQEGGVPMGELFREITKPLRPLGKAASLLLEILGLLCKSMGPKKVGTLWREAGLSWKEFLPEGQDIGAFVAEQKVEYTLGEESEAPGQRALPSEELNRQLEKLLKEGSSNQRVFDWIEANLSEQQIVSNTLVRALMTAVCYSAIIFETPLRVDVAVLKARAKLLQKYLCDEQKELQALYALQALVVTLEQPPNLLRMFFDALYDEDVVKEDAFYSWESSKDPAEQQGKGVALKSVTAFFKWLREAEEESDHN

SEQ ID NO: 6090 - protein, 1606 aa, Homo sapiens; identical to SEQ ID NO: 6084

SEQ ID NO: 6091 - protein, 163 aa, Homo sapiens
MSGARTASTPTPPQTGGGLEPQANGETPQVAVIVRPDDRSQGAIIADRPGLPGPEHSPSESQPSSPSPTPSPSPVLEPGSEPNLAVLSIPGDTMTTIQMSVEESTPISRETGEPYRLSPEPTPLAEPILEVEVTLSKPVPESEFSSSPLQAPTPLASHTVEIH

SEQ ID NO: 6092 - protein, 1513 aa, Homo sapiens
MMIPSQISYPASQGAYYIPGQGRSTYVVPTQQYPVQPGAPGFYPGASPTEFGTYAGAYYPAQGVQQFPTGVAPTPVLMNQPPQIAPKRERKTIRIRDPNQGGKDITEEIMSGARTASTPTPPQTGGGLEPQANGETPQVAVIVRPDDRSQGAIIADRPGLPGPEHSPSESQPSSPSPTPSPSPVLEPGSEPNLAVLSIPGDTMTTIQMSVEESTPISRETGEPYRLSPEPTPLAEPILEVEVTLSKPVPESEFSSSPLQAPTPLASHTVEIHEPNGMVPSEDLEPEVESSPELAPPPACPSESPVPIAPTAQPEELLNGAPSPPAVDLSPVSEPEEQAKEVTASMAPPTIPSATPATAPSATSPAQEEEMEEEEEEEEGEAGEAGEAESEKGGEELLPPESTPIPANLSQNLEAAAATQVAVSVPKRRRKIKELNKKEAVGDLLDAFKEANPAVPEVENQPPAGSNPGPESEGSGVPPRPEEADETWDSKEDKIHNAENIQPGEQKYEYKSDQWKPLNLEEKKRYDREFLLGFQFIFASMQKPEGLPHISDVVLDKANKTPLRPLDPTRLQGINCGPDFTPSFANLGRTTLSTRGPPRGGPGGELPRGPQAGLGPRRSQQGPRKEPRKIIATVLMTEDIKLNKAEKAWKPSSKRTAADKDRGEEDADGSKTQDLFRRVRSILNKLTPQMFQQLMKQVTQLAIDTEERLKGVIDLIFEKAISEPNFSVAYANMCRCLMALKVPTTEKPTVTVNFRKLLLNRCQKEFEKDKDDDEVFEKKQKEMDEAATAEERGRLKEELEEARDIARRRSLGNIKFIGELFKLKMLTEAIMHDCVVKLLKNHDEESLECLCRLLTTIGKDLDFEKAKPRMDQYFNQMEKIIKEKKTSSRIRFMLQDVLDLRGSNWVPRRGDQGPKTIDQIHKEAEMEEHREHIKVQQLMAKGSDKRRGGPPGPPISRGLPLVDDGGWNTVPISKGSRPIDTSRLTKITKPGSIDSNNQLFAPGGRLSWGKGSSGGSGAKPSDAASEAARPATSTLNRFSALQQAVPTESTDNRRVVQRSSLSRERGEKAGDRGDRLERSERGGDRGDRLDRARTPATKRSFSKEVEERSRERPSQPEGLRKAASLTEDRDRGRDAVKREAALPPVSPLKAALSEEELEKKSKAIIEEYLHLNDMKEAVQCVQELASPSLLFIFVRHGVESTLERSAIAREHMGQLLHQLLCAGHLSTAQYYQGLYEILELAEDMEIDIPHVWLYLAELVTPILQEGGVPMGELFREITKPLRPLGKAASLLLEILGLLCKSMGPKKVGTLWREAGLSWKEFLPEGQDIGAFVAEQKVEYTLGEESEAPGQRALPSEELNRQLEKLLKEGSSNQRVFDWIEANLSEQQIVSNTLVRALMTAVCYSAIIFETPLRVDVAVLKARAKLLQKYLCDEQKELQALYALQALVVTLEQPPNLLRMFFDALYDEDVVKEDAFYSWESSKDPAEQQGKGVALKSVTAFFKWLREAEEESDHN

SEQ ID NO: 6093 - protein, 143 aa, Homo sapiens
MSGARTASTPTPPQTGGGLEPQANGETPQVAVIVRPDDRSQGAIIADRPGLPGPEHSPSESQPSSPSPTPSPSPVLEPGSEPNLAVLSIPGDTMTTIQMSVEESTPISRETGEPYRLSPEPTPLAEPILEVEVTLSKPVPESE

SEQ ID NO: 6094 - protein, 1404 aa, Homo sapiens
MSGARTASTPTPPQTGGGLEPQANGETPQVAVIVRPDDRSQGAIIADRPGLPGPEHSPSESQPSSPSPTPSPSPVLEPGSEPNLAVLSIPGDTMTTIQMSVEESTPISRETGEPYRLSPEPTPLAEPILEVEVTLSKPVPESEFSSSPLQAPTPLASHTVEIHEPNGMVPSEDLEPEVESSPELAPPPACPSESPVPIAPTAQPEELLNGAPSPPAVDLSPVSEPEEQAKEVTASMAPPTIPSATPATAPSATSPAQEEEMEEEEEEEEGEAGEAGEAESEKGGEELLPPESTPIPANLSQNLEAAAATQVAVSVPKRRRKIKELNKKEAVGDLLDAFKEANPAVPEVENQPPAGSNPGPESEGSGVPPRPEEADETWDSKEDKIHNAENIQPGEQKYEYKSDQWKPLNLEEKKRYDREFLLGFQFIFASMQKPEGLPHISDVVLDKANKTPLRPLDPTRLQGINCGPDFTPSFANLGRTTLSTRGPPRGGPGGELPRGPQAGLGPRRSQQGPRKEPRKIIATVLMTEDIKLNKAEKAWKPSSKRTAADKDRGEEDADGSKTQDLFRRVRSILNKLTPQMFQQLMKQVTQLAIDTEERLKGVIDLIFEKAISEPNFSVAYANMCRCLMALKVPTTEKPTVTVNFRKLLLNRCQKEFEKDKDDDEVFEKKQKEMDEAATAEERGRLKEELEEARDIARRRSLGNIKFIGELFKLKMLTEAIMHDCVVKLLKNHDEESLECLCRLLTTIGKDLDFEKAKPRMDQYFNQMEKIIKEKKTSSRIRFMLQDVLDLRGSNWVPRRGDQGPKTIDQIHKEAEMEEHREHIKVQQLMAKGSDKRRGGPPGPPISRGLPLVDDGGWNTVPISKGSRPIDTSRLTKITKPGSIDSNNQLFAPGGRLSWGKGSSGGSGAKPSDAASEAARPATSTLNRFSALQQAVPTESTDNRRVVQRSSLSRERGEKAGDRGDRLERSERGGDRGDRLDRARTPATKRSFSKEVEERSRERPSQPEGLRKAASLTEDRDRGRDAVKREAALPPVSPLKAALSEEELEKKSKAIIEEYLHLNDMKEAVQCVQELASPSLLFIFVRHGVESTLERSAIAREHMGQLLHQLLCAGHLSTAQYYQGLYEILELAEDMEIDIPHVWLYLAELVTPILQEGGVPMGELFREITKPLRPLGKAASLLLEILGLLCKSMGPKKVGTLWREAGLSWKEFLPEGQDIGAFVAEQKVEYTLGEESEAPGQRALPSEELNRQLEKLLKEGSSNQRVFDWIEANLSEQQIVSNTLVRALMTAVCYSAIIFETPLRVDVAVLKARAKLLQKYLCDEQKELQALYALQALVVTLEQPPNLLRMFFDALYDEDVVKEDAFYSWESSKDPAEQQGKGVALKSVTAFFKWLREAEEESDHN

SEQ ID NO: 6095 - protein, 1403 aa, Homo sapiens
MSGARTASTPTPPQTGGGLEPQANGETPQVAVIVRPDDRSQGAIIADRPGLPGPEHSPSESQPSSPSPTPSPSPVLEPGSEPNLAVLSIPGDTMTTIQMSVEESTPISRETGEPYRLSPEPTPLAEPILEVEVTLSKPVPESEFSSSPLQAPTPLASHTVEIHEPNGMVPSEDLEPEVESSPELAPPPACPSESPVPIAPTAQPEELLNGAPSPPAVDLSPVSEPEEQAKEVTASMAPPTIPSATPATAPSATSPAQEEEMEEEEEEEEGEAGEAGEAESEKGGEELLPPESTPIPANLSQNLEAAAATQVAVSVPKRRRKIKELNKKEAVGDLLDAFKEANPAVPEVENQPPAGSNPGPESEGSGVPPRPEEADETWDSKEDKIHNAENIQPGEQKYEYKSDQWKPLNLEEKKRYDREFLLGFQFIFASMQKPEGLPHISDVVLDKANKTPLRPLDPTRLQGINCGPDFTPSFANLGRTTLSTRGPPRGGPGGELPRGPAGLGPRRSQQGPRKEPRKIIATVLMTEDIKLNKAEKAWKPSSKRTAADKDRGEEDADGSKTQDLFRRVRSILNKLTPQMFQQLMKQVTQLAIDTEERLKGVIDLIFEKAISEPNFSVAYANMCRCLMALKVPTTEKPTVTVNFRKLLLNRCQKEFEKDKDDDEVFEKKQKEMDEAATAEERGRLKEELEEARDIARRRSLGNIKFIGELFKLKMLTEAIMHDCVVKLLKNHDEESLECLCRLLTTIGKDLDFEKAKPRMDQYFNQMEKIIKEKKTSSRIRFMLQDVLDLRGSNWVPRRGDQGPKTIDQIHKEAEMEEHREHIKVQQLMAKGSDKRRGGPPGPPISRGLPLVDDGGWNTVPISKGSRPIDTSRLTKITKPGSIDSNNQLFAPGGRLSWGKGSSGGSGAKPSDAASEAARPATSTLNRFSALQQAVPTESTDNRRVVQRSSLSRERGEKAGDRGDRLERSERGGDRGDRLDRARTPATKRSFSKEVEERSRERPSQPEGLRKAASLTEDRDRGRDAVKREAALPPVSPLKAALSEEELEKKSKAIIEEYLHLNDMKEAVQCVQELASPSLLFIFVRHGVESTLERSAIAREHMGQLLHQLLCAGHLSTAQYYQGLYEILELAEDMEIDIPHVWLYLAELVTPILQEGGVPMGELFREITKPLRPLGKAASLLLEILGLLCKSMGPKKVGTLWREAGLSWKEFLPEGQDIGAFVAEQKVEYTLGEESEAPGQRALPSEELNRQLEKLLKEGSSNQRVFDWIEANLSEQQIVSNTLVRALMTAVCYSAIIFETPLRVDVAVLKARAKLLQKYLCDEQKELQALYALQALVVTLEQPPNLLRMFFDALYDEDVVKEDAFYSWESSKDPAEQQGKGVALKSVTAFFKWLREAEEESDHN

SEQ ID NO: 6096 - protein, 1436 aa, Homo sapiens
MNQPPQIAPKRERKTIRIRDPNQGGKDITEEIMSGARTASTPTPPQTGGGLEPQANGETPQVAVIVRPDDRSQGAIIADRPGLPGPEHSPSESQPSSPSPTPSPSPVLEPGSEPNLAVLSIPGDTMTTIQMSVEESTPISRETGEPYRLSPEPTPLAEPILEVEVTLSKPVPESEFSSSPLQAPTPLASHTVEIHEPNGMVPSEDLEPEVESSPELAPPPACPSESPVPIAPTAQPEELLNGAPSPPAVDLSPVSEPEEQAKEVTASMAPPTIPSATPATAPSATSPAQEEEMEEEEEEEEGEAGEAGEAESEKGGEELLPPESTPIPANLSQNLEAAAATQVAVSVPKRRRKIKELNKKEAVGDLLDAFKEANPAVPEVENQPPAGSNPGPESEGSGVPPRPEEADETWDSKEDKIHNAENIQPGEQKYEYKSDQWKPLNLEEKKRYDREFLLGFQFIFASMQKPEGLPHISDVVLDKANKTPLRPLDPTRLQGINCGPDFTPSFANLGRTTLSTRGPPRGGPGGELPRGPQAGLGPRRSQQGPRKEPRKIIATVLMTEDIKLNKAEKAWKPSSKRTAADKDRGEEDADGSKTQDLFRRVRSILNKLTPQMFQQLMKQVTQLAIDTEERLKGVIDLIFEKAISEPNFSVAYANMCRCLMALKVPTTEKPTVTVNFRKLLLNRCQKEFEKDKDDDEVFEKKQKEMDEAATAEERGRLKEELEEARDIARRRSLGNIKFIGELFKLKMLTEAIMHDCVVKLLKNHDEESLECLCRLLTTIGKDLDFEKAKPRMDQYFNQMEKIIKEKKTSSRIRFMLQDVLDLRGSNWVPRRGDQGPKTIDQIHKEAEMEEHREHIKVQQLMAKGSDKRRGGPPGPPISRGLPLVDDGGWNTVPISKGSRPIDTSRLTKITKPGSIDSNNQLFAPGGRLSWGKGSSGGSGAKPSDAASEAARPATSTLNRFSALQQAVPTESTDNRRVVQRSSLSRERGEKAGDRGDRLERSERGGDRGDRLDRARTPATKRSFSKEVEERSRERPSQPEGLRKAASLTEDRDRGRDAVKREAALPPVSPLKAALSEEELEKKSKAIIEEYLHLNDMKEAVQCVQELASPSLLFIFVRHGVESTLERSAIAREHMGQLLHQLLCAGHLSTAQYYQGLYEILELAEDMEIDIPHVWLYLAELVTPILQEGGVPMGELFREITKPLRPLGKAASLLLEILGLLCKSMGPKKVGTLWREAGLSWKEFLPEGQDIGAFVAEQKVEYTLGEESEAPGQRALPSEELNRQLEKLLKEGSSNQRVFDWIEANLSEQQIVSNTLVRALMTAVCYSAIIFETPLRVDVAVLKARAKLLQKYLCDEQKELQALYALQALVVTLEQPPNLLRMFFDALYDEDVVKEDAFYSWESSKDPAEQQGKGVALKSVTAFFKWLREAEEESDHN

SEQ ID NO: 6097 - protein, 127 aa, Homo sapiens
MSGARTASTPTPPQTGGGLEPQANGETPQVAVIVRPDDRSQGAIIADRPGLPGPEHSPSESQPSSPSPTPSPSPVLEPGSEPNLAVLSIPGDTMTTIQMSVEESTPISRETGEPYRLSPEPTPLAEP

SEQ ID NO: 6098 - protein, 87 aa, Homo sapiens
MNTPSQPRQHFYPSRAQPPSSAASRVQSAAPARPGPAAHVYPAGSQVMMIPSQISYPASQGAYYIPGQGRSTYVVPTQQYPVQPGAP

SEQ ID NO: 6099 - protein, 285 aa, Homo sapiens
MSGARTASTPTPPQTGGGLEPQANGETPQVAVIVRPDDRSQGAIIADRPGLPGPEHSPSESQPSSPSPTPSPSPVLEPGSEPNLAVLSIPGDTMTTIQMSVEESTPISRETGEPYRLSPEPTPLAEPILEVEVTLSKPVPESEFSSSPLQAPTPLASHTVEIHEPNGMVPSEDLEPEVESSPELAPPPACPSESPVPIAPTAQPEELLNGAPSPPAVDLSPVSEPEEQAKEVTASMAPPTIPSATPATAPSATSPAQEEEMEEEEEEEEGEAGEAGEAESEKGGE

SEQ ID NO: 6100 - protein, 611 aa, Homo sapiens
MAASAKKKNKKGKTISLTDFLAEDGGTGGGSTYVSKPVSWADETDDLEGDVSTTWHSNDDDVYRAPPIDRSILPTAPRAAREPNIDRSRLPKSPPYTAFLGNLPYDVTEESIKEFFRGLNISAVRLPREPSNPERLKGFGYAEFEDLDSLLSALSLNEESLGNRRIRVDVADQAQDKDRDDRSFGRDRNRDSDKTDTDWRARPATDSFDDYPPRRGDDSFGDKYRDRYDSDRYRDGYRDGYRDGPRRDMDRYGGRDRYDDRGSRDYDRGYDSRIGSGRRAFGSGYRRDDDYRGGGDRYEDRYDRRDDRSWSSRDDYSRDDYRRDDRGPPQRPKLNLKPRSTPKEDDSSASTSQSTRAASIFGGAKPVDTAAREREVEERLQKEQEKLQRQLDEPKLERRPRERHPSWRSEETQERERSRTGSESSQTGTSTTSSRNARRRESEKSLENETLNKEEDCHSPTSKPPKPDQPLKVMPAPPPKENAWVKRSSNPPARSQSSDTEQQSPTSGGGKVAPAQPSEEGPGRKDENKVDGMNAPKGQTGNSSRGPGDGGNRDHWKESDRKDGKKDQDSRSAPEPKKPEENPASKFSSASKYAALSVDGEDENEGEDYAE

SEQ ID NO: 6101 - protein, 587 aa, Homo sapiens
MAASAKKKNKKGKTISLTDFLAEDGGTGGGSTYVSKPVSWADETDDLEGDVSTTWHSNDDDVYRAPPIDRSILPTAPRAAREPNIDRSRLPKSPPYTAFLGNLPYDVTEESIKEFFRGLNISAVRLPREPSNPERLKGFGYAEFEDLDSLLSALSLNEESLGNRRIRVDVADQAQDKDRDDRSFGRDRNRDSDKTDTDWRARPATDSFDDYPPRRGDDSFGDKYRDRYGGRDRYDDRGSRDYDRGYDSRIGSGRRAFGSGYRRDDDYRGGGDRYEDRYDRRDDRSWSSRDDYSRDDYRRDDRGPPQRPKLNLKPRSTPKEDDSSASTSQSTRAASIFGGAKPVDTAAREREVEERLQKEQEKLQRQLDEPKLERRPRERHPSWRSEETQERERSRTGSESSQTGTSTTSSRNARRRESEKSLENETLNKEEDCHSPTSKPPKPDQPLKVMPAPPPKENAWVKRSSNPPARSQSSDTEQQSPTSGGGKVAPAQPSEEGPGRKDENKVDGMNAPKGQTGNSSRGPGDGGNRDHWKESDRKDGKKDQDSRSAPEPKKPEENPASKFSSASKYAALSVDGEDENEGEDYAE

SEQ ID NO: 6102 - protein, 237 aa, Homo sapiens
MLDLTSRGQVGTSRRMAEAACSAHFLETTPTPNPPTTEEEKTESNQEVANPEHYIKHPLQNRWALWFFKNDKSKTWQANLRLISKFDTVEDFWALYNHIQLSSNLMPGCDYSLFKDGIEPMWEDEKNKRGGRWLITLNKQQRRSDLDRFWLETLLCLIGESFDDYSDDVCGAVVNVRAKGDKIAIWTTECENREAVTHIGRVYKERLGLPPKIVIGYQSHADTATKSGSTTKNRFVV

SEQ ID NO: 6103 - protein, 217 aa, Homo sapiens [sequence omitted]

SEQ ID NO: 6104 - protein, 248 aa, Homo sapiens
MATVEPETTPTPNPPTTEEEKTESNQEVANPEHYIKHPLQNRWALWFFKNDKSKTWQANLRLISKFDTVEDFWALYNHIQLSSNLMPGCDYSLFKDGIEPMWEDEKNKRGGRWLITLNKQQRRSDLDRFWLETRWDLAMLPRLVSNFWPQVILPLQPPKVLELQLLCLIGESFDDYSDDVCGAVVNVRAKGDKIAIWTTECENREAVTHIGRVYKERLGLPPKIVIGYQSHADTATKSGSTTKNRFVV

SEQ ID NO: 6105 - protein, 118 aa, Homo sapiens
MSGGSSCSQTPSRAIPATRRVVLGDGVQLPPGDYSTTPGGTLFSTTPGGTRIIYDRKFLMECRNSPVTKTPPRDLPTIPGVTSPSSDEPPMEASQSHLRNSPEDKRAGGEESQFEMDI

SEQ ID NO: 6106 - protein, 618 aa, Homo sapiens
MASTDYSTYSQAAAQQGYSAYTAQPTQGYAQTTQAYGQQSYGTYGQPTDVSYTQAQTTATYGQTAYATSYGQPPTGYTTPTAPQAYSQPVQGYGTGAYDTTTATVTTTQASYAAQSAYGTQPAYPAYGQQPAATAPTRPQDGNKPTETSQPQSSTGGYNQPSLGYGQSNYSYPQVPGSYPMQPVTAPPSYPPTSYSSTQPTSYDQSSYSQQNTYGQPSSYGQQSSYGQQSSYGQQPPTSYPPQTGSYSQAPSQYSQQSSSYGQQSSFRQDHPSSMGVYGQESGGFSGPGENRSMSGPDNRGRGRGGFDRGGMSRDPDEDSDNSAIYVQGLNDSVTLDDLADFFKQCGVVKMNKRTGQPMIHIYLDKETGKPKGDATVSYEDPPTAKAAVEWFDGKDFQGSKLKVSLARKKPPMNSMRGGLPPREGRGMPPPLRGGPGGPGGPGGPMGRMGGRGGDRGGFPPRGPRGSRGNPSGGGNVQHRAGDWQCPNPGCGNQNFAWRTECNQCKAPKPEGFLPPPFPPPGGDRGRGGPGGMRGGRGGLMDRGGPGGMFRGGRGGDRGGFRGGRGMDRGGFGGGRRGGPGGPPGPLMEQMGGRRGGRGGPGKMDKGEHRQERRDRPY

SEQ ID NO: 6107 - protein, 600 aa, Homo sapiens
MASTDYSTYSQAAAQQGYSAYTAQPTQGYAQTTQAYGQQSYGTYGQPTDVSYTQAQTTATYGQTAYATSYGQPPTGYTTPTAPQAYSQPVQGYGTGAYDTTTATVTTTQASYAAQSAYGTQPAYPAYGQQPAATAPTSYSSTQPTSYDQSSYSQQNTYGQPSSYGQQSSYGQQSSYGQQPPTSYPPQTGSYSQAPSQYSQQSSSYGQQSSFRQDHPSSMGVYGQESGGFSGPGENRSMSGPDNRGRGRGGFDRGGMSRGGRGGGRGGMGSAGERGGFNKPGGPMDEGPDLDLGPPVDPDEDSDNSAIYVQGLNDSVTLDDLADFFKQCGVVKMNKRTGQPMIHIYLDKETGKPKGDATVSYEDPPTAKAAVEWFDGKDFQGSKLKVSLARKKPPMNSMRGGLPPREGRGMPPPLRGGPGGPGGPGGPMGRMGGRGGDRGGFPPRGPRGSRGNPSGGGNVQHRAGDWQCPNPGCGNQNFAWRTECNQCKAPKPEGFLPPPFPPPGGDRGRGGPGGMRGGRGGLMDRGGPGGMFRGGRGGDRGGFRGGRGMDRGGFGGGRRGGPGGPPGPLMEQMGGRRGGRGGPGKMDKGEHRQERRDRPY

SEQ ID NO: 6108 - protein, 583 aa, Homo sapiens
MASTDYSTYSQAAAQQGYSAYTAQPTQGYAQTTQAYGQQSYGTYGQPTDVSYTQAQTTATYGQTAYATSYGQPPTGYTTPTAPQAYSQPVQGYGTGAYDTTTATVTTTQASYAAQSAYGTQPAYPAYGQQPAATAPTRPQDGNKPTETSQPQSSTGGYNQPSLGYGQSNYSYPQVPGSYPMQPVTAPPSYPPTSYSSTQPTSYDQSSYSQQNTYGQPSSYGQQSSYGQQSSYGQQPPTSYPPQTGSYSQAPSQYSQQSSSYGQQRPMDEGPDLDLGPPVDPDEDSDNSAIYVQGLNDSVTLDDLADFFKQCGVVKMNKRTGQPMIHIYLDKETGKPKGDATVSYEDPPTAKAAVEWFDGKDFQGSKLKVSLARKKPPMNSMRGGLPPREGRGMPPPLRGGPGGPGGPGGPMGRMGGRGGDRGGFPPRGPRGSRGNPSGGGNVQHRAGDWQCPNPGCGNQNFAWRTECNQCKAPKPEGFLPPPFPPPGGDRGRGGPGGMRGGRGGLMDRGGPGGMFRGGRGGDRGGFRGGRGMDRGGFGGGRRGGPGGPPGPLMEQMGGRRGGRGGPGKMDKGEHRQERRDRPY

SEQ ID NO: 6109 - protein, 656 aa, Homo sapiens
MASTDYSTYSQAAAQQGYSAYTAQPTQGYAQTTQAYGQQSYGTYGQPTDVSYTQAQTTATYGQTAYATSYGQPPTGYTTPTAPQAYSQPVQGYGTGAYDTTTATVTTTQASYAAQSAYGTQPAYPAYGQQPAATAPTRPQDGNKPTETSQPQSSTGGYNQPSLGYGQSNYSYPQVPGSYPMQPVTAPPSYPPTSYSSTQPTSYDQSSYSQQNTYGQPSSYGQQSSYGQQSSYGQQPPTSYPPQTGSYSQAPSQYSQQSSSYGQQSSFRQDHPSSMGVYGQESGGFSGPGENRSMSGPDNRGRGRGGFDRGGMSRGGRGGGRGGMGSAGERGGFNKPGGPMDEGPDLDLGPPVDPDEDSDNSAIYVQGLNDSVTLDDLADFFKQCGVVKMNKRTGQPMIHIYLDKETGKPKGDATVSYEDPPTAKAAVEWFDGKDFQGSKLKVSLARKKPPMNSMRGGLPPREGRGMPPPLRGGPGGPGGPGGPMGRMGGRGGDRGGFPPRGPRGSRGNPSGGGNVQHRAGDWQCPNPGCGNQNFAWRTECNQCKAPKPEGFLPPPFPPPGGDRGRGGPGGMRGGRGGLMDRGGPGGMFRGGRGGDRGGFRGGRGMDRGGFGGGRRGGPGGPPGPLMEQMGGRRGGRGGPGKMDKGEHRQERRDRPY

SEQ ID NO: 6110 - protein, 655 aa, Homo sapiens
MASTDYSTYSQAAAQQGYSAYTAQPTQGYAQTTQAYGQQSYGTYGQPTDVSYTQAQTTATYGQTAYATSYGQPPTGYTTPTAPQAYSQPVQGYGTGAYDTTTATVTTTQASYAAQSAYGTQPAYPAYGQQPAATAPTRPQDGNKPTETSQPQSSTGGYNQPSLGYGQSNYSYPQVPGSYPMQPVTAPPSYPPTSYSSTQPTSYDQSSYSQQNTYGQPSSYGQQSSYGQQSSYGQQPPTSYPPQTGSYSQAPSQYSQQSSSYGQQSSFRQDHPSSMGVYGQESGGFSGPGENRSMSGPDNRGRGRGGFDRGGMSRGGRGGGRGGMGAGERGGFNKPGGPMDEGPDLDLGPPVDPDEDSDNSAIYVQGLNDSVTLDDLADFFKQCGVVKMNKRTGQPMIHIYLDKETGKPKGDATVSYEDPPTAKAAVEWFDGKDFQGSKLKVSLARKKPPMNSMRGGLPPREGRGMPPPLRGGPGGPGGPGGPMGRMGGRGGDRGGFPPRGPRGSRGNPSGGGNVQHRAGDWQCPNPGCGNQNFAWRTECNQCKAPKPEGFLPPPFPPPGGDRGRGGPGGMRGGRGGLMDRGGPGGMFRGGRGGDRGGFRGGRGMDRGGFGGGRRGGPGGPPGPLMEQMGGRRGGRGGPGKMDKGEHRQERRDRPY

SEQ ID NO: 6111 - protein, 661 aa, Homo sapiens
MASTDYSTYSQAAAQQGYSAYTAQPTQGYAQTTQAYGQQSYGTYGQPTDVSYTQAQTTATYGQTAYATSYGQPPTVEGTSTGYTTPTAPQAYSQPVQGYGTGAYDTTTATVTTTQASYAAQSAYGTQPAYPAYGQQPAATAPTRPQDGNKPTETSQPQSSTGGYNQPSLGYGQSNYSYPQVPGSYPMQPVTAPPSYPPTSYSSTQPTSYDQSSYSQQNTYGQPSSYGQQSSYGQQSSYGQQPPTSYPPQTGSYSQAPSQYSQQSSSYGQQSSFRQDHPSSMGVYGQESGGFSGPGENRSMSGPDNRGRGRGGFDRGGMSRGGRGGGRGGMGAGERGGFNKPGGPMDEGPDLDLGPPVDPDEDSDNSAIYVQGLNDSVTLDDLADFFKQCGVVKMNKRTGQPMIHIYLDKETGKPKGDATVSYEDPPTAKAAVEWFDGKDFQGSKLKVSLARKKPPMNSMRGGLPPREGRGMPPPLRGGPGGPGGPGGPMGRMGGRGGDRGGFPPRGPRGSRGNPSGGGNVQHRAGDWQCPNPGCGNQNFAWRTECNQCKAPKPEGFLPPPFPPPGGDRGRGGPGGMRGGRGGLMDRGGPGGMFRGGRGGDRGGFRGGRGMDRGGFGGGRRGGPGGPPGPLMEQMGGRRGGRGGPGKMDKGEHRQERRDRPY

SEQ ID NO: 6112 - protein, 180 aa, Homo sapiens
MASTDYSTYSQAAAQQGYSAYTAQPTQGYAQTTQASYAAQSAYGTQPAYPAYGQQPAATAPTRPQDGNKPTETSQPQSSTGGYNQPSLGYGQSNYSYPQVPGSYPMQPVTAPPSYPPTSYSSTQPTSYDQSSYSQQNTYGQPSSYGQQSSYGQQSSYGQQPPTSYPPQTGSYSQAPSQYS

SEQ ID NO: 6113 - protein, 354 aa, Homo sapiens
MASTDYSTYSQAAAQQGYSAYTAQPTQGYAQTTQAYGQQSYGTYGQPTDVSYTQAQTTATYGQTAYATSYGQPPTGYTTPTAPQAYSQPVQGYGTGAYDTTTATVTTTQASYAAQSAYGTQPAYPAYGQQPAATAPTRPQDGNKPTETSQPQSSTGGYNQPSLGYGQSNYSYPQVPGSYPMQPVTAPPSYPPTSYSSTQPTSYDQSSYSQQNTYGQPSSYGQQSSYGQQSSYGQQPPTSYPPQTGSYSQAPSQYSQQSSSYGQQSSFRQDHPSSMGVYGQESGGFSGPGENRSMSGPDNRGRGRGGFDRGGMSRGGRGGGRGGMGLQSESLVYTSILKKYPYSVLSRQHNEKWD

SEQ ID NO: 6114 - protein, 323 aa, Homo sapiens
MDPGKDKEGVPQPSGPPARKKFVIPLDEDEVPPGVAKPLFRSTQSLPTVDTSAQAAPQTYAEYAISQPLEGAGATCPTGSEPLAGETPNQALKPGAKSNSIIVSPRQRGNPVLKFVRNVPWEFGDVIPDYVLGQSTCALFLSLRYHNLHPDYIHGRLQSLGKNFALRVLLVQVDVKDPQQALKELAKMCILADCTLILAWSPEEAGRYLETYKAYEQKPADLLMEKLEQDFVSRVTECLTTVKSVNKTDSQTLLTTFGSLEQLIAASREDLALCPGLGPQKVRALGKNPRSWGKERAPNKHNLRPQSFKVKKEPKTRHSGFRL

SEQ ID NO: 6115 - protein, 297 aa, Homo sapiens
MDPGKDKEGVPQPSGPPARKKFVIPLDEDEVPPGVAKPLFRSTQSLPTVDTSAQAAPQTYAEYAISQPLEGAGATCPTGSEPLAGETPNQALKPGAKSNSIIVSPRQRGNPVLKFVRNVPWEFGDVIPDYVLGQSTCALFLSLRYHNLHPDYIHGRLQSLGKNFALRVLLVQVDVKDPQQALKELAKMCILADCTLILAWSPEEAGRYLETYKAYEQKPADLLMEKLEQDFVSRVTECLTTVKSVNKTDSQTLLTTFGSLEQLIAASREDLALCPGLGPQKARRLFDVLHEPFLKVP

SEQ ID NO: 6116 - protein, 273 aa, Homo sapiens
MDPGKDKEGVPQPSGPPARKKFVIPLDEDEVPPGVAKPLFRSTQSLPTVDTSAQAAPQTYAEYAISQPLEGAGATCPTGSEPLAGETPNQALKPGAKSNSIIVSPRQRGNPVLKFVRNVPWEFGDVIPDYVLGQSTCALFLSLRYHNLHPDYIHGRLQSLGKNFALRVLLVQVDVKDPQQALKELAKMCILADCTLILAWSPEEAGRYLETYKAYEQKPADLLMEKLEQDFVSRSLEQLIAASREDLALCPGLGPQKARRLFDVLHEPFLKVP

SEQ ID NO: 6117 - protein, 225 aa, Homo sapiens
MDPGKDKEGVPQPSGPPARKKFVIPLDEDEVPPGVRGNPVLKFVRNVPWEFGDVIPDYVLGQSTCALFLSLRYHNLHPDYIHGRLQSLGKNFALRVLLVQVDVKDPQQALKELAKMCILADCTLILAWSPEEAGRYLETYKAYEQKPADLLMEKLEQDFVSRVTECLTTVKSVNKTDSQTLLTTFGSLEQLIAASREDLALCPGLGPQKARRLFDVLHEPFLKVP

SEQ ID NO: 6118 - protein, 39 aa, Homo sapiens
MDPGKDKEGVPQPSGPPARKKFVIPLDEDEVPPGVSKPL

SEQ ID NO: 6119 - protein, 127 aa, Homo sapiens
MKLNVDGLLVYFPYDYIYPEQFSYMRELKRTLDAKGHGVLEMPSGTGKTVSLLALIMAYQRAYPLEVTKLIYCSRTVPEIEKVIEELRKLLNFYEKQEGEKLPFLGLALSSRKNLCIHPETTSASTP

SEQ ID NO: 6120 - protein, 405 aa, Homo sapiens
MRELKRTLDAKGHGVLEMPSGTGKTVSLLALIMAYQRAYPLEVTKLIYCSRTVPEIEKVIEELRKLLNFYEKQEGEKLPFLGLALSSRKNLCIHPEVTPLRFGKDVDGKCHSLTASYVRAQYQHDTSLPHCRFYEEFDAHGREVPLPAGIYNLDDLKALGRRQGWCPYFLARYSILHANVVVYSYHYLLDPKIADLVSKELARKAVVVFDEAHNIDNVCIDSMSVNLTRRTLDRCQGNLETLQKTVLRIKETDEQRLRDEYRRLVEGLREASAARETDAHLANPVLPDEVLQEAVPGSIRTAEHFLGFLRRLLEYVKWRLRVQHVVQESPPAFLSGLAQRVCIQRKPLRFCAERLRSLLHTLEITDLADFSPLTLLANFATLVSTYAKGQAQHCGSSRNQKRSHP

SEQ ID NO: 6121 - protein, 710 aa, Homo sapiens
MRELKRTLDAKAYPLEVTKLIYCSRTVPEIEKVIEELRKLLNFYEKQEGEKLPFLGLALSSRKNLCIHPEVTPLRFGKDVDGKCHSLTASYVRAQYQHDTSLPHCRFYEEFDAHGREVPLPAGIYNLDDLKALGRRQGWCPYFLARYSILHANVVVYSYHYLLDPKIADLVSKELARKAVVVFDEAHNIDNVCIDSMSVNLTRRTLDRCQGNLETLQKTVLRIKETDEQRLRDEYRRLVEGLREASAARETDAHLANPVLPDEVLQEAVPGSIRTAEHFLGFLRRLLEYVKWRLRVQHVVQESPPAFLSGLAQRVCIQRKPLRFCAERLRSLLHTLEITDLADFSPLTLLANFATLVSTYAKGFTIIIEPFDDRTPTIANPILHFSCMDASLAIKPVFERFQSVIITSGTLSPLDIYPKILDFHPVTMATFTMTLARVCLCPMIIGRGNDQVAISSKFETREDIAVIRNYGNLLLEMSAVVPDGIVAFFTSYQYMESTVASWYEQGILENIQRNKLLFIETQDGAETSVALEKYQEACENGRGAILLSVARGKVSEGIDFVHHYGRAVIMFGVPYVYTQSRILKARLEYLRDQFQIRENDFLTFDAMRHAAQCVGRAIRGKTDYGLMVFADKRFARGDKRGKLPRWIQEHLTDANLNLTVDEGVQVAKYFLRQMAQPFHREDQLGLSLLSLEQLESEETLKRIEQIAQQL

SEQ ID NO: 6122 - protein, 736 aa, Homo sapiens
MRELKRTLDAKGHGVLEMPSGTGKTVSLLALIMAYQRAYPLEVTKLIYCSRTVPEIEKVIEELRKLLNFYEKQEGEKLPFLGLALSSRKNLCIHPEVTPLRFGKDVDGKCHSLTASYVRAQYQHDTSLPHCRFYEEFDAHGREVPLPAGIYNLDDLKALGRRQGWCPYFLARYSILHANVVVYSYHYLLDPKIADLVSKELARKAVVVFDEAHNIDNVCIDSMSVNLTRRTLDRCQGNLETLQKTVLRIKETDEQRLRDEYRRLVEGLREASAARETDAHLANPVLPDEVLQEAVPGSIRTAEHFLGFLRRLLEYVKWRLRVQHVVQESPPAFLSGLAQRVCIQRKPLRFCAERLRSLLHTLEITDLADFSPLTLLANFATLVSTYAKGFTIIIEPFDDRTPTIANPILHFSCMDASLAIKPVFERFQSVIITSGTLSPLDIYPKILDFHPVTMATFTMTLARVCLCPMIIGRGNDQVAISSKFETREDIAVIRNYGNLLLEMSAVVPDGIVAFFTSYQYMESTVASWYEQGILENIQRNKLLFIETQDGAETSVALEKYQEACENGRGAILLSVARGKVSEGIDFVHHYGRAVIMFGVPYVYTQSRILKARLEYLRDQFQIRENDFLTFDAMRHAAQCVGRAIRGKTDYGLMVFADKRFARGDKRGKLPRWIQEHLTDANLNLTVDEGVQVAKYFLRQMAQPFHREDQLGLSLLSLEQLESEETLKRIEQIAQQL

SEQ ID NO: 6123 - protein, 682 aa, Homo sapiens
MKLNVDGLLVYFPYDYIYPEQFSYMRELKRTLDAKGHGVLEMPSGTGKTVSLLALIMAYQRAYPLEVTKLIYCSRTVPEIEKVIEELRKLLNFYEKQEGEKLPFLGLALSSRKNLCIHPEILHANVVVYSYHYLLDPKIADLVSKELARKAVVVFDEAHNIDNVCIDSMSVNLTRRTLDRCQGNLETLQKTVLRIKETDEQRLRDEYRRLVEGLREASAARETDAHLANPVLPDEVLQEAVPGSIRTAEHFLGFLRRLLEYVKWRLRVQHVVQESPPAFLSGLAQRVCIQRKPLRFCAERLRSLLHTLEITDLADFSPLTLLANFATLVSTYAKGFTIIIEPFDDRTPTIANPILHFSCMDASLAIKPVFERFQSVIITSGTLSPLDIYPKILDFHPVTMATFTMTLARVCLCPMIIGRGNDQVAISSKFETREDIAVIRNYGNLLLEMSAVVPDGIVAFFTSYQYMESTVASWYEQGILENIQRNKLLFIETQDGAETSVALEKYQEACENGRGAILLSVARGKVSEGIDFVHHYGRAVIMFGVPYVYTQSRILKARLEYLRDQFQIRENDFLTFDAMRHAAQCVGRAIRGKTDYGLMVFADKRFARGDKRGKLPRWIQEHLTDANLNLTVDEGVQVAKYFLRQMAQPFHREDQLGLSLLSLEQLESEETLKRIEQIAQQL

SEQ ID NO: 6124 - protein, 760 aa, Homo sapiens
MKLNVDGLLVYFPYDYIYPEQFSYMRELKRTLDAKGHGVLEMPSGTGKTVSLLALIMAYQRAYPLEVTKLIYCSRTVPEIEKVIEELRKLLNFYEKQEGEKLPFLGLALSSRKNLCIHPEVTPLRFGKDVDGKCHSLTASYVRAQYQHDTSLPHCRFYEEFDAHGREVPLPAGIYNLDDLKALGRRQGWCPYFLARYSILHANVVVYSYHYLLDPKIADLVSKELARKAVVVFDEAHNIDNVCIDSMSVNLTRRTLDRCQGNLETLQKTVLRIKETDEQRLRDEYRRLVEGLREASAARETDAHLANPVLPDEVLQEAVPGSIRTAEHFLGFLRRLLEYVKWRLRVQHVVQESPPAFLSGLAQRVCIQRKPLRFCAERLRSLLHTLEITDLADFSPLTLLANFATLVSTYAKGFTIIIEPFDDRTPTIANPILHFSCMDASLAIKPVFERFQSVIITSGTLSPLDIYPKILDFHPVTMATFTMTLARVCLCPMIIGRGNDQVAISSKFETREDIAVIRNYGNLLLEMSAVVPDGIVAFFTSYQYMESTVASWYEQGILENIQRNKLLFIETQDGAETSVALEKYQEACENGRGAILLSVARGKVSEGIDFVHHYGRAVIMFGVPYVYTQSRILKARLEYLRDQFQIRENDFLTFDAMRHAAQCVGRAIRGKTDYGLMVFADKRFARGDKRGKLPRWIQEHLTDANLNLTVDEGVQVAKYFLRQMAQPFHREDQLGLSLLSLEQLESEETLKRIEQIAQQL

SEQ ID NO: 6125 - protein, 916 aa, Homo sapiens
MESGQPARRIAMAPLLEYERQLVLELLDTDGLVVCARGLGADRLLYHFLQLHCHPACLVLVLNTQPAEEEYFINQLKIEGVEHLPRRVTNEITSNSRYEVYTQGGVIFATSRILVVDFLTDRIPSDLITGILVYRAHRIIESCQEAFILRLFRQKNKRGFIKAFTDNAVAFDTGFCHVERVMRNLFVRKLYLWPRFHVAVNSFLEQHKPEVVEIHVSMTPTMLAIQTAILDILNACLKELKCHNPSLEVEDLSLENAIGKPFDKTIRHYLDPLWHQLGAKTKSLVQDLKILRTLLQYLSQYDCVTFLNLLESLRATEKAFGQNSGWLFLDSSTSMFINARARVYHLPDAKMSKKEKISEKMEIKEGEETKKELVLESNPKWEALTEVLKEIEAENKESEALGGPGQVLICASDDRTCSQLRDYITLGAEAFLLRLYRKTFEKDSKAEEVWMKFRKEDSSKRIRKSHKRPKDPQNKERASTKERTLKKKKRKLTLTQMVGKPEELEEEGDVEEGYRREISSSPESCPEEIKHEEFDVNLSSDAAFGILKEPLTIIHPLLGCSDPYALTRVLHEVEPRYVVLYDAELTFVRQLEIYRASRPGKPLRVYFLIYGGSTEEQRYLTALRKEKEAFEKLIREKASMVVPEEREGRDETNLDLVRGTASADVSTDTRKAGGQEQNGTQQSIVVDMREFRSELPSLIHRRGIDIEPVTLEVGDYILTPEMCVERKSISDLIGSLNNGRLYSQCISMSRYYKRPVLLIEFDPSKPFSLTSRGALFQEISSNDISSKLTLLTLHFPRLRILWCPSPHATAELFEELKQSKPQPDAATALAITADSETLPESEKYNPGPQDFLLKMPGVNAKNCRSLMHHVKNIAELAALSQDELTSILGNAANAKQLYDFIHTSFAEVVSKGKGKK

SEQ ID NO: 6126 - protein, 904 aa, Homo sapiens
MAPLLEYERQLVLELLDTDGLVVCARGLGADRLLYHFLQLHCHPACLVLVLNTQPAEEEYFINQLKIEGVEHLPRRVTNEITSNSRYEVYTQGGVIFATSRILVVDFLTDRIPSDLITGILVYRAHRIIESCQEAFILRLFRQKNKRGFIKAFTDNAVAFDTGFCHVERVMRNLFVRKLYLWPRFHVAVNSFLEQHKPEVVEIHVSMTPTMLAIQTAILDILNACLKELKCHNPSLEVEDLSLENAIGKPFDKTIRHYLDPLWHQLGAKTKSLVQDLKILRTLLQYLSQYDCVTFLNLLESLRATEKAFGQNSGWLFLDSSTSMFINARARVYHLPDAKMSKKEKISEKMEIKEGEETKKELVLESNPKWEALTEVLKEIEAENKESEALGGPGQVLICASDDRTCSQLRDYITLGAEAFLLRLYRKTFEKDSKAEEVWMKFRKEDSSKRIRKSHKRPKDPQNKERASTKERTLKKKKRKLTLTQMVGKPEELEEEGDVEEGYRREISSSPESCPEEIKHEEFDVNLSSDAAFGILKEPLTIIHPLLGCSDPYALTRVLHEVEPRYVVLYDAELTFVRQLEIYRASRPGKPLRYFLIYGGSTEEQRYLTALRKEKEAFEKLIREKASMVVPEEREGRDETNLDLVRGTASADVSTDTRKAGGQEQNGTQQSIVVDMREFRSELPSLIHRRGIDIEPVTLEVGDYILTPEMCVERKSISDLIGSLNNGRLYSQCISMSRYYKRPVLLIEFDPSKPFSLTSRGALFQEISSNDISSKLTLLTLHFPRLRILWCPSPHATAELFEELKQSKPQPDAATALAITADSETLPESEKYNPGPQDFLLKMPGVNAKNCRSLMHHVKNIAELAALSQDELTSILGNAANAKQLYDFIHTSFAEVVSKGKGKK

SEQ ID NO: 6127 - protein, 356 aa, Homo sapiens
MAPLLEYERQLVLELLDTDGLVVCARGLGADRLLYHFLQLHCHPACLVLVLNTQPAEEEYFINQLKIEGVEHLPRRVTNEITSNSRYEVYTQGGVIFATSRILVVDFLTDRIPSDLITGILVYRAHRIIESCQEAFILRLFRQKNKRGFIKAFTDNAVAFDTGFCHVERVMRNLFVRKLYLWPRFHVAVNSFLEQHKPEVVEIHVSMTPTMLAIQTAILDILNACLKELKCHNPSLEVEDLSLENAIGKPFDKTIRHYLDPLWHQLGAKTKSLVQDLKILRTLLQYLSQYDCVTFLNLLESLRATEKAFGQNSGWLFLDSSTSMFINARARVYHLPDAKMSKKEKISEKIKKKKKK

SEQ ID NO: 6128 - protein, 1186 aa, Homo sapiens
MGVQGLWKLLECSGRQVSPEALEGKILAVDISIWLNQALKGVRDRHGNSIENPHLLTLFHRLCKLLFFRIRPIFVFDGDAPLLKKQTLVKRRQRKDLASSDSRKTTEKLLKTFLKRQAIKTAFRSKRDEALPSLTQVRRENDLYVLPPLQEEEKHSSEEEDEKEWQERMNQKQALQEEFFHNPQAIDIESEDFSSLPPEVKHEILTDMKEFTKRRRTLFEAMPEESDDFSQYQLKGLLKKNYLNQHIEHVQKEMNQQHSGHIRRQYEDEGGFLKEVESRRVVSEDTSHYILIKGIQAKTVAEVDSESLPSSSKMHGMSFDVKSSPCEKLKTEKEPDATPPSPRTLLAMQAALLGSSSEEELESENRRQARGRNAPAAVDEGSISPRTLSAIKRALDDDEDVKVCAGDDVQTGGPGAEEMRINSSTENSDEGLKVRDGKGIPFTATLASSSVNSAEEHVASTNEGREPTDSVPKEQMSLVHVGTEAFPISDESMIKDRKDRLPLESAVVRHSDAPGLPNGRELTPASPTCTNSVSKNETHAEVLEQQNELCPYESKFDSSLLSSDDETKCKPNSASEVIGPVSLQETSSIVSVPSEAVDNVENVVSFNAKEHENFLETIQEQQTTESAGQDLISIPKAVEPMEIDSEESESDGSFIEVQSVISDEELQAEFPETSKPPSEQGEEELVGTREGEAPAESESLLRDNSERDDVDGEPQEAEKDAEDSLHEWQDINLEELETLESNLLAQQNSLKAQKQQQERIAATVTGQMFLESQELLRLFGIPYIQAPMEAEAQCAILDLTDQTSGTITDDSDIWLFGARHVYRNFFNKNKFVEYYQYVDFHNQLGLDRNKLINLAYLLGSDYTEGIPTVGCVTAMEILNEFPGHGLEPLLKFSEWWHEAQKNPKIRPNPHDTKVKKKLRTLQLTPGFPNPAVAEAYLKPVVDDSKGSFLWGKPDLDKIREFCQRYFGWNRTKTDESLFPVLKQLDAQQTQLRIDSFFRLAQQEKEDAKRIKSQRLNRAVTCMLRKEKEAAASEIEAVSVAMEKEFELLDKAKGKTQKRGITNTLEESSSLKRKRLSDSKGKNTCGGFLGETCLSESSDGSSSEDAESSSLMNVQRRTAAKEPKTSASDSQNSVKEAPVKNGGATTSSSSDSDDDGGKEKMVLVTARSVFGKKRRKLRRARGRKRKT

SEQ ID NO: 6129 - protein, 419 aa, Homo sapiens
MFLESQELLRLFGIPYIQAPMEAEAQCAILDLTDQTSGTITDDSDIWLFGARHVYRNFFNKNKFVEYYQYVDFHNQLGLDRNKLINLAYLLGSDYTEGIPTVGCVTAMEILNEFPGHGLEPLLKFSEWWHEAQKNPKIRPNPHDTKVKKKLRTLQLTPGFPNPAVAEAYLKPVVDDSKGSFLWGKPDLDKIREFCQRYFGWNRTKTDESLFPVLKQLDAQQTQLRIDSFFRLAQQEKEDAKRIKSQRLNRAVTCMLRKEKEAAASEIEAVSVAMEKEFELLDKAKGKTQKRGITNTLEESSSLKRKRLSDSKGKNTCGGFLGETCLSESSDGSSSEDAESSSLMNVQRRTAAKEPKTSASDSQNSVKEAPVKNGGATTSSSSDSDDDGGKEKMVLVTARSVFGKKRRKLRRARGRKRKT

SEQ ID NO: 6130 - protein, 1018 aa, Homo sapiens
MNQKQALQEEFFHNPQAIDIESEDFSSLPPEVKHEILTDMKEFTKRRRTLFEAMPEESDDFSQYQLKGLLKKNYLNQHIEHVQKEMNQQHSGHIRRQYEDEGGFLKEVESRRVVSEDTSHYILIKGIQAKTVAEVDSESLPSSSKMHGMSFDVKSSPCEKLKTEKEPDATPPSPRTLLAMQAALLGSSSEEELESENRRQARGRNAPAAVDEGSISPRTLSAIKRALDDDEDVKVCAGDDVQTGGPGAEEMRINSSTENSDEGLKVRDGKGIPFTATLASSSVNSAEEHVASTNEGREPTDSVPKEQMSLVHVGTEAFPISDESMIKDRKDRLPLESAVVRHSDAPGLPNGRELTPASPTCTNSVSKNETHAEVLEQQNELCPYESKFDSSLLSSDDETKCKPNSASEVIGPVSLQETSSIVSVPSEAVDNVENVVSFNAKEHENFLETIQEQQTTESAGQDLISIPKAVEPMEIDSEESESDGSFIEVQSVISDEELQAEFPETSKPPSEQGEEELVGTREGEAPAESESLLRDNSERDDVDGEPQEAEKDAEDSLHEWQDINLEELETLESNLLAQQNSLKAQKQQQERIAATVTGQMFLESQELLRLFGIPYIQAPMEAEAQCAILDLTDQTSGTITDDSDIWLFGARHVYRNFFNKNKFVEYYQYVDFHNQLGLDRNKLINLAYLLGSDYTEGIPTVGCVTAMEILNEFPGHGLEPLLKFSEWWHEAQKNPKIRPNPHDTKVKKKLRTLQLTPGFPNPAVAEAYLKPVVDDSKGSFLWGKPDLDKIREFCQRYFGWNRTKTDESLFPVLKQLDAQQTQLRIDSFFRLAQQEKEDAKRIKSQRLNRAVTCMLRKEKEAAASEIEAVSVAMEKEFELLDKAKGKTQKRGITNTLEESSSLKRKRLSDSKGKNTCGGFLGETCLSESSDGSSSEDAESSSLMNVQRRTAAKEPKTSASDSQNSVKEAPVKNGGATTSSSSDSDDDGGKEKMVLVTARSVFGKKRRKLRRARGRKRKT

SEQ ID NO: 6131 - protein, 1611 aa, Homo sapiens
QGAVKSFCTSASGAPLGPKGDGHYPWSCPVTHTREKIYAICSDYAFLNQATSIYKTPNPSRSPCLPDSTSLSAGNNSSRYIGIPTSTSEIIYNEENSLENLSNSLGKLPLAWEIDKSEFDGVTTNSKHKSGNAKKQVSKRKTSDKKGRYQKECPQHSPLEDIKQRKVLDLRRWYCISRPQYKTSCGISSLISCWNFLYSTMGAGNLPPITQEEALHILGFQPPFEDIRFGPFTGNTTLMRWFRQINDHFHVKGCSYVLYKPHGKNKTAGETASGALSKLTRGLKDESLAYIYHCQNHYFCPIGFEATPVKANKAFSRGPLSPQEVEYWILIGESSRKHPAIHCKKWADIVTDLNTQNPEYLDIRHLERGLQYRKTKKVGGNLHCIIAFQRLNWQRFGLWNFPFGTIRQESQPPTHAQGIAKSESEDNISKKQHGRLGRSFSASFHQDSAWKKMSNISIWLNQALKGVRDRHGNSIENPHLLTLFHRLCKLLFFRIRPIFVFDGDAPLLKKQTLVKRRQRKDLASSDSRKTTEKLLKTFLKRQAIKTAFRSKRDEALPSLTQVRRENDLYVLPPLQEEEKHSSEEEDEKEWQERMNQKQALQEEFFHNPQAIDIESEDFSSLPPEVKHEILTDMKEFTKRRRTLFEAMPEESDDFSQYQLKGLLKKNYLNQHIEHVQKEMNQQHSGHIRRQYEDEGGFLKEVESRRVVSEDTSHYILIKGIQAKTVAEVDSESLPSSSKMHGMSFDVKSSPCEKLKTEKEPDATPPSPRTLLAMQAALLGSSSEEELESENRRQARGRNAPAAVDEGSISPRTLSAIKRALDDDEDVKVCAGDDVQTGGPGAEEMRINSSTENSDEGLKVRDGKGIPFTATLASSSVNSAEEHVASTNEGREPTDSVPKEQMSLVHVGTEAFPISDESMIKDRKDRLPLESAVVRHSDAPGLPNGRELTPASPTCTNSVSKNETHAEVLEQQNELCPYESKFDSSLLSSDDETKCKPNSASEVIGPVSLQETSSIVSVPSEAVDNVENVVSFNAKEHENFLETIQEQQTTESAGQDLISIPKAVEPMEIDSEESESDGSFIEVQSVISDEELQAEFPETSKPPSEQGEEELVGTREGEAPAESESLLRDNSERDDVDGEPQEAEKDAEDSLHEWQDINLEELETLESNLLAQQNSLKAQKQQQERIAATVTGQMFLESQELLRLFGIPYIQAPMEAEAQCAILDLTDQTSGTITDDSDIWLFGARHVYRNFFNKNKFVEYYQYVDFHNQLGLDRNKLINLAYLLGSDYTEGIPTVGCVTAMEILNEFPGHGLEPLLKFSEWWHEAQKNPKIRPNPHDTKVKKKLRTLQLTPGFPNPAVAEAYLKPVVDDSKGSFLWGKPDLDKIREFCQRYFGWNRTKTDESLFPVLKQLDAQQTQLRIDSFFRLAQQEKEDAKRIKSQRLNRAVTCMLRKEKEAAASEIEAVSVAMEKEFELLDKAKGKTQKRGITNTLEESSSLKRKRLSDSKGKNTCGGFLGETCLSESSDGSSSEDAESSSLMNVQRRTAAKEPKTSASDSQNSVKEAPVKNGGATTSSSSDSDDDGGKEKMVLVTARSVFGKKRRKLRRARGRKRKT

SEQ ID NO: 6132 - protein, 232 aa, Homo sapiens
MGVQGLWKLLECSGRQVSPEALEGKILAVDISIWLNQALKGVRDRHGNSIENPHLLTLFHRLCKLLFFRIRPIFVFDGDAPLLKKQTLVKRRQRKDLASSDSRKTTEKLLKTFLKRQAIKTAFRSKRDEALPSLTQVRRENDLYVLPPLQEEEKHSSEEEDEKEWQERMNQKQALQEEFFHNPQAIDIESEDFSSLPPEVKHEILTDMKEFTKRRRTLFEAMPEVYLPLLQP

SEQ ID NO: 6133 - protein, 1493 aa, Homo sapiens
MPNEGIPHSSQTQEQDCLQSQPVSNNEEMAIKQESGGDGEVEEYLSFRSVGDGLSTSAVGCASAAPRRGPALLHIDRHQIQAVEPSAQALELQGLGVDVYDQDVLEQGVLQQVDNAIHEASRASQLVDVEKEYRSVLDDLTSCTTSLRQINKIIEQLSPQAATSRDINRKLDSVKRQKYNKEQQLKKITAKQKHLQAILGGAEVKIELDHASLEEDAEPGPSSLGSMLMPVQETAWEELIRTGQMTPFGTQIPQKQEKKPRKIMLNEASGFEKYLADQAKLSFERKKQGCNKRAARKAPAPVTPPAPVQNKNKPNKKARVLSKKEERLKKHIKKLQKRALQFQGKVGLPKARRPWESDMRPEAEGDSEGEESEYFPTEEEEEEEDDEVEGAEADLSGDGTDYELKPLPKGGKRQKKVPVQEIDDDFFPSSGEEAEAASVGEGGGGGRKVGRYRDDGDEDYYKQRLRRWNKLRLQDKEKRLKLEDDSEESDAEFDEGFKVPGFLFKKLFKYQQTGVRWLWELHCQQAGGILGDEMGLGKTIQIIAFLAGLSYSKIRTRGSNYRFEGLGPTVIVCPTTVMHQWVKEFHTWWPPFRVAILHETGSYTHKKEKLIRDVAHCHGILITSYSYIRLMQDDISRYDWHYVILDEGHKIRNPNAAVTLACKQFRTPHRIILSGSPMQNNLRELWSLFDFIFPGKLGTLPVFMEQFSVPITMGGYSNASPVQVKTAYKCACVLRDTINPYLLRRMKSDVKMSLSLPDKNEQVLFCRLTDEQHKVYQNFVDSKEVYRILNGEMQIFSGLIALRKICNHPDLFSGGPKNLKGLPDDELEEDQFGYWKRSGKMIVVESLLKIWHKQGQRVLLFSQSRQMLDILEVFLRAQKYTYLKMDGTTTIASRQPLITRYNEDTSIFVFLLTTRVGGLGVNLTGANRVVIYDPDWNPSTDTQARERAWRIGQKKQVTVYRLLTAGTIEEKIYHRQIFKQFLTNRVLKDPKQRRFFKSNDLYELFTLTSPDASQSTETSAIFAGTGSDVQTPKCHLKRRIQPAFGADHDVPKRKKFPASNISVNDATSSEEKSEAKGAEVNAVTSNRSDPLKDDPHMSSNVTSNDRLGEETNAVSGPEELSVISGNGECSNSSGTGKTSMPSGDESIDEKLGLSYKRERPSQAQTEAFWENKQMENNFYKHKSKTKHHSVAEEETLEKHLRPKQKPKNSKHCRDAKFEGTRIPHLVKKRRYQKQDSENKSEAKEQSNDDYVLEKLFKKSVGVHSVMKHDAIMDGASPDYVLVEAEANRVAQDALKALRLSRQRCLGAVSGVPTWTGHRGISGAPAGKKSRFGKKRNSNFSVQHPSSTSPTEKCQDGIMKKEGKDNVPEHFSGRAEDADSSSGPLASSSLLAKMRARNHLILPERLESESGHLQEASALLPTTEHDDLLVEMRNFIAFQAHTDGQASTREILQEFESKLSASQSCVFRELLRNLCTFHRTSGGEGIWKLKPEYC

SEQ ID NO: 6134 - protein, 870 aa, Homo sapiens
QQPFHRHLLMTTALHSEKLIRDVAHCHGILITSYSYIRLMQDDISRYDWHYVILDEGHKIRNPNAAVTLACKQFRTPHRIILSGSPMQNNLRELWSLFDFIFPGKLGTLPVFMEQFSVPITMGGYSNASPVQVKTAYKCACVLRDTINPYLLRRMKSDVKMSLSLPDKNEQIFSGLIALRKICNHPDLFSGGPKNLKGLPDDELEEDQFGYWKRSGKMIVVESLLKIWHKQGQRVLLFSQSRQMLDILEVFLRAQKYTYLKMDGTTTIASRQPLITRYNEDTSIFVFLLTTRVGGLGVNLTGANRVVIYDPDWNPSTDTQARERAWRIGQKKQVTVYRLLTAGTIEEKIYHRQIFKQFLTNRVLKDPKQRRFFKSNDLYELFTLTSPDASQSTETSAIFAGTGSDVQTPKCHLKRRIQPAFGADHDVPKRKKFPASNISVNDATSSEEKSEAKGAEVNAVTSNRSDPLKDDPHMSSNVTSNDRLGEETNAVSGPEELSVISGNGECSNSSGTGKTSMPSGDESIDEKLGLSYKRERPSQAQTEAFWENKQMENNFYKHKSKTKHHSVAEEETLEKHLRPKQKPKNSKHCRDAKFEGTRIPHLVKKRRYQKQDSENKSEAKEQSNDDYVLEKLFKKSVGVHSVMKHDAIMDGASPDYVLVEAEANRVAQDALKALRLSRQRCLGAVSGVPTWTGHRGISGAPAGKKSRFGKKRNSNFSVQHPSSTSPTEKCQDGIMKKEGKDNVPEHFSGRAEDADSSSGPLASSSLLAKMRARNHLILPERLESESGHLQEASALLPTTEHDDLLVEMRNFIAFQAHTDGQASTREILQEFESKLSASQSCVFRELLRNLCTFHRTSGGEGIWKLKPEYC

SEQ ID NO: 6135 - protein, 179 aa, Homo sapiens
MPNEGIPHSSQTQEQDCLQSQPVSNNEEMAIKQESGGDGEVEEYLSFRSVGDGLSTSAVGCASAAPRRGPALLHIDRHQIQAVEPSAQALELQGLGVDVYDQDVLEQGVLQQVDNAIHEASRASQLVDVEKEYRSVLDDLTSCTTSLRQINKIIEQLSPQAATSRDINRKLDSVKRQKY

SEQ ID NO: 6136 - protein, 105 aa, Homo sapiens
MSLSLPDKNEQVLFCRLTDEQHKVYQNFVDSKEVYRILNGEMQEVLQSFTSIHLHESPLNFFRSFQVRGSRSHYPGKGMQTTLGIVNFLVVTLKRKKRNRFSPDL

SEQ ID NO: 6137 - protein, 863 aa, Homo sapiens
MQDDISRYDWHYVILDEGHKIRNPNAAVTLACKQFRTPHRIILSGSPMQNNLRELWSLFDFIFPGKLGTLPVFMEQFSVPITMGGYSNASPVQVKTAYKCACVLRDTINPYLLRRMKSDVKMSLSLPDKNEQVLFCRLTDEQHKVYQNFVDSKEVYRILNGEMQIFSGLIALRKICNHPDLFSGGPKNLKGLPDDELEEDQFGYWKRSGKMIVVESLLKIWHKQGQRVLLFSQSRQMLDILEVFLRAQKYTYLKMDGTTTIASRQPLITRYNEDTSIFVFLLTTRVGGLGVNLTGANRVVIYDPDWNPSTDTQARERAWRIGQKKQVTVYRLLTAGTIEEKIYHRQIFKQFLTNRVLKDPKQRRFFKSNDLYELFTLTSPDASQSTETSAIFAGTGSDVQTPKCHLKRRIQPAFGADHDVPKRKKFPASNISVNDATSSEEKSEAKGAEVNAVTSNRSDPLKDDPHMSSNVTSNDRLGEETNAVSGPEELSVISGNGECSNSSGTGKTSMPSGDESIDEKLGLSYKRERPSQAQTEAFWENKQMENNFYKHKSKTKHHSVAEEETLEKHLRPKQKPKNSKHCRDAKFEGTRIPHLVKKRRYQKQDSENKSEAKEQSNDDYVLEKLFKKSVGVHSVMKHDAIMDGASPDYVLVEAEANRVAQDALKALRLSRQRCLGAVSGVPTWTGHRGISGAPAGKKSRFGKKRNSNFSVQHPSSTSPTEKCQDGIMKKEGKDNVPEHFSGRAEDADSSSGPLASSSLLAKMRARNHLILPERLESESGHLQEASALLPTTEHDDLLVEMRNFIAFQAHTDGQASTREILQEFESKLSASQSCVFRELLRNLCTFHRTSGGEGIWKLKPEYC

SEQ ID NO: 6138 - protein, 396 aa, Homo sapiens
MLGFLSARQTGLEDPLRLRRAESTRRVLGLELNKDRDVERIHGGGINTLDIEPVEGRYMLSGGSDGVIVLYDLENSSRQSYYTCKAVCSIGRDHPDVHRYSVETVQWYPHDTGMFTSSSFDKTLKVWDTNTLQTADVFNFEETVYSHHMSPVSTKHCLVAVGTRGPKVQLCDLKSGSCSHILQGHRQEILAVSWSPRYDYILATASADSRVKLWDVRRASGCLITLDQHNGKKSQAVESANTAHNGKVNGLCFTSDGLHLLTVGTDNRMRLWNSSNGENTLVNYGKVCNNSKKGLKFTVSCGCSSEFVFVPYGSTIAVYTVYSGEQITMLKGHYKTVDCCVFQSNFQELYSGSRDCNILAWVPSLYEPVPDDDETTTKSQLNPAFEDAWSSSDEEG

SEQ ID NO: 6139 - protein, 338 aa, Homo sapiens
MLSGGSDGVIVLYDLENSSRQSYYTCKAVCSIGRDHPDVHRYSVETVQWYPHDTGMFTSSSFDKTLKVWDTNTLQTADVFNFEETVYSHHMSPVSTKHCLVAVGTRGPKVQLCDLKSGSCSHILQGHRQEILAVSWSPRYDYILATASADSRVKLWDVRRASGCLITLDQHNGKKSQAVESANTAHNGKVNGLCFTSDGLHLLTVGTDNRMRLWNSSNGENTLVNYGKVCNNSKKGLKFTVSCGCSSEFVFVPYGSTIAVYTVYSGEQITMLKGHYKTVDCCVFQSNFQELYSGSRDCNILAWVPSLYEPVPDDDETTTKSQLNPAFEDAWSSSDEEG

SEQ ID NO: 6140 - protein, 395 aa, Homo sapiens
MATSSAPAGVRTRYAGVFVRTPNGFGGPSSPSESRVNTESFGTGINTLDIEPVEGRYMLSGGSDGVIVLYDLENSSRQSYYTCKAVCSIGRDHPDVHRYSVETVQWYPHDTGMFTSSSFDKTLKVWDTNTLQTADVFNFEETVYSHHMSPVSTKHCLVAVGTRGPKVQLCDLKSGSCSHILQGHRQEILAVSWSPRYDYILATASADSRVKLWDVRRASGCLITLDQHNGKKSQAVESANTAHNGKVNGLCFTSDGLHLLTVGTDNRMRLWNSSNGENTLVNYGKVCNNSKKGLKFTVSCGCSSEFVFVPYGSTIAVYTVYSGEQITMLKGHYKTVDCCVFQSNFQELYSGSRDCNILAWVPSLYEPVPDDDETTTKSQLNPAFEDAWSSSDEEG

SEQ ID NO: 6141 - protein, 243 aa, Homo sapiens
MGYKYITIGTRGPKVQLCDLKSGSCSHILQGHRQEILAVSWSPRYDYILATASADSRVKLWDVRRASGCLITLDQHNGKKSQAVESANTAHNGKVNGLCFTSDGLHLLTVGTDNRMRLWNSSNGENTLVNYGKVCNNSKKGLKFTVSCGCSSEFVFVPYGSTIAVYTVYSGEQITMLKGHYKTVDCCVFQSNFQELYSGSRDCNILAWVPSLYEPVPDDDETTTKSQLNPAFEDAWSSSDEEG

SEQ ID NO: 6142 - protein, 846 aa, Homo sapiens
MGIQGLLQFIKEASEPIHVRKYKGQVVAVDTYCWLHKGAIACAEKLAKGEPTDRYVGFCMKFVNMLLSHGIKPILVFDGCTLPSKKEVERSRRERRQANLLKGKQLLREGKVSEARECFTRSINITHAMAHKVIKAARSQGVDCLVAPYEADAQLAYLNKAGIVQAIITEDSDLLAFGCKKVILKMDQFGNGLEIDQARLGMCRQLGDVFTEEKFRYMCILSGCDYLSSLRGIGLAKACKVLRLANNPDIVKVIKKIGHYLKMNITVPEDYINGFIRANNTFLYQLVFDPIKRKLIPLNAYEDDVDPETLSYAGQYVDDSIALQIALGNKDINTFEQIDDYNPDTAMPAHSRSHSWDDKTCQKSANVSSIWHRNYSPRPESGTVSDAPQLKENPSTVGVERVISTKGLNLPRKSSIVKRPRSAELSEDDLLSQYSLSFTKKTKKNSSEGNKSLSFSEVFVPDLVNGPTNKKSVSTPPRTRNKFATFLQRKNEESGAVVVPGTRSRFFCSSDSTDCVSNKVSIQPLDETAVTDKENNLHESEYGDQEGKRLVDTDVARNSSDDIPNNHIPGDHIPDKATVFTDEESYSFESSKFTRTISPPTLGTLRSCFSWSGGLGDFSRTPSPSPSTALQQFRRKSDSPTSLPENNMSDVSQLKSEESSDDESHPLREEACSSQSQESGEFSLQSSNASKLSQCSSKDSDSEESDCNIKLLDSQSDQTSKLRLSHFSKKDTPLRNKVPGLYKSSSADSLSTTKIKPLGPARASGLSKKPASIQKRKHHNAENKPGLQIKLNELWKNFGFKKDSEKLPPCKKPLSPVRDNIQLTPEAEEDIFNKPECGRVQRAIFQ

SEQ ID NO: 6143 - protein, 169 aa, Homo sapiens
MGIQGLLQFIKEASEPIHVRKYKGQVVAVDTYCWLHKGAIACAEKLAKGEPTDRRRQANLLKGKQLLREGKVSEARECFTRSINITHAMAHKVIKAARSQGVDCLVAPYEADAQLAYLNKAGIVQAIITEDSDLLAFGCKKVILKMDQFGNGLEIDQARLGMCRQLGDV

SEQ ID NO: 6144 - protein, 846 aa, Homo sapiens; identical to SEQ ID NO: 6142

SEQ ID NO: 6145 - protein, 135 aa, Homo sapiens
MGIQGLLQFIKEASEPIHVRKYKGQVVAVDTYCWLHKGAIACAEKLAKGEPTDRYVGFCMKFVNMLLSHGIKPILVFDGCTLPSKKEVERSRRERRQANLLKGKQLLREGKVSEARECFTRSINITHAMAHKVIK

SEQ ID NO: 6146 - protein, 803 aa, Homo sapiens
MGIQGLLQFIKEASEPIHVRKYKGQVVAVDTYCWLHKGAIACAEKLAKGEPTDRYVGFCMKFVNMLLSHGIKPILVFDGCTLPSKKEVERSRRERRQANLLKGKQLLREGKVSEARECFTRSINITHAMAHKVIKAARSQGVDCLVAPYEADAQLAYLNKAGIVQAIITEDSDLLAFGCKKVILKMDQFGNGLEIDQARLGMCRQLGDVFTEEKFRYMCILSGCDYLSSLRGIGLAKACKVLRLANNPDIVKVIKKIGHYLKMNITVPEDYINGFIRANNTFLYQLVFDPIKRKLIPLNAYEDDVDPETLSYAGQYVDDSIALQIALGNKDINTFEQIDDYNPDTAMPAHSRSHSWDDKTCQKSANVSSIWHRNYSPRPESGTVSDAPQLKENPSTVGVERVISTKGLNLPRKSSIVKRPRSAELSEDDLLSQYSLSFTKKTKKNSSEGNKSLSFSEVFVPDLVNGPTNKKSVSTPPRTRNKFATFLQRKNEESGAVVVPGTRSRFFCSSDSTDCVSNKVSIQPLDETAVTDKENNLHESEYGDQEGKRLVDTDVARNSSDDIPNNHIPGDHIPDKATVFTDEESYSFESSKFTRTISPPTLGTLRSCFSWSGGLGDFSRTPSPSPSTALQQFRRKSDSPTSLPENNMSDVSQLKSEESSDDESHPLREEACSSQSQESGEFSLQSSNASKLSQCSSKDSDSEESDCNIKLLDSQSDQTSKLRLSHFSKKDTPLRNKVPGLYKSSSADSLSTTKIKPLGPARASGLSKKPASIQKRKHHNAENKPGLQIKLNELWKNFGFKKF

SEQ ID NO: 6147 - protein, 11 aa, Homo sapiens
MGIQGLLQFIK

SEQ ID NO: 6148 - protein, 746 aa, Homo sapiens
MQAKKRYFILLSAGSCLALLFYFGGLQFRASRSHSRREEHSGRNGLHHPSPDHFWPRFPDALRPFVPWDQLENEDSSVHISPRQKRDANSSIYKGKKCRMESCFDFTLCKKNGFKVYVYPQQKGEKIAESYQNILAAIEGSRFYTSDPSQACLFVLSLDTLDRDQLSPQYVHNLRSKVQSLHLWNNGRNHLIFNLYSGTWPDYTEDVGFDIGQAMLAKASISTENFRPNFDVSIPLFSKDHPRTGGERGFLKFNTIPPLRKYMLVFKGKRYLTGIGSDTRNALYHVHNGEDVVLLTTCKHGKDWQKHKDSRCDRDNTEYEKYDYREMLHNATFCLVPRGRRLGSFRFLEALQAACVPVMLSNGWELPFSEVINWNQAAVIGDERLLLQIPSTIRSIHQDKILALRQQTQFLWEAYFSSVEKIVLTTLEIIQDRIFKHISRNSLIWNKHPGGLFVLPQYSSYLGDFPYYYANLGLKPPSKFTAVIHAVTPLVSQSQPVLKLLVAAAKSQYCAQIIVLWNCDKPLPAKHRWPATAVPVVVIEGESKVMSSRFLPYDNIITDAVLSLDEDTVLSTTEVDFAFTVWQSFPERIVGYPARSHFWDNSKERWGYTSKWTNDYSMVLTGAAIYHKYYHYLYSHYLPASLKNMVDQLANCEDILMNFLVSAVTKLPPIKVTQKKQYKETMMGQTSRASRWADPDHFAQRQSCMNTFASWFGYMPLIHSQMRLDPVLFKDQVSILRKKYRDIERL

SEQ ID NO: 6149 - protein, 718 aa, Homo sapiens
MCASVKYNIRGPALIPRMKTKHRIYYITLFSIVLLGLIATGMFQFWPHSIESSNDWNVEKRSIRDVPVVRLPADSPIPERGDLSCRMHTCFDVYRCGFNPKNKIKVYIYALKKYVDDFGVSVSNTISREYNELLMAISDSDYYTDDINRACLFVPSIDVLNQNTLRIKETAQAMAQLSRWDRGTNHLLFNMLPGGPPDYNTALDVPRDRALLAGGGFSTWTYRQGYDVSIPVYSPLSAEVDLPEKGPGPRQYFLLSSQVGLHPEYREDLEALQVKHGESVLVLDKCTNLSEGVLSVRKRCHKHQVFDYPQVLQEATFCVVLRGARLGQAVLSDVLQAGCVPVVIADSYILPFSEVLDWKRASVVVPEEKMSDVYSILQSIPQRQIEEMQRQARWFWEAYFQSIKAIALATLQIINDRIYPYAAISYEEWNDPPAVKWGSVSNPLFLPLIPPQSQGFTAIVLTYDRVESLFRVITEVSKVPSLSKLLVVWNNQNKNPPEDSLWPKIRVPLKVVRTAENKLSNRFFPYDEIETEAVLAIDDDIIMLTSDELQFGYEVWREFPDRLVGYPGRLHLWDHEMNKWKYESEWTNEVSMVLTGAAFYHKYFNYLYTYKMPGDIKNWVDAHMNCEDIAMNFLVANVTGKAVIKVTPRKKFKCPECTAIDGLSLDQTHMVERSECINKFASVFGTMPLKVVEHRADPVLYKDDFPEKLKSFPNIGSL

SEQ ID NO: 6150 - protein, 728 aa, Homo sapiens
MCASVKYNIRGPALIPRMKTKHRIYYITLFSIVLLGLIATGMFQFWPHSIESSNDWNVEKRSIRDVPVVRLPADSPIPERGDLSCRMHTCFDVYRCGFNPKNKIKVYIYALKKYVDDFGVSVSNTISREYNELLMAISDSDYYTDDINRACLFVPSIDVLNQNTLRIKETAQAMAQLSRWDRGTNHLLFNMLPGGPPDYNTALDVPRDRALLAGGGFSTWTYRQGYDVSIPVYSPLSAEVDLPEKGPGPRQYFLLSSQVGLHPEYREDLEALQVKHGESVLVLDKCTNLSEGVLSVRKRCHKHQVFDYPQVLQEATFCVVLRGARLGQAVLSDVLQAGCVPVVIADSYILPFSEVLDWKRASVVVPEEKMSDVYSILQSIPQRQIEEMQRQLFMEPARRENWSAANHQMNSLIWPREQWDSQIINDRIYPYAAISYEEWNDPPAVKWGSVSNPLFLPLIPPQSQGFTAIVLTYDRVESLFRVITEVSKVPSLSKLLVVWNNQNKNPPEDSLWPKIRVPLKVVRTAENKLSNRFFPYDEIETEAVLAIDDDIIMLTSDELQFGYEVWREFPDRLVGYPGRLHLWDHEMNKWKYESEWTNEVSMVLTGAAFYHKYFNYLYTYKMPGDIKNWVDAHMNCEDIAMNFLVANVTGKAVIKVTPRKKFKCPECTAIDGLSLDQTHMVERSECINKFASVFGTMPLKVVEHRADPVLYKDDFPEKLKSFPNIGSL

SEQ ID NO: 6151 - protein, 751 aa, Homo sapiens
MSCASGSGGGLRHPLRCQKPWDEECEEEAVCVIMCASVKYNIRGPALIPRMKTKHRIYYITLFSIVLLGLIATGMFQFWPHSIESSNDWNVEKRSIRDVPVVRLPADSPIPERGDLSCRMHTCFDVYRCGFNPKNKIKVYIYALKKYVDDFGVSVSNTISREYNELLMAISDSDYYTDDINRACLFVPSIDVLNQNTLRIKETAQAMAQLSRWDRGTNHLLFNMLPGGPPDYNTALDVPRDRALLAGGGFSTWTYRQGYDVSIPVYSPLSAEVDLPEKGPGPRQYFLLSSQVGLHPEYREDLEALQVKHGESVLVLDKCTNLSEGVLSVRKRCHKHQVFDYPQVLQEATFCVVLRGARLGQAVLSDVLQAGCVPVVIADSYILPFSEVLDWKRASVVVPEEKMSDVYSILQSIPQRQIEEMQRQARWFWEAYFQSIKAIALATLQIINDRIYPYAAISYEEWNDPPAVKWGSVSNPLFLPLIPPQSQGFTAIVLTYDRVESLFRVITEVSKVPSLSKLLVVWNNQNKNPPEDSLWPKIRVPLKVVRTAENKLSNRFFPYDEIETEAVLAIDDDIIMLTSDELQFGYEVWREFPDRLVGYPGRLHLWDHEMNKWKYESEWTNEVSMVLTGAAFYHKYFNYLYTYKMPGDIKNWVDAHMNCEDIAMNFLVANVTGKAVIKVTPRKKFKCPECTAIDGLSLDQTHMVERSECINKFASVFGTMPLKVVEHRADPVLYKDDFPEKLKSFPNIGSL

SEQ ID NO: 6152 - protein, 112 aa, Homo sapiens
MCASVKYNIRGPALIPRMKTKHRIYYITLFSIVLLGLIATGMFQFWPHSIESSNDWNVEKRSIRDVPVVRLPADSPIPERGDLSCRMHTCFDVYRCGFNPKNKIKVYIYALK

SEQ ID NO: 6153 - protein, 49 aa, Homo sapiens
MCASVKYNIRGPALIPRMKTKHRIYYITLFSIVLLGLIATGMFQFWPHS

SEQ ID NO: 6154 - protein, 718 aa, Homo sapiens; identical to SEQ ID NO: 6149

SEQ ID NO: 6155 - protein, 586 aa, Homo sapiens
MPKPINVRVTTMDAELEFAIQPNTTGKQLFDQVVKTIGLREVWYFGLHYVDNKGFPTWLKLDKKVSAQEVRKENPLQFKFRAKFYPEDVAEELIQDITQKLFFLQVKEGILSDEIYCPPETAVLLGSYAVQAKFGDYNKEVHKSGYLSSERLIPQRVMDQHKLTRDQWEDRIQVWHAEHRGMLKDNAMLEYLKIAQDLEMYGINYFEIKNKKGTDLWLGVDALGLNIYEKDDKLTPKIGFPWSEIRNISFNDKKFVIKPIDKKAPDFVFYAPRLRINKRILQLCMGNHELYMRRRKPDTIEVQQMKAQAREEKHQKQLERQQLETEKKRRETVEREKEQMMREKEELMLRLQDYEEKTKKAERELSEQIQRALQLEEERKRAQEEAERLEADRMAALRAKEELERQAVDQIKSQEQLAAELAEYTAKIALLEEARRRKEDEVEEWQHRAKEAQDDLVKTKEELHLVMTAPPPPPPPVYEPVSYHVQESLQDEGAEPTGYSAELSSEGIRDDRNEEKRITEAEKNERVQRQLLTLSSELSQARDENKRTHNDIIHNENMRQGRDKYKTLRQIRQGNTKQRIDEFEAL

SEQ ID NO: 6156 - protein, 586 aa, Homo sapiens; identical to SEQ ID NO: 6155

SEQ ID NO: 6157 - protein, 554 aa, Homo sapiens
MPKPINVRVTTMDAELEFAIQPNTTGKQLFDQVSAQEVRKENPLQFKFRAKFYPEDVAEELIQDITQKLFFLQVKEGILSDEIYCPPETAVLLGSYAVQAKFGDYNKEVHKSGYLSSERLIPQRVMDQHKLTRDQWEDRIQVWHAEHRGMLKDNAMLEYLKIAQDLEMYGINYFEIKNKKGTDLWLGVDALGLNIYEKDDKLTPKIGFPWSEIRNISFNDKKFVIKPIDKKAPDFVFYAPRLRINKRILQLCMGNHELYMRRRKPDTIEVQQMKAQAREEKHQKQLERQQLETEKKRRETVEREKEQMMREKEELMLRLQDYEEKTKKAERELSEQIQRALQLEEERKRAQEEAERLEADRMAALRAKEELERQAVDQIKSQEQLAAELAEYTAKIALLEEARRRKEDEVEEWQHRAKEAQDDLVKTKEELHLVMTAPPPPPPPVYEPVSYHVQESLQDEGAEPTGYSAELSSEGIRDDRNEEKRITEAEKNERVQRQLLTLSSELSQARDENKRTHNDIIHNENMRQGRDKYKTLRQIRQGNTKQRIDEFEAL

SEQ ID NO: 6158 - protein, 299 aa, Homo sapiens
MGTKAQVERKLLCLFILAILLCSLALGSVTVHSSEPEVRIPENNPVKLSCAYSGFSSPRVEWKFDQGDTTRLVCYNNKITASYEDRVTFLPTGITFKSVTREDTGTYTCMVSEEGGNSYGEVKVKLIVLVPPSKPTVNIPSSATIGNRAVLTCSEQDGSPPSEYTWFKDGIVMPTNPKSTRAFSNSSYVLNPTTGELVFDPLSASDTGEYSCEARNGYGTPMTSNAVRMEAVERNVGVIVAAVLVTLILLGILVFGIWFAYSRGHFDRTKKGTSSKKVIYSQPSARSEGEFKQTSSFLV

SEQ ID NO: 6159 - protein, 299 aa, Homo sapiens; identical to SEQ ID NO: 6158

SEQ ID NO: 6160 - protein, 299 aa, Homo sapiens; identical to SEQ ID NO: 6158

SEQ ID NO: 6161 - protein, 303 aa, Homo sapiens
MLQAPRGRARAALRRLAVATRTMAGGSLALGSVTVHSSEPEVRIPENNPVKLSCAYSGFSSPRVEWKFDQGDTTRLVCYNNKITASYEDRVTFLPTGITFKSVTREDTGTYTCMVSEEGGNSYGEVKVKLIVLVPPSKPTVNIPSSATIGNRAVLTCSEQDGSPPSEYTWFKDGIVMPTNPKSTRAFSNSSYVLNPTTGELVFDPLSASDTGEYSCEARNGYGTPMTSNAVRMEAVERNVGVIVAAVLVTLILLGILVFGIWFAYSRGHFDRTKKGTSSKKVIYSQPSARSEGEFKQTSSFLV

SEQ ID NO: 6162 - protein, 250 aa, Homo sapiens
MGTKAQVERKLLCLFILAILLCSLALGSVTVHSSEPEVRIPENNPVKLSCAYSGFSSPRVEWKFDQGDTTRLVCYNNKITVPPSKPTVNIPSSATIGNRAVLTCSEQDGSPPSEYTWFKDGIVMPTNPKSTRAFSNSSYVLNPTTGELVFDPLSASDTGEYSCEARNGYGTPMTSNAVRMEAVERNVGVIVAAVLVTLILLGILVFGIWFAYSRGHFDRTKKGTSSKKVIYSQPSARSEGEFKQTSSFLV

SEQ ID NO: 6163 - protein, 1118 aa, Homo sapiens
MGVQGFQDYIEKHCPSAVVPVELQKLARGSLVGGGRQRPPQTPLRLLVDADNCLHRLYGGFYTDWVSGGQWNHMLGYLAALAKACFGGNIELFVFFNGALEKARLHEWVKRQGNERQTAQQIVSHVQNKGTPPPKVWFLPPVCMAHCIRLALIRFHVKVAQSIEDHHQEVIGFCRENGFHGLVAYDSDYALCNIPYYFSAHALKLSRNGKSLTTSQYLMHEVAKQLDLNPNRFPIFAALLGNHILPDEDLASFHWSLLGPEHPLASLKVRAHQLVLPPCDVVIKAVADYVRNIQDTSDLDAIAKDVFQHSQSRTDDKVIRFKRAIGYYSATSKPMSFHPPHYLAARPGPFGMPGMVPPHVPPQMLNIPQTSLQAKPVAPQVPSPGGAPGQGPYPYSLSEPAPLTLDTSGKNLTEQNSYSNIPHEGKHTPLYERSSPINPAQSGSPNHVDSAYFPGSSTSSSSDNDEGSGGATNHISGNKIGWEKTGSHSEPQARGDPGDQTKAEGSSTASSGSQLAEGKGSQMGTVQPIPCLLSMPTRNHMDITTPPLPPVAPEVLRVAEHRHKKGLMYPYIFHVLTKGEIKIAVSIEDEANKDLPPAALLYRPVRQYVYGVLFSLAESRKKTERLAFRKNRLPPEFSPVIIKEWAAYKGKSPQTPELVEALAFREWTCPNLKRLWLGKAVEDKNRRMRAFLACMRSDTPAMLNPANVPTHLMVLCCVLRYMVQWPGARILRRQELDAFLAQALSPKLYEPDQLQELKIENLDPRGIQLSALFMSGVDMALFANDACGQPIPWEHCCPWMYFDGKLFQSKLLKASREKTPLIDLCDGQADQAAKVEKMRQSVLEGLSFSRQSHTLPFPPPPALPFYPASAYPRHFGPVPPSQGRGRGFAGVCGFGGPYGETVATGPYRAFRVAAASGHCGAFSGSDSSRTSKSQGGVQPIPSQGGKLEIAGTVVGHWAGSRRGRGGRGPFPLQVVSVGGPARGRPRGVISTPVIRTFGRGGRYYGRGYKNQAAIQGRPPYAASAEEVAKELKSKSGESKSSAMSSDGSLAENGVMAEEKPAPQMNGSTGDARAPSHSESALNNDSKTCNTNPHLNALSTDSACRREAALEAAVLNKEE

SEQ ID NO: 6164 - protein, 1146 aa, Homo sapiens
MGVQGFQDYIEKHCPSAVVPVELQKLARGSLVGGGRQRPPQTPLRLLVDADNCLHRLYGGFYTDWVSGGQWNHMLGYLAALAKACFGGNIELFVFFNGALEKARLHEWVKRQGNERQTAQQIVSHVQNKGTPPPKVWFLPPVCMAHCIRLALIRFHVKVAQSIEDHHQEVIGFCRENGFHGLVAYDSDYALCNIPYYFSAHALKLSRNGKSLTTSQYLMHEVAKQLDLNPNRFPIFAALLGNHILPDEDLASFHWSLLGPEHPLASLKVRAHQLVLPPCDVVIKAVADYVRNIQDTSDLDAIAKDVFQHSQSRTDDKVIRFKRAIGYYSATSKPMSFHPPHYLAARPGPFGMPGMVPPHVPPQMLNIPQTSLQAKPVAPQVPSPGGAPGQGPYPYSLSEPAPLTLDTSGKNLTEQNSYSNIPHEGKHTPLYERSSPINPAQSGSPNHVDSAYFPGSSTSSSSDNDEGSGGATKPFQLYLQKNFVFHKENSIVLCSRILRHGHISGNKIGWEKTGSHSEPQARGDPGDQTKAEGSSTASSGSQLAEGKGSQMGTVQPIPCLLSMPTRNHMDITTPPLPPVAPEVLRVAEHRHKKGLMYPYIFHVLTKGEIKIAVSIEDEANKDLPPAALLYRPVRQYVYGVLFSLAESRKKTERLAFRKNRLPPEFSPVIIKEWAAYKGKSPQTPELVEALAFREWTCPNLKRLWLGKAVEDKNRRMRAFLACMRSDTPAMLNPANVPTHLMVLCCVLRYMVQWPGARILRRQELDAFLAQALSPKLYEPDQLQELKIENLDPRGIQLSALFMSGVDMALFANDACGQPIPWEHCCPWMYFDGKLFQSKLLKASREKTPLIDLCDGQADQAAKVEKMRQSVLEGLSFSRQSHTLPFPPPPALPFYPASAYPRHFGPVPPSQGRGRGFAGVCGFGGPYGETVATGPYRAFRVAAASGHCGAFSGSDSSRTSKSQGGVQPIPSQGGKLEIAGTVVGHWAGSRRGRGGRGPFPLQVVSVGGPARGRPRGVISTPVIRTFGRGGRYYGRGYKNQAAIQGRPPYAASAEEVAKELKSKSGESKSSAMSSDGSLAENGVMAEEKPAPQMNGSTGDARAPSHSESALNNDSKTCNTNPHLNALSTDSACRREAALEAAVLNKEE

SEQ ID NO: 6165 - protein, 1072 aa, Homo sapiens
MGVQGFQDYIEKHCPSAVVPVELQKLARGSLVGGGRQRPPQTPLRLLVDADNCLHRLYGGFYTDWVSGGQWNHMLGYLAALAKACFGGNIELFVFFNGALEKARLHEWVKRQGNERQTAQQIVSHVQNKGTPPPKVWFLPPVCMAHCIRLALIRFHVKVAQSIEDHHQEVIGFCRENGFHGLVAYDSDYALCNIPYYFSAHALKLSRNGKSLTTSQYLMHEVAKQLDLNPNRFPIFAALLGNHILPDEDLASFHWSLLGPEHPLASLKVRAHQLVLPPCDVVIKAVADYVRNIQDTSDLDAIAKDVFQHSQSRTDDKVIRFKRAIGYYSATSKPMSFHPPHYLAARPGPFGMPGMVPPHVPPQMLNIPQTSLQAKPVAPQVPSPGGAPGQGPYPYSLSEPAPLTLDTSGKNLTEQNSYSNIPHEGKHTPLYERSSPINPAQSGSPNHVDSAYFPGSSTSSSSDNDEGSGGATNHISGNKIGWEKTGSHSEPQARGDPGDQTKAEGSSTASSGSQLAEGKGSQMGTVQPIPCLLSMPTRNHMDITTPPLPPVAPEVLRVAEHRHKKGLMYPYIFHVLTKGEIKIAVSIEDEANKDLPPAALLYRPVRQYVYGVLFSLAESRKKTERLAFRKNRLPPEFSPVIIKEWAAYKGKSPQTPELVEALAFREWTCPNLKRLWLGKAVEDKNRRMRAFLACMRSDTPAMLNPANVPTHLMVLCCVLRYMVQWPGARILRRQELDAFLAQALSPKLYEPDQLQELKIENLDPRGIQLSALFMSGVDMALFANDACGQPIPWEHCCPWMYFDGKLFQSKLLKASREKTPLIDLCDGQADQAAKVEKMRQSVLEGLSFSRQSHTLPFPPPPALPFYPASAYPRHFGPVPPSQGRGRGFAGVQPIPSQGGKLEIAGTVVGHWAGSRRGRGGRGPFPLQVVSVGGPARGRPRGVISTPVIRTFGRGGRYYGRGYKNQAAIQGRPPYAASAEEVAKELKSKSGESKSSAMSSDGSLAENGVMAEEKPAPQMNGSTGDARAPSHSESALNNDSKTCNTNPHLNALSTDSACRREAALEAAVLNKEE

SEQ ID NO: 6166 - protein, 628 aa, Homo sapiens
MGVQGFQDYIEKHCPSAVVPVELQKLARGSLVGGGRQRPPQTPLRLLVDADNCLHRLYGGFYTDWVSGGQWNHMLGYLAALAKACFGGNIELFVFFNGALEKARLHEWVKRQGNERQTAQQIVSHVQNKGTPPPKVWFLPPVCMAHCIRLALIRFHVKVAQSIEDHHQEVIGFCRENGFHGLVAYDSDYALCNIPYYFSAHALKLSRNGKSLTTSQYLMHEVAKQLDLNPNRFPIFAALLGNHILPDEDLASFHWSLLGPEHPLASLKVRAHQLVLPPCDVVIKAVADYVRNIQDTSDLDAIAKDVFQHSQSRTDDKVIRFKRAIGYYSATSKPMSFHPPHYLAARPGPFGMPGMVPPHVPPQMLNIPQTSLQAKPVAPQVPSPGGAPGQGPYPYSLSEPAPLTLDTSGKNLTEQNSYSNIPHEGKHTPLYERSSPINPAQSGSPNHVDSAYFPGSSTSSSSDNDEGSGGATNHISGNKIGWEKTGSHSEPQARGDPGDQTKAEGSSTASSGSQLAEGKGSQMGTVQPIPCLLSMPTRNHMDITTPPLPPVAPEVLRVAEHRHKKGLMYPYIFHVLTKVLSKGPWSGFCYLMSGHSYGCFVLLSFFEPFFCLTNLLETKFTFPFLNIE

SEQ ID NO: 6167 - protein, 494 aa, Homo sapiens
GEIKIAVSIEDEANKDLPPAALLYRPVRQYVYGVLFSLAESRKKTERLAFRKNRLPPEFSPVIIKEWAAYKGKSPQTPELVEALAFREWTCPNLKRLWLGKAVEDKNRRMRAFLACMRSDTPAMLNPANVPTHLMVLCCVLRYMVQWPGARILRRQELDAFLAQALSPKLYEPDQLQELKIENLDPRGIQLSALFMSGVDMALFANDACGQPIPWEHCCPWMYFDGKLFQSKLLKASREKTPLIDLCDGQADQAAKVEKMRQSVLEGLSFSRQSHTLPFPPPPALPFYPASAYPRHFGPVPPSQGRGRGFAGVQPIPSQGGKLEIAGTVVGHWAGSRRGRGGRGPFPLQVVSVGGPARGRPRGVISTPVIRTFGRGGRYYGRGYKNQAAIQGRPPYAASAEEVAKELKSKSGESKSSAMSSDGSLAENGVMAEEKPAPQMNGSTGDARAPSHSESALNNDSKTCNTNPHLNALSTDSACRREAALEAAVLNKEE

SEQ ID NO: 6168 - protein, 494 aa, Homo sapiens
  VARIANT 1: note = MOD_RES - Any amino acid
XVAQSIEDHHQEVIGFCRENGFHGLVAYDSDYALCNIPYYFSAHALKLSRNGKSLTTSQYLMHEVAKQLDLNPNRFPIFAALLGNHILPDEDLASFHWSLLGPEHPLASLKVRAHQLVLPPCDVVIKAVADYVRNIQDTSDLDAIAKDVFQHSQSRTDDKVIRFKRAIGYYSATSKPMSFHPPHYLAARPGPFGMPGMVPPHVPPQMLNIPQTSLQAKPVAPQVPSPGGAPGQGPYPYSLSEPAPLTLDTSGKNLTEQNSYSNIPHEGKHTPLYERSSPINPAQSGSPNHVDSAYFPGSSTSSSSDNDEGSGGATNHISGNKIGWEKTGSHSEPQARGDPGDQTKAEGSSTASSGSQLAEGKGSQMGTVQPIPCLLSMPTRNHMDITTPPLPPVAPEVLRVAEHRHKKGLMYPYIFHVLTKGEIKIAVSIEDEANKDLPPAALLYRPVRQYVYGVLFSLAESRKKTERLAFRKNRLPPECMYCNNPLFVFLGTS

SEQ ID NO: 6169 - protein, 322 aa, Homo sapiens
MVADLELQQDLIVPLGHTPSQEHFLFEIFRRRLQALTSGWSVAASLQRQRELLMYKRILLRLPSSVLCGSSFQAEQPITARCEQFFHLVNSEMRNFCSHGGALTQDITAHFFRGLLNACLRSRDPSLMVDFILAKCQTKCPLILTSALVWWPSLEPVLLCRWRRHCQSPLPRELQKLQEGRQFASDFLSPEAASPAPNPDWLSAAALHFAIQQVREENIRKQLKKLDCEREELLVFLFFFSLMGLLSSHLTSNSTTDLPKAFHVCAAILECLEKRKISWLALFQLTESGKKHAAEAQMRRAALFRGILQMVKNEPSLRFLAK

SEQ ID NO: 6170 - protein, 1455 aa, Homo sapiens
MSDSWVPNSASGQDPGGRRRAWAELLAGRVKREKYNPERAQKLKESAVRLLRSHQDLNALLLEVEGPLCKKLSLSKVIDCDSSEAYANHSSSFIGSALQDQASRLGVPVGILSAGMVASSVGQICTAPAETSHPVLLTVEQRKKLSSLLEFAQYLLAHSMFSRLSFCQELWKIQSSLLLEAVWHLHVQGIVSLQELLESHPDMHAVGSWLFRNLCCLCEQMEASCQHADVARAMLSDFVQMFVLRGFQKNSDLRRTVEPEKMPQVTVDVLQRMLIFALDALAAGVQEESSTHKIVRCWFGVFSGHTLGSVISTDPLKRFFSHTLTQILTHSPVLKASDAVQMQREWSFARTHPLLTSLYRRLFVMLSAEELVGHLQEVLETQEVHWQRVLSFVSALVVCFPEAQQLLEDWVARLMAQAFESCQLDSMVTAFLVVRQAALEGPSAFLSYADWFKASFGSTRGYHGCSKKALVFLFTFLSELVPFESPRYLQVHILHPPLVPGKYRSLLTDYISLAKTRLADLKVSIENMGLYEDLSSAGDITEPHSQALQDVEKAIMVFEHTGNIPVTVMEASIFRRPYYVSHFLPALLTPRVLPKVPDSRVAFIESLKRADKIPPSLYSTYCQACSAAEEKPEDAALGVRAEPNSAEEPLGQLTAALGELRASMTDPSQRDVISAQVAVISERLRAVLGHNEDDSSVEISKIQLSINTPRLEPREHMAVDLLLTSFCQNLMAASSVAPPERQGPWAALFVRTMCGRVLPAVLTRLCQLLRHQGPSLSAPHVLGLAALAVHLGESRSALPEVDVGPPAPGAGLPVPALFDSLLTCRTRDSLFFCLKFCTAAISYSLCKFSSQSRDTLCSCLSPGLIKKFQFLMFRLFSEARQPLSEEDVASLSWRPLHLPSADWQRAALSLWTHRTFREVLKEEDVHLTYQDWLHLELEIQPEADALSDTERQDFHQWAIHEHFLPESSASGGCDGDLQAACTILVNALMDFHQSSRSYDHSENSDLVFGGRTGNEDIISRLQEMVADLELQQDLIVPLGHTPSQEHFLFEIFRRRLQALTSGWSVAASLQRQRELLMYKRILLRLPSSVLCGSSFQAEQPITARCEQFFHLVNSEMRNFCSHGGALTQDITAHFFRGLLNACLRSRDPSLMVDFILAKCQTKCPLILTSALVWWPSLEPVLLCRWRRHCQSPLPRELQKLQEGRQFASDFLSPEAASPAPNPDWLSAAALHFAIQQVREENIRKQLKKLDCEREELLVFLFFFSLMGLLSSHLTSNSTTDLPKAFHVCAAILECLEKRKISWLALFQLTESDLRLGRLLLRVAPDQHTRLLPFAFYSLLSYFHEDAAIREEAFLHVAVDMYLKLVQLFVAGDTSTVSPPAGRSLELKGQGNPVELITKARLFLLQLIPRCPKKSFSHVAELLADRGDCDPEVSAALQSRQQAAPDADLSQEPHLF

SEQ ID NO: 6171 - protein, 297 aa, Homo sapiens
MSDSWVPNSASGQDPGGRRRAWAELLAGRVKREKYNPERAQKLKESAVRLLRSHQDLNALLLEVEGPLCKKLSLSKVIDCDSSEAYANHSSSFIGSALQDQASRLGVPVGILSAGMVASSVGQICTAPAETSHPVLLTVEQRKKLSSLLEFAQYLLAHSMFSRLSFCQELWKIQSSLLLEAVWHLHVQGIVSLQELLESHPDMHAVGSWLFRNLCCLCEQMEASCQHADVARAMLSDFVQMFVLRGFQKNSDLRRTVEPEKMPQVTVDVLQRMLIFALDALAAGVQEESSTHKIVRC

SEQ ID NO: 6172 - protein, 302 aa, Homo sapiens
MSDSWVPNSASGQDPGGRRRAWAELLAGRVKREKYNPERAQKLKESAVRLLRSHQDLNALLLEVEGPLCKKLSLSKVIDCDSSEAYANHSSSFIGSALQDQASRLGVPVGILSAGMVASSVGQICTAPAETSHPVLLTVEQRKKLSSLLEFAQYLLAHSMFSRLSFCQELWKIQSSLLLEAVWHLHVQGIVSLQELLESHPDMHAVGSWLFRNLCCLCEQMEASCQHADVARAMLSDFVQMFVLRGFQKNSDLRRTVEPEKMPQVTVDVLQRMLIFALDALAAGVQEESSTHKIVRASAARS

SEQ ID NO: 6173 - protein, 265 aa, Homo sapiens
MSDSWVPNSASGQDPGGRRRAWAELLAGRVKREKYNPERAQKLKESAVRLLRSHQDLNALLLEVEGPLCKKLSLSKVIDCDSSEAYANHSSSFIGSALQDQASRLGVPVGILSAGMVASSVGQICTAPAETSHPVLLTVEQRSSLLLEAVWHLHVQGIVSLQELLESHPDMHAVGSWLFRNLCCLCEQMEASCQHADVARAMLSDFVQMFVLRGFQKNSDLRRTVEPEKMPQVTVDVLQRMLIFALDALAAGVQEESSTHKIVRC

SEQ ID NO: 6174 - protein, 622 aa, Homo sapiens
MSRQTTSVGSSCLDLWREKNDRLVRQAKVAQNSGLTLRRQQLAQDALEGLRGLLHSLQGLPAAVPVLPLELTVTCNFIILRASLAQGFTEDQAQDIQRSLERVLETQEQQGPRLEQGLRELWDSVLRASCLLPELLSALHRLVGLQAALWLSADRLGDLALLLETLNGSQSGASKDLLLLLKTWSPPAEELDAPLTLQDAQGLKDVLLTAFAYRQGLQELITGNPDKALSSLHEAASGLCPRPVLVQVYTALGSCHRKMGNPQRALLYLVAALKEGSAWGPPLLEASRLYQQLGDTTAELESLELLVEALNVPCSSKAPQFLIEVELLLPPPDLASPLHCGTQSQTKHILASRCLQTGRAGDAAEHYLDLLALLLDSSEPRFSPPPSPPGPCMPEVFLEAAVALIQAGRAQDALTLCEELLSRTSSLLPKMSRLWEDARKGTKELPYCPLWVSATHLLQGQAWVQLGAQKVAISEFSRCLELLFRATPEEKEQGAAFNCEQGCKSDAALQQLRAAALISRGLEWVASGQDTKALQDFLLSVQMCPGNRDTYFHLLQTLKRLDRRDEATALWWRLEAQTKGSHEDALWSLPLYLESYLSWIRPSDRDAFLEEFRTSLPKSCDL

SEQ ID NO: 6175 - protein, 215 aa, Homo sapiens
MSRQTTSVGSSCLDLWREKNDRLVRQAKVAQNSGLTLRRQQLAQDALEGLRGLLHSLQGLPAAVPVLPLELTVTCNFIILRASLAQGFTEDQAQDIQRSLERVLETQEQQGPRLEQGLRELWDSVLRASCLLPELLSALHRLVGLQAALWLSADRLGDLALLLETLNGSQSGASKDLLLLLKTWSPPAEELDAPLTLQDAQGLKDVLLTAFAYRQ

SEQ ID NO: 6176 - protein, 448 aa, Homo sapiens [sequence omitted]

SEQ ID NO: 6177 - protein, 220 aa, Homo sapiens
MLGIWTLLPLVLTSVARLSSKSVNAQVTDINSKGLELRKTVTTVETQNLEGLHHDGQFCHKPCPPGERKARDCTVNGDEPDCVPCQEGKEYTDKAHFSSKCRRCRLCDEGHGLEVEINCTRTQNTKCRCKPNFFCNSTVCEHCDPCTKCEHGIIKECTLTSNTKCKEEGSRSNLGWLCLLLLPIPLIVWVKRKEVQKTCRKHRKENQGSHESPTLNPMLT

SEQ ID NO: 6178 - protein, 335 aa, Homo sapiens
MLGIWTLLPLVLTSVARLSSKSVNAQVTDINSKGLELRKTVTTVETQNLEGLHHDGQFCHKPCPPGERKARDCTVNGDEPDCVPCQEGKEYTDKAHFSSKCRRCRLCDEGHGLEVEINCTRTQNTKCRCKPNFFCNSTVCEHCDPCTKCEHGIIKECTLTSNTKCKEEGSRSNLGWLCLLLLPIPLIVWVKRKEVQKTCRKHRKENQGSHESPTLNPETVAINLSDVDLSKYITTIAGVMTLSQVKGFVRKNGVNEAKIDEIKNDNVQDTAEQKVQLLRNWHQLHGKKEAYDTLIKDLKKANLCTLAEKIQTIILKDITSDSENSNFRNEIQSLV

SEQ ID NO: 6179 - protein, 314 aa, Homo sapiens
MLGIWTLLPLVLTSVARLSSKSVNAQVTDINSKGLELRKTVTTVETQNLEGLHHDGQFCHKPCPPGERKARDCTVNGDEPDCVPCQEGKEYTDKAHFSSKCRRCRLCDEGHGLEVEINCTRTQNTKCRCKPNFFCNSTVCEHCDPCTKCEHGIIKECTLTSNTKCKEEVKRKEVQKTCRKHRKENQGSHESPTLNPETVAINLSDVDLSKYITTIAGVMTLSQVKGFVRKNGVNEAKIDEIKNDNVQDTAEQKVQLLRNWHQLHGKKEAYDTLIKDLKKANLCTLAEKIQTIILKDITSDSENSNFRNEIQSLV

SEQ ID NO: 6180 - protein, 244 aa, Homo sapiens
MLGIWTLLPLVLTSVARLSSKSVNAQVTDINSKGLELRKTVTTVETQNLEGLHHDGQFCHKPCPPGERKARDCTVNGDEPDCVPCQEGKEYTDKAHFSSKCRRCRLCDEGHGLEVEINCTRTQNTKCRCKPNFFCNSTVCEHCDPCTKCEHGIIKECTLTSNTKCKEEGSRSNLGWLCLLLLPIPLIVWVKRKEVQKTCRKHRKENQGSHESPTLNPETVAINLSDVDLSKYHHYCWSHDTKSS

SEQ ID NO: 6181 - protein, 362 aa, Homo sapiens
MLRVCAQGWHAQGLPHGTNSLLKGGTETSLSTPTRLVVLTSVARLSSKSVNAQVTDINSKGLELRKTVTTVETQNLEGLHHDGQFCHKPCPPGERKARDCTVNGDEPDCVPCQEGKEYTDKAHFSSKCRRCRLCDEGHGLEVEINCTRTQNTKCRCKPNFFCNSTVCEHCDPCTKCEHGIIKECTLTSNTKCKEEGSRSNLGWLCLLLLPIPLIVWVKRKEVQKTCRKHRKENQGSHESPTLNPVGIEIDFSDVDLSKYITTIAGVMTLSQVKGFVRKNGVNEAKIDEIKNDNVQDTAEQKVQLLRNWHQLHGKKEAYDTLIKDLKKANLCTLAEKIQTIILKDITSDSENSNFRNEIQSLV

SEQ ID NO: 6182 - protein, 208 aa, Homo sapiens
MDPFLVLLHSVSSSLSSSELTELKFLCLGRVGKRKLERVQSGLDLFSMLLEQNDLEPGHTELLRELLASLRRHDLLRRVDDFEAGAAAGAAPGEEDLCAAFNVICDNVGKDWRRLARQLKVSDTKIDSIEDRYPRNLTERVRESLRIWKNTEKENATVAHLVGALRSCQMNLVADLVQEVQQARDLQNRSGAMSPMSWNSDASTSEAS

SEQ ID NO: 6183 - protein, 127 aa, Homo sapiens
MQQPFNYPYPQIYWVDSSASSPWAPPGTVLPCPTSVPRRPGQRRPPPPPPPPPLPPPPPPPPLPPLPLPPLKKRGNHSTGLCLLVMFFMVLVALVGLGLGMFQLFHLQKELAELREATPVHPLKKRS

SEQ ID NO: 6184 - protein, 281 aa, Homo sapiens
MQQPFNYPYPQIYWVDSSASSPWAPPGTVLPCPTSVPRRPGQRRPPPPPPPPPLPPPPPPPPLPPLPLPPLKKRGNHSTGLCLLVMFFMVLVALVGLGLGMFQLFHLQKELAELRESTSQMHTASSLEKQIGHPSPPPEKKELRKVAHLTGKSNSRSMPLEWEDTYGIVLLSGVKYKKGGLVINETGLYFVYSKVYFRGQSCNNLPLSHKVYMRNSKYPQDLVMMEGKMMSYCTTGQMWARSSYLGAVFNLTSADHLYVNVSELSLVNFEESQTFFGLYKL

SEQ ID NO: 6185 - protein, 4590 aa, Homo sapiens
MGRHLALLLLLLLLFQHFGDSDGSQRLEQTPLQFTHLEYNVTVQENSAAKTYVGHPVKMGVYITHPAWEVRYKIVSGDSENLFKAEEYILGDFCFLRIRTKGGNTAILNREVKDHYTLIVKALEKNTNVEARTKVRVQVLDTNDLRPLFSPTSYSVSLPENTAIRTSIARVSATDADIGTNGEFYYSFKDRTDMFAIHPTSGVIVLTGRLDYLETKLYEMEILAADRGMKLYGSSGISSMAKLTVHIEQANECAPVITAVTLSPSELDRDPAYAIVTVDDCDQGANGDIASLSIVAGDLLQQFRTVRSFPGSKEYKVKAIGGIDWDSHPFGYNLTLQAKDKGTPPQFSSVKVIHVTSPQFKAGPVKFEKDVYRAEISEFAPPNTPVVMVKAIPAYSHLRYVFKSTPGKAKFSLNYNTGLISILEPVKRQQAAHFELEVTTSDRKASTKVLVKVLGANSNPPEFTQTAYKAAFDENVPIGTTVMSLSAVDPDEGENGYVTYSIANLNHVPFAIDHFTGAVSTSENLDYELMPRVYTLRIRASDWGLPYRREVEVLATITLNNLNDNTPLFEKINCEGTIPRDLGVGEQITTVSAIDADELQLVQYQIEAGNELDFFSLNPNSGVLSLKRSLMDGLGAKVSFHSLRITATDGENFATPLYINITVAASHKLVNLQCEETGVAKMLAEKLLQANKLHNQGEVEDIFFDSHSVNAHIPQFRSTLPTGIQVKENQPVGSSVIFMNSTDLDTGFNGKLVYAVSGGNEDSCFMIDMETGMLKILSPLDRETTDKYTLNITVYDLGIPQKAAWRLLHVVVVDANDNPPEFLQESYFVEVSEDKEVHSEIIQVEATDKDLGPNGHVTYSIVTDTDTFSIDSVTGVVNIARPLDRELQHEHSLKIEARDQAREEPQLFSTVVVKVSLEDVNDNPPTFIPPNYRVKVREDLPEGTVIMWLEAHDPDLGQSGQVRYSLLDHGEGNFDVDKLSGAVRIVQQLDFEKKQVYNLTVRAKDKGKPVSLSSTCYVEVEVVDVNENLHPPVFSSFVEKGTVKEDAPVGSLVMTVSAHDEDARRDGEIRYSIRDGSGVGVFKIGEETGVIETSDRLDRESTSHYWLTVFATDQGVVPLSSFIEIYIEVEDVNDNAPQTSEPVYYPEIMENSPKDVSVVQIEAFDPDSSSNDKLMYKITSGNPQGFFSIHPKTGLITTTSRKLDREQQDEHILEVTVTDNGSPPKSTIARVIVKILDENDNKPQFLQKFYKIRLPEREKPDRERNARREPLYHVIATDKDEGPNAEISYSIEDGNEHGKFFIEPKTGVVSSKRFSAAGEYDILSIKAVDNGRPQKSSTTRLHIEWISKPKPSLEPISFEESFFTFTVMESDPVAHMIGVISVEPPGIPLWFDITGGNYDSHFDVDKGTGTIIVAKPLDAEQKSNYNLTVEATDGTTTILTQVFIKVIDTNDHRPQFSTSKYEVVIPEDTAPETEILQISAVDQDEKNKLIYTLQSSRDPLSLKKFRLDPATGSLYTSEKLDHEAVPAHLTVMVRDQDVPVKRNFARIVVNVSDTNDHAPWFTASSYKGRVYESAAVGSVVLQVTALDKDKGKNAEVLYSIESGTFGNIGNSFMIDPVLGSIKTAKELDRSNQAEYDLMVKATDKGSPPMSEITSVRIFVTIADNASPKFTSKEYSVELSETVSIGSFVGMVTAHSQSSVVYEIKDGNTGDAFDINPHSGTIITQKALDFETLPIYTLIIQGTNMAGLSTNTTVLVHLQDENDNAPVFMQAEYTGLISESASINSVVLTDRNVPLVIRAADADKDSNALLVYHIVEPSVHTYFAIDSSTGAIHTVLSLDYEETSIFHFTVQVHDMGTPRLFAEYAANVTVHVIDINDCPPVFAKPLYEASLLLPTYKGVKVITVNATDADSSAFSQLIYSITEGNIGEKFSMDYKTGALTVQNTTQLRSRYELTVRASDGRFAGLTSVKINVKESKESHLKFTQDVYSAVVKENSTEAETLAVITAIGNPINEPLFYHILNPDRRFKISRTSGVLSTTGTPFDREQQEAFDVVVEVTEEHKPSAVAHVVVKVIVEDQNDNAPVFVNLPYYAVVKVDTEVGHVIRYVTAVDRDSGRNGEVHYYLKEHHEHFQIGPLGEISLKKQFELDTLNKEYLVTVVAKDGGNPAFSAEVIVPITVMNKAMPVFEKPFYSAEIAESIQVHSPVVHVQANSPEGLKVFYSITDGDPFSQFTINFNTGVINVIAPLDFEAHPAYKLSIRATDSLTGAHAEVFVDIIVDDINDNPPVFAQQSYAVTLSEASVIGTSVVQVRATDSDSEPNRGISYQMFGNHSKSHDHFHVDSSTGLISLLRTLDYEQSRQHTIFVRAVDGGMPTLSSDVIVTVDVTDLNDNPPLFEQQIYEARISEHAPHGHFVTCVKAYDADSSDIDKLQYSILSGNDHKHFVIDSATGIITLSNLHRHALKPFYSLNLSVSDGVFRSSTQVHVTVIGGNLHSPAFLQNEYEVELAENAPLHTLVMEVKTTDGDSGIYGHVTYHIVNDFAKDRFYINERGQIFTLEKLDRETPAEKVISVRLMAKDAGGKVAFCTVNVILTDDNDNAPQFRATKYEVNIGSSAAKGTSVVKVLASDADEGSNADITYAIEADSESVKENLEINKLSGVITTKESLIGLENEFFTFFVRAVDNGSPSKESVVLVYVKILPPEMQLPKFSEPFYTFTVSEDVPIGTEIDLIRAEHSGTVLYSLVKGNTPESNRDESFVIDRQSGRLKLEKSLDHETTKWYQFSILARCTQDDHEMVASVDVSIQVKDANDNSPVFESSPYEAFIVENLPGGSRVIQIRASDADSGTNGQVMYSLDQSQSVEVIESFAINMETGWITTLKELDHEKRDNYQIKVVASDHGEKIQLSSTAIVDVTVTDVNDSPPRFTAEIYKGTVSEDDPQGGVIAILSTTDADSEEINRQVTYFITGGDPLGQFAVETIQNEWKVYVKKPLDREKRDNYLLTITATDGTFSSKAIVEVKVLDANDNSPVCEKTLYSDTIPEDVLPGKLIMQISATDADIRSNAEITYTLLGSGAEKFKLNPDTGELKTSTPLDREEQAVYHLLVRATDGGGRFCQASIVLTLEDVNDNAPEFSADPYAITVFENTEPGTLLTRVQATDADAGLNRKILYSLIDSADGQFSINELSGIIQLEKPLDRELQAVYTLSLKAVDQGLPRRLTATGTVIVSVLDINDNPPVFEYREYGATVSEDILVGTEVLQVYAASRDIEANAEITYSIISGNEHGKFSIDSKTGAVFIIENLDYESSHEYYLTVEATDGGTPSLSDVATVNVNVTDINDNTPVFSQDTYTTVISEDAVLEQSVITVMADDADGPSNSHIHYSIIDGNQGSSFTIDPVRGEVKVTKLLDRETISGYTLTVQASDNGSPPRVNTTTVNIDVSDVNDNAPVFSRGNYSVIIQENKPVGFSVLQLVVTDEDSSHNGPPFFFTIVTGNDEKAFEVNPQGVLLTSSAIKRKEKDHYLLQVKVADNGKPQLSSLTYIDIRVIEESIYPPAILPLEIFITSSGEEYSGGVIGKIHATDQDVYDTLTYSLDPQMDNLFSVSSTGGKLIAHKKLDIGQYLLNVSVTDGKFTTVADITVHIRQVTQEMLNHTIAIRFANLTPEEFVGDYWRNFQRALRNILGVRRNDIQIVSLQSSEPHPHLDVLLFVEKPGSAQISTKQLLHKINSSVTDIEEIIGVRILNVFQKLCAGLDCPWKFCDEKVSVDESVMSTHSTARLSFVTPRHHRAAVCLCKEGRCPPVHHGCEDDPCPEGSECVSDPWEEKHTCVCPSGRFGQCPGSSSMTLTGNSYVKYRLTENENKLEMKLTMRLRTYSTHAVVMYARGTDYSILEIHHGRLQYKFDCGSGPGIVSVQSIQVNDGQWHAVALEVNGNYARLVLDQVHTASGTAPGTLKTLNLDNYVFFGGHIRQQGTRHGRSPQVGNGFRGCMDSIYLNGQELPLNSKPRSYAHIEESVDVSPGCFLTATEDCASNPCQNGGVCNPSPAGGYYCKCSALYIGTHCEISVNPCSSKPCLYGGTCVVDNGGFVCQCRGLYTGQRCQLSPYCKDEPCKNGGTCFDSLDGAVCQCDSGFRGERCQSDIDECSGNPCLHGALCENTHGSYHCNCSHEYRGRHCEDAAPNQYVSTPWNIGLAEGIGIVVFVAGIFLLVVVFVLCRKMISRKKKHQAEPKDKHLGPATAFLQRPYFDSKLNKNIYSDIPPQVPVRPISYTPSIPSDSRNNLDRNSFEGSAIPEHPEFSTFNPESVHGHRKAVAVCSVAPNLPPPPPSNSPSDSDSIQKPSWDFDYDTKVVDLDPCLSKKPLEEKPSQPYSARESLSEVQSLSSFQSESCDDNGYHWDTSDWMPSVPLPDIQEFPNYEVIDEQTPLYSADPNAIDTDYYPGGYDIESDFPPPPEDFPAADELPPLPPEFSNQFESIHPPRDMPAAGSLGSSSRNRQRFNLNQYLPNFYPLDMSEPQTKGTGENSTCREPHAPYPPGYQRHFEAPAVESMPMSVYASTASCSDVSACCEVESEVMMSDYESGDDGHFEEVTIPPLDSQQHTEV

SEQ ID NO: 6186 - protein, 4588 aa, Homo sapiens
MGRHLALLLLLLLLFQHFGDSDGSQRLEQTPLQFTHLEYNVTVQENSAAKTYVGHPVKMGVYITHPAWEVRYKIVSGDSENLFKAEEYILGDFCFLRIRTKGGNTAILNREVKDHYTLIVKALEKNTNVEARTKVRVQVLDTNDLRPLFSPTSYSVSLPENTAIRTSIARVSATDADIGTNGEFYYSFKDRTDMFAIHPTSGVIVLTGRLDYLETKLYEMEILAADRGMKLYGSSGISSMAKLTVHIEQANECAPVITAVTLSPSELDRDPAYAIVTVDDCDQGANGDIASLSIVAGDLLQQFRTVRSFPGSKEYKVKAIGGIDWDSHPFGYNLTLQAKDKGTPPQFSSVKVIHVTSPQFKAGPVKFEKDVYRAEISEFAPPNTPVVMVKAIPAYSHLRYVFKSTPGKAKFSLNYNTGLISILEPVKRQQAAHFELEVTTSDRKASTKVLVKVLGANSNPPEFTQTAYKAAFDENVPIGTTVMSLSAVDPDEGENGYVTYSIANLNHVPFAIDHFTGAVSTSENLDYELMPRVYTLRIRASDWGLPYRREVEVLATITLNNLNDNTPLFEKINCEGTIPRDLGVGEQITTVSAIDADELQLVQYQIEAGNELDFFSLNPNSGVLSLKRSLMDGLGAKVSFHSLRITATDGENFATPLYINITVAASHKLVNLQCEETGVAKMLAEKLLQANKLHNQGEVEDIFFDSHSVNAHIPQFRSTLPTGIQVKENQPVGSSVIFMNSTDLDTGFNGKLVYAVSGGNEDSCFMIDMETGMLKILSPLDRETTDKYTLNITVYDLGIPQKAAWRLLHVVVVDANDNPPEFLQESYFVEVSEDKEVHSEIIQVEATDKDLGPNGHVTYSIVTDTDTFSIDSVTGVVNIARPLDRELQHEHSLKIEARDQAREEPQLFSTVVVKVSLEDVNDNPPTFIPPNYRVKVREDLPEGTVIMWLEAHDPDLGQSGQVRYSLLDHGEGNFDVDKLSGAVRIVQQLDFEKKQVYNLTVRAKDKGKPVSLSSTCYVEVEVVDVNENLHPPVFSSFVEKGTVKEDAPVGSLVMTVSAHDEDARRDGEIRYSIRDGSGVGVFKIGEETGVIETSDRLDRESTSHYWLTVFATDQGVVPLSSFIEIYIEVEDVNDNAPQTSEPVYYPEIMENSPKDVSVVQIEAFDPDSSSNDKLMYKITSGNPQGFFSIHPKTGLITTTSRKLDREQQDEHILEVTVTDNGSPPKSTIARVIVKILDENDNKPQFLQKFYKIRLPEREKPDRERNARREPLYHVIATDKDEGPNAEISYSIEDGNEHGKFFIEPKTGVVSSKRFSAAGEYDILSIKAVDNGRPQKSSTTRLHIEWISKPKPSLEPISFEESFFTFTVMESDPVAHMIGVISVEPPGIPLWFDITGGNYDSHFDVDKGTGTIIVAKPLDAEQKSNYNLTVEATDGTTTILTQVFIKVIDTNDHRPQFSTSKYEVVIPEDTAPETEILQISAVDQDEKNKLIYTLQSSRDPLSLKKFRLDPATGSLYTSEKLDHEAVHQHTLTVMVRDQDVPVKRNFARIVVNVSDTNDHAPWFTASSYKGRVYESAAVGSVVLQVTALDKDKGKNAEVLYSIESGNIGNSFMIDPVLGSIKTAKELDRSNQAEYDLMVKATDKGSPPMSEITSVRIFVTIADNASPKFTSKEYSVELSETVSIGSFVGMVTAHSQSSVVYEIKDGNTGDAFDINPHSGTIITQKALDFETLPIYTLIIQGTNMAGLSTNTTVLVHLQDENDNAPVFMQAEYTGLISESASINSVVLTDRNVPLVIRAADADKDSNALLVYHIVEPSVHTYFAIDSSTGAIHTVLSLDYEETSIFHFTVQVHDMGTPRLFAEYAANVTVHVIDINDCPPVFAKPLYEASLLLPTYKGVKVITVNATDADSSAFSQLIYSITEGNIGEKFSMDYKTGALTVQNTTQLRSRYELTVRASDGRFAGLTSVKINVKESKESHLKFTQDVYSAVVKENSTEAETLAVITAIGNPINEPLFYHILNPDRRFKISRTSGVLSTTGTPFDREQQEAFDVVVEVTEEHKPSAVAHVVVKVIVEDQNDNAPVFVNLPYYAVVKVDTEVGHVIRYVTAVDRDSGRNGEVHYYLKEHHEHFQIGPLGEISLKKQFELDTLNKEYLVTVVAKDGGNPAFSAEVIVPITVMNKAMPVFEKPFYSAEIAESIQVHSPVVHVQANSPEGLKVFYSITDGDPFSQFTINFNTGVINVIAPLDFEAHPAYKLSIRATDSLTGAHAEVFVDIIVDDINDNPPVFAQQSYAVTLSEASVIGTSVVQVRATDSDSEPNRGISYQMFGNHSKSHDHFHVDSSTGLISLLRTLDYEQSRQHTIFVRAVDGGMPTLSSDVIVTVDVTDLNDNPPLFEQQIYEARISEHAPHGHFVTCVKAYDADSSDIDKLQYSILSGNDHKHFVIDSATGIITLSNLHRHALKPFYSLNLSVSDGVFRSSTQVHVTVIGGNLHSPAFLQNEYEVELAENAPLHTLVMEVKTTDGDSGIYGHVTYHIVNDFAKDRFYINERGQIFTLEKLDRETPAEKVISVRLMAKDAGGKVAFCTVNVILTDDNDNAPQFRATKYEVNIGSSAAKGTSVVKVLASDADEGSNADITYAIEADSESVKENLEINKLSGVITTKESLIGLENEFFTFFVRAVDNGSPSKESVVLVYVKILPPEMQLPKFSEPFYTFTVSEDVPIGTEIDLIRAEHSGTVLYSLVKGNTPESNRDESFVIDRQSGRLKLEKSLDHETTKWYQFSILARCTQDDHEMVASVDVSIQVKDANDNSPVFESSPYEAFIVENLPGGSRVIQIRASDADSGTNGQVMYSLDQSQSVEVIESFAINMETGWITTLKELDHEKRDNYQIKVVASDHGEKIQLSSTAIVDVTVTDVNDSPPRFTAEIYKGTVSEDDPQGGVIAILSTTDADSEEINRQVTYFITGGDPLGQFAVETIQNEWKVYVKKPLDREKRDNYLLTITATDGTFSSKAIVEVKVLDANDNSPVCEKTLYSDTIPEDVLPGKLIMQISATDADIRSNAEITYTLLGSGAEKFKLNPDTGELKTSTPLDREEQAVYHLLVRATDGGGRFCQASIVLTLEDVNDNAPEFSADPYAITVFENTEPGTLLTRVQATDADAGLNRKILYSLIDSADGQFSINELSGIIQLEKPLDRELQAVYTLSLKAVDQGLPRRLTATGTVIVSVLDINDNPPVFEYREYGATVSEDILVGTEVLQVYAASRDIEANAEITYSIISGNEHGKFSIDSKTGAVFIIENLDYESSHEYYLTVEATDGGTPSLSDVATVNVNVTDINDNTPVFSQDTYTTVISEDAVLEQSVITVMADDADGPSNSHIHYSIIDGNQGSSFTIDPVRGEVKVTKLLDRETISGYTLTVQASDNGSPPRVNTTTVNIDVSDVNDNAPVFSRGNYSVIIQENKPVGFSVLQLVVTDEDSSHNGPPFFFTIVTGNDEKAFEVNPQGVLLTSSAIKRKEKDHYLLQVKVADNGKPQLSSLTYIDIRVIEESIYPPAILPLEIFITSSGEEYSGGVIGKIHATDQDVYDTLTYSLDPQMDNLFSVSSTGGKLIAHKKLDIGQYLLNVSVTDGKFTTVADITVHIRQVTQEMLNHTIAIRFANLTPEEFVGDYWRNFQRALRNILGVRRNDIQIVSLQSSEPHPHLDVLLFVEKPGSAQISTKQLLHKINSSVTDIEEIIGVRILNVFQKLCAGLDCPWKFCDEKVSVDESVMSTHSTARLSFVTPRHHRAAVCLCKEGRCPPVHHGCEDDPCPEGSECVSDPWEEKHTCVCPSGRFGQCPGSSSMTLTGNSYVKYRLTENENKLEMKLTMRLRTYSTHAVVMYARGTDYSILEIHHGRLQYKFDCGSGPGIVSVQSIQVNDGQWHAVALEVNGNYARLVLDQVHTASGTAPGTLKTLNLDNYVFFGGHIRQQGTRHGRSPQVGNGFRGCMDSIYLNGQELPLNSKPRSYAHIEESVDVSPGCFLTATEDCASNPCQNGGVCNPSPAGGYYCKCSALYIGTHCEISVNPCSSKPCLYGGTCVVDNGGFVCQCRGLYTGQRCQLSPYCKDEPCKNGGTCFDSLDGAVCQCDSGFRGERCQSDIDECSGNPCLHGALCENTHGSYHCNCSHEYRGRHCEDAAPNQYVSTPWNIGLAEGIGIVVFVAGIFLLVVVFVLCRKMISRKKKHQAEPKDKHLGPATAFLQRPYFDSKLNKNIYSDIPPQVPVRPISYTPSIPSDSRNNLDRNSFEGSAIPEHPEFSTFNPESVHGHRKAVAVCSVAPNLPPPPPSNSPSDSDSIQKPSWDFDYDTKVVDLDPCLSKKPLEEKPSQPYSARESLSEVQSLSSFQSESCDDNGYHWDTSDWMPSVPLPDIQEFPNYEVIDEQTPLYSADPNAIDTDYYPGGYDIESDFPPPPEDFPAADELPPLPPEFSNQFESIHPPRDMPAAGSLGSSSRNRQRFNLNQYLPNFYPLDMSEPQTKGTGENSTCREPHAPYPPGYQRHFEAPAVESMPMSVYASTASCSDVSACCEVESEVMMSDYESGDDGHFEEVTIPPLDSQQHTEV

SEQ ID NO: 6187 - protein, 488 aa, Homo sapiens
MGRHLALLLLLLLLFQHFGDSDGSQRLEQTPLQFTHLEYNVTVQENSAAKTYVGHPVKMGVYITHPAWEVRYKIVSGDSENLFKAEEYILGDFCFLRIRTKGGNTAILNREVKDHYTLIVKALEKNTNVEARTKVRVQVLDTNDLRPLFSPTSYSVSLPENTAIRTSIARVSATDADIGTNGEFYYSFKDRTDMFAIHPTSGVIVLTGRLDYLETKLYEMEILAADRGMKLYGSSGISSMAKLTVHIEQANECAPVITAVTLSPSELDRDPAYAIVTVDDCDQGANGDIASLSIVAGDLLQQFRTVRSFPGSKEYKVKAIGGIDWDSHPFGYNLTLQAKDKGTPPQFSSVKVIHVTSPQFKAGPVKFEKDVYRAEISEFAPPNTPVVMVKAIPAYSHLRYVFKSTPGKAKFSLNYNTGLISILEPVKRQQAAHFELEVTTSDRKASTKVLVKVLGANSNPPEFTQTAYKAAFDENVPIGTTVMSLSAV

SEQ ID NO: 6188 - protein, 132 aa, Homo sapiens
MCDAFVGTWKLVSSENFDDYMKEVGVGFATRKVAGMAKPNMIISVNGDVITIKSESTFKNTEISFILGQEFDEVTADDRKVKSTITLDGGVLVHVQKWDGKSTTIKRKREDDKLVVECVMKGVTSTRVYERA

SEQ ID NO: 6189 - protein, 2511 aa, Homo sapiens
MEEVVIAGMSGKLPESENLQEFWDNLIGGVDMVTDDDRRWKAGLYGLPRRSGKLKDLSRFDASFFGVHPKQAHTMDPQLRLLLEVTYEAIVDGGINPDSLRGTHTGVWVGVSGSETSEALSRDPETLVGYSMVGCQRAMMANRLSFFFDFRGPSIALDTACSSSLMALQNAYQAIHSGQCPAAIVGGINVLLKPNTSVQFLRLGMLSPEGTCKAFDTAGNGYCRSEGVVAVLLTKKSLARRVYATILNAGTNTDGFKEQGVTFPSGDIQEQLIRSLYQSAGVAPESFEYIEAHGTGTKVGDPQELNGITRALCATRQEPLLIGSTKSNMGHPEPASGLAALAKVLLSLEHGLWAPNLHFHSPNPEIPALLDGRLQVVDQPLPVRGGNVGINSFGFGGSNVHIILRPNTQPPPAPAPHATLPRLLRASGRTPEAVQKLLEQGLRHSQDLAFLSMLNDIAAVPATAMPFRGYAVLGGERGGPEVQQVPAGERPLWFICSGMGTQWRGMGLSLMRLDRFRDSILRSDEAVKPFGLKVSQLLLSTDESTFDDIVHSFVSLTAIQIGLIDLLSCMGLRPDGIVGHSLGEVACGYADGCLSQEEAVLAAYWRGQCIKEAHLPPGAMAAVGLSWEECKQRCPPGVVPACHNSKDTVTISGPQAPVFEFVEQLRKEGVFAKEVRTGGMAFHSYFMEAIAPPLLQELKKVIREPKPRSARWLSTSIPEAQWHSSLARTSSAEYNVNNLVSPVLFQEALWHVPEHAVVLEIAPHALLQAVLKRGLKPSCTIIPLMKKDHRDNLEFFLAGIGRLHLSGIDANPNALFPPVEFPAPRGTPLISPLIKWDHSLAWDVPAAEDFPNGSGSPSAAIYNIDTSSESPDHYLVDHTLDGRVLFPATGYLSIVWKTLARALGLGVEQLPVVFEDVVLHQATILPKTGTVSLEVRLLEASRAFEVSENGNLVVSGKVYQWDDPDPRLFDHPESPTPNPTEPLFLAQAEVYKELRLRGYDYGPHFQGILEASLEGDSGRLLWKDNWVSFMDTMLQMSILGSAKHGLYLPTRVTAIHIDPATHRQKLYTLQDKAQVADVVVSRWLRVTVAGGVHISGLHTESAPRRQQEQQVPILEKFCFTPHTEEGCLSERAALQEELQLCKGLVQALQTKVTQQGLKMVVPGLDGAQIPRDPSQQELPRLLSAACRLQLNGNLQLELAQVLAQERPKLPEDPLLSGLLDSPALKACLDTAVENMPSLKMKVVEVLAGHGHLYSRIPGLLSPHPLLQLSYTATDRHPQALEAAQAELQQHDVAQGQWDPADPAPSALGSADLLVCNCAVAALGDPASALSNMVAALREGGFLLLHTLLRGHPLGDIVAFLTSTEPQYGQGILSQDAWESLFSRVSLRLVGLKKSFYGSTLFLCRRPTPQDSPIFLPVDDTSFRWVESLKGILADEDSSRPVWLKAINCATSGVVGLVNCLRREPGGNRLRCVLLSNLSSTSHVPEVDPGSAELQKVLQGDLVMNVYRDGAWGAFRHFLLEEDKPEEPTAHAFVSTLTRGDLSSIRWVCSSLRHAQPTCPGAQLCTVYYASLNFRDIMLATGKLSPDAIPGKWTSQDSLLGMEFSGRDASGKRVMGLVPAKGLATSVLLSPDFLWDVPSNWTLEEAASVPVVYSTAYYALVVRGRVRPGETLLIHSGSGGVGQAAIAIALSLGCRVFTTVGSAEKRAYLQARFPQLDSTSFANSRDTSFEQHVLWHTGGKGVDLVLNSLAEEKLQASVRCLATHGRFLEIGKFDLSQNHPLGMAIFLKNVTFHGVLLDAFFNESSADWREVWALVQAGIRDGVVRPLKCTVFHGAQVEDAFRYMAQGKHIGKVVVQVLAEEPEAVLKGAKPKLMSAISKTFCPAHKSYIIAGGLGGFGLELAQWLIQRGVQKLVLTSRSGIRTGYQAKQVRRWRRQGVQVQVSTSNISSLEGARGLIAEAAQLGPVGGVFNLAVVLRDGLLENQTPEFFQDVCKPKYSGTLNLDRVTREACPELDYFVVFSSVSCGRGNAGQSNYGFANSAMERICEKRRHEGLPGLAVQWGAIGDVGILVETMSTNDTIVSGTLPQRMASCLEVLDLFLNQPHMVLSSFVLAEKAAAYRDRDSQRDLVEAVAHILGIRDLAAVNLDSSLADLGLDSLMSVEVRQTLERELNLVLSVREVRQLTLRKLQELSSKADEASELACPTPKEDGLAQQQTQLNLRSLLVNPEGPTLMRLNSVQSSERPLFLVHPIEGSTTVFHSLASRLSIPTYGLQCTRAAPLDSIHSLAAYYIDCIRQVQPEGPYRVAGYSYGACVAFEMCSQLQAQQSPAPTHNSLFLFDGSPTYVLAYTQSYRAKLTPGCEAEAETEAICFFVQQFTDMEHNRVLEALLPLKGLEERVAAAVDLIIKSHQGLDRQELSFAARSFYYKLRAAEQYTPKAKYHGNVMLLRAKTGGAYGEDLGADYNLSQVCDGKVSVHVIEGDHRTLLEGSGLESIISIIHSSLAEPRVSVREG

SEQ ID NO: 6190 - protein, 833 aa, Homo sapiens
MSILGSAKHGLYLPTRVTAIHIDPATHRQKLYTLQDKAQVADVVVSRWLRVTVAGGVHISGLHTESAPRRQQEQQVPILEKFCFTPHTEEGCLSERAALQEELQLCKGLVQALQTKVTQQGLKMVVPGLDGAQIPRDPSQQELPRLLSAACRLQLNGNLQLELAQVLAQERPKLPEDPLLSGLLDSPALKACLDTAVENMPSLKMKVVEVLAGHGHLYSRIPGLLSPHPLLQLSYTATDRHPQALEAAQAELQQHDVAQGQWDPADPAPSALGSADLLVCNCAVAALGDPASALSNMVAALREGGFLLLHTLLRGHPLGDIVAFLTSTEPQYGQGILSQDAWESLFSRVSLRLVGLKKSFYGSTLFLCRRPTPQDSPIFLPVDDTSFRWVESLKGILADEDSSRPVWLKAINCATSGVVGLVNCLRREPGGNRLRCVLLSNLSSTSHVPEVDPGSAELQKVLQGDLVMNVYRDGAWGAFRHFLLEEDKPEEPTAHAFVSTLTRGDLSSIRWVCSSLRHAQPTCPGAQLCTVYYASLNFRDIMLATGKLSPDAIPGKWTSQDSLLGMEFSGRDASGKRVMGLVPAKGLATSVLLSPDFLWDVPSNWTLEEAASVPVVYSTAYYALVVRGRVRPGETLLIHSGSGGVGQAAIAIALSLGCRVFTTVGSAEKRAYLQARFPQLDSTSFANSRDTSFEQHVLWHTGGKGVDLVLNSLAEEKLQASVRCLATHGRFLEIGKFDLSQNHPLGMAIFLKNVTFHGVLLDAFFNESSADWREVWALVQAGIRDGVVRPLKCTVFHGAQVEDAFRYMAQAKASQAWPCSGAPSATWAFWWRR

SEQ ID NO: 6191 - protein, 380 aa, Homo sapiens
MMFSGFNADYEASSSRCSSASPAGDSLSYYHSPADSFSSMGSPVNAQDFCTDLAVSSANFIPTVTAISTSPDLQWLVQPALVSSVAPSQTRAPHPFGVPAPSAGAYSRAGVVKTMTGGRAQSIGRRGKVEQLSPEEEEKRRIRRERNKMAAAKCRNRRRELTDTLQAETDQLEDEKSALQTEIANLLKEKEKLEFILAAHRPACKIPDDLGFPEEMSVASLDLTGGLPEVATPESEEAFTLPLLNDPEPKPSVEPVKSISSMELKTEPFDDFLFPASSRPSGSETARSVPDMDLSGSFYAADWEPLHSGSLGMGPMATELEPLCTPVVTCTPSCTAYTSSFVFTYPEADSFPSCAAAHRKGSSSNEPSSDSLSSPTLLAL

SEQ ID NO: 6192 - protein, 321 aa, Homo sapiens
MEEGQYSEIEELPRRRCCRRGTQIVLLGLVTAALWAGLLTLLLLWHWDTTQSLKQLEERAARNVSQVSKNLESHHGDQMAQKSQSTQISQELEELRAEQQRLKSQDLELSWNLNGLQADLSSFKSQELNERNEASDLLERLREEVTKLRMELQVSSGFVCNTCPEKWINFQRKCYYFGKGTKQWVHARYACDDMEGQLVSIHSPEEQDFLTKHASHTGSWIGLRNLDLKGEFIWVDGSHVDYSNWAPGEPTSRSQGEDCVMMRGSGRWNDAFCDRKLGAWVCDRLATCTPPASEGSAESMGPDSRPDPDGRLPTPSAPLHS

SEQ ID NO: 6193 - protein, 320 aa, Homo sapiens
MNPPSQEIEELPRRRCCRRGTQIVLLGLVTAALWAGLLTLLLLWHWDTTQSLKQLEERAARNVSQVSKNLESHHGDQMAQKSQSTQISQELEELRAEQQRLKSQDLELSWNLNGLQADLSSFKSQELNERNEASDLLERLREEVTKLRMELQVSSGFVCNTCPEKWINFQRKCYYFGKGTKQWVHARYACDDMEGQLVSIHSPEEQDFLTKHASHTGSWIGLRNLDLKGEFIWVDGSHVDYSNWAPGEPTSRSQGEDCVMMRGSGRWNDAFCDRKLGAWVCDRLATCTPPASEGSAESMGPDSRPDPDGRLPTPSAPLHS

SEQ ID NO: 6194 - protein, 374 aa, Homo sapiens
MWFLTTLLLWVPVDGQVDTTKAVITLQPPWVSVFQEETVTLHCEVLHLPGSSSTQWFLNGTATQTSTPSYRITSASVNDSGEYRCQRGLSGRSDPIQLEIHRGWLLLQVSSRVFTEGEPLALRCHAWKDKLVYNVLYYRNGKAFKFFHWNSNLTILKTNISHNGTYHCSGMGKHRYTSAGISVTVKELFPAPVLNASVTSPLLEGNLVTLSCETKLLLQRPGLQLYFSFYMGSKTLRGRNTSSEYQILTARREDSGLYWCEAATEDGNVLKRSPELELQVLGLQLPTPVWFHVLFYLAVGIMFLVNTVLWVTIRKELKRKKKWDLEISLDSGHEKKVISSLQEDRHLEEELKCQEQKEEQLQEGVHRKEPQGAT

SEQ ID NO: 6195 - protein, 240 aa, Homo sapiens
MWFLTTLLLWGWLLLQVSSRVFTEGEPLALRCHAWKDKLVYNVLYYRNGKAFKFFHWNSNLTILKTNISHNGTYHCSGMGKHRYTSAGISVTVKELFPAPVLNASVTSPLLEGNLVTLSCETKLLLQRPGLQLYFSFYMGSKTLRGRNTSSEYQILTARREDSGLYWCEAATEDGNVLKRSPELELQVLGLQLPTPVWFHVLFYLAVGIMFLVNTVLWVTIRKELKRKKKWDLEISLDSG

SEQ ID NO: 6196 - protein, 822 aa, Homo sapiens
MGFSSELCSPQGHGVLQQMQEAELRLLEGMRKWMAQRVKSDREYAGLLHHMSLQDSGGQSRAISPDSPISQSWAEITSQTEGLSRLLRQHAEDLNSGPLSKLSLLIRERQQLRKTYSEQWQQLQQELTKTHSQDIEKLKSQYRALARDSAQAKRKYQEASKDKDRDKAKDKYVRSLWKLFAHHNRYVLGVRAAQLHHQHHHQLLLPGLLRSLQDLHEEMACILKEILQEYLEISSLVQDEVVAIHREMAAAAARIQPEAEYQGFLRQYGSAPDVPPCVTFDESLLEEGEPLEPGELQLNELTVESVQHTLTSVTDELAVATEMVFRRQEMVTQLQQELRNEEENTHPRERVQLLGKRQVLQEALQGLQVALCSQAKLQAQQELLQTKLEHLGPGEPPPVLLLQDDRHSTSSSEQEREGGRTPTLEILKSHISGIFRPKFSLPPPLQLIPEVQKPLHEQLWYHGAIPRAEVAELLVHSGDFLVRESQGKQEYVLSVLWDGLPRHFIIQSLDNLYRLEGEGFPSIPLLIDHLLSTQQPLTKKSGVVLHRAVPKDKWVLNHEDLVLGEQIGRGNFGEVFSGRLRADNTLVAVKSCRETLPPDLKAKFLQEARILKQYSHPNIVRLIGVCTQKQPIYIVMELVQGGDFLTFLRTEGARLRVKTLLQMVGDAAAGMEYLESKCCIHRDLAARNCLVTEKNVLKISDFGMSREEADGVYAASGGLRQVPVKWTAPEALNYGRYSSESDVWSFGILLWETFSLGASPYPNLSNQQTREFVEKGGRLPCPELCPDAVFRLMEQCWAYEPGQRPSFSTIYQELQSIRKRHR

SEQ ID NO: 6197 - protein, 764 aa, Homo sapiens
MGFSSELCSPQGHGVLQQMQEAELRLLEGMRKWMAQRVKSDREYAGLLHHMSLQDSGGQSRAISPDSPISQTHSQDIEKLKSQYRALARDSAQAKRKYQEASKDKDRDKAKDKYVRSLWKLFAHHNRYVLGVRAAQLHHQHHHQLLLPGLLRSLQDLHEEMACILKEILQEYLEISSLVQDEVVAIHREMAAAAARIQPEAEYQGFLRQYGSAPDVPPCVTFDESLLEEGEPLEPGELQLNELTVESVQHTLTSVTDELAVATEMVFRRQEMVTQLQQELRNEEENTHPRERVQLLGKRQVLQEALQGLQVALCSQAKLQAQQELLQTKLEHLGPGEPPPVLLLQDDRHSTSSSEQEREGGRTPTLEILKSHISGIFRPKFSLPPPLQLIPEVQKPLHEQLWYHGAIPRAEVAELLVHSGDFLVRESQGKQEYVLSVLWDGLPRHFIIQSLDNLYRLEGEGFPSIPLLIDHLLSTQQPLTKKSGVVLHRAVPKDKWVLNHEDLVLGEQIGRGNFGEVFSGRLRADNTLVAVKSCRETLPPDLKAKFLQEARILKQYSHPNIVRLIGVCTQKQPIYIVMELVQGGDFLTFLRTEGARLRVKTLLQMVGDAAAGMEYLESKCCIHRDLAARNCLVTEKNVLKISDFGMSREEADGVYAASGGLRQVPVKWTAPEALNYGRYSSESDVWSFGILLWETFSLGASPYPNLSNQQTREFVEKGGRLPCPELCPDAVFRLMEQCWAYEPGQRPSFSTIYQELQSIRKRHR

SEQ ID NO: 6198 - protein, 681 aa, Homo sapiens
MGFSSELCSPQGHGVLQQMQEAELRLLEGMRKWMAQRVKSDREYAGLLHHMSLQDSGGQSRAISPDSPISQTHSQDIEKLKSQYRALARDSAQAKRKYQEASKDKDRDKAKDKYVRSLWKLFAHHNRYVLGVRAAQLHHQHHHQLLLPGLLRSLQDLHEEMACILKEILQEYLEISSLVQDEVVAIHREMAAAAARIQPEAEYQGFLRQYGSAPDVPPCVTFDESLLEEGEPLEPGELQLNELTVESVQHTLTSVTDELAVATEMVFRRQEMVTQLQQELRNEEENTHPRERVQLLGKRQVLQEALQGLQVALCSQAKLQAQQELLQTKLEHLGPGEPPPVLLLQDDRHSTSSSEQEREGGRTPTLEILKSHISGIFRPKFSNLYRLEGEGFPSIPLLIDHLLSTQQPLTKKSGVVLHRAVPKDKWVLNHEDLVLGEQIGRGNFGEVFSGRLRADNTLVAVKSCRETLPPDLKAKFLQEARSSPSTSSWSLCRGSSPPAGGDFLTFLRTEGARLRVKTLLQMVGDAAAGMEYLESKCCIHRDLAARNCLVTEKNVLKISDFGMSREEADGVYAASGGLRQVPVKWTAPEALNYGRYSSESDVWSFGILLWETFSLGASPYPNLSNQQTREFVEKGGRLPCPELCPDAVFRLMEQCWAYEPGQRPSFSTIYQELQSIRKRHR

SEQ ID NO: 6199 - protein, 694 aa, Homo sapiens
MGFSSELCSPQGHGVLQQMQEAELRLLEGMRKWMAQRVKSDREYAGLLHHMSLQDSGGQSRAISPDSPISQTHSQDIEKLKSQYRALARDSAQAKRKYQEASKDKDRDKAKDKYVRSLWKLFAHHNRYVLGVRAAQLHHQHHHQLLLPGLLRSLQDLHEEMACILKEILQEYLEISSLVQDEVVAIHREMAAAAARIQPEAEYQGFLRQYGSAPDVPPCVTFDESLLEEGEPLEPGELQLNELTVESVQHTLTSVTDELAVATEMVFRRQEMVTQLQQELRNEEENTHPRERVQLLGKRQVLQEALQGLQVALCSQAKLQAQQELLQTKLEHLGPGEPPPVLLLQDDRHSTSSSEQEREGGRTPTLEILKSHISGIFRPKFSNLYRLEGEGFPSIPLLIDHLLSTQQPLTKKSGVVLHRAVPKDKWVLNHEDLVLGEQIGRGNFGEVFSGRLRADNTLVAVKSCRETLPPDLKAKFLQEARILKQYSHPNIVRLIGVCTQKQPIYIVMELVQGGDFLTFLRTEGARLRVKTLLQMVGDAAAGMEYLESKCCIHRDLAARNCLVTEKNVLKISDFGMSREEADGVYAASGGLRQVPVKWTAPEALNYGRYSSESDVWSFGILLWETFSLGASPYPNLSNQQTREFVEKGGRLPCPELCPDAVFRLMEQCWAYEPGQRPSFSTIYQELQSIRKRHR

SEQ ID NO: 6200 - protein, 42 aa, Homo sapiens
MGFSSELCSPQGHGVLQQMQEAELRLLEGMRKWMAQRVKSDR

SEQ ID NO: 6201 - protein, 115 aa, Homo sapiens
MGFSSELCSPQGHGVLQQMQEAELRLLEGMRKWMAQRVKSDREYAGLLHHMSLQDSGGQSRAISPDSPISQSWAEITSQTEGLSRLLRQHAEDLNSGPLSKLSLLIRERQQLRKT

SEQ ID NO: 6202 - protein, 752 aa, Homo sapiens
MGFSSELCSPQGHGVLQQMQEAELRLLEGMRKWMAQRVKSDREYAGLLHHMSLQDSGGQSRAISPDSPISQSWAEITSQTEGLSRLLRQHAEDLNSGPLSKLSLLIRERQQLRKTYSEQWQQLQQELTKTHSQDIEKLKSQYRALARDSAQAKRKYQEASKDKDRDKAKDKYVRSLWKLFAHHNRYVLGVRAAQLHHQHHHQLLLPGLLRSLQDLHEEMACILKEILQEYLEISSLVQDEVVAIHREMAAAAARIQPEAEYQGFLRQYGSAPDVPPCVTFDESLLEEGEPLEPGELQLNELTVESVQHTLTSVTDELAVATEMVFRRQEMVTQLQQELRNEEENTHPRERVQLLGKRQVLQEALQGLQVALCSQAKLQAQQELLQTKLEHLGPGEPPPVLLLQDDRHSTSSSEQEREGGRTPTLEILKSHISGIFRPKFSNLYRLEGEGFPSIPLLIDHLLSTQQPLTKKSGVVLHRAVPKDKWVLNHEDLVLGEQIGRGNFGEVFSGRLRADNTLVAVKSCRETLPPDLKAKFLQEARILKQYSHPNIVRLIGVCTQKQPIYIVMELVQGGDFLTFLRTEGARLRVKTLLQMVGDAAAGMEYLESKCCIHRDLAARNCLVTEKNVLKISDFGMSREEADGVYAASGGLRQVPVKWTAPEALNYGRYSSESDVWSFGILLWETFSLGASPYPNLSNQQTREFVEKGGRLPCPELCPDAVFRLMEQCWAYEPGQRPSFSTIYQELQSIRKRHR

SEQ ID NO: 6203 - protein, 694 aa, Homo sapiens; identical to SEQ ID NO: 6199

SEQ ID NO: 6204 - protein, 147 aa, Homo sapiens
MGFSSELCSPQGHGVLQQMQEAELRLLEGMRKWMAQRVKSDREYAGLLHHMSLQDSGGQSRAISPDSPISQSWAEITSQTEGLSRLLRQHAEDLNSGPLSKLSLLIRERQQLRKTYSEQWQQLQQELTKTHSQDIEKLKSQYRALAR

SEQ ID NO: 6205 - protein, 545 aa, Homo sapiens
MGFSSELCSPQGHGVLQQMQEAELRLLEGMRKWMAQRVKSDREYAGLLHHMSLQDSGGQSRAISPDSPISQSWAEITSQTEGLSRLLRQHAEDLNSGPLSKLSLLIRERQQLRKTYSEQWQQLQQELTKTHSQDIEKLKSQYRALARDSAQAKRKYQEASKDKDRDKAKDKYVRSLWKLFAHHNRYVLGVRAAQLHHQHHHQLLLPGLLRSLQDLHEEMACILKEILQEYLEISSLVQDEVVAIHREMAAAAARIQPEAEYQGFLRQYGSAPDVPPCVTFDESLLEEGEPLEPGELQLNELTVESVQHTLTSVTDELAVATEMVFRRQEMVTQLQQELRNEEENTHPRERVQLLGKRQVLQEALQGLQVALCSQAKLQAQQELLQTKLEHLGPGEPPPVLLLQDDRHSTSSSEQEREGGRTPTLEILKSHISGIFRPKFSLPPPLQLIPEVQKPLHEQLWYHGAIPRAEVAELLVHSGDFLVRESQGKQEYVLSVLWDGLPRHFIIQAHAPSEWRLLTPGPLPCRTCTDWKGKAFLAFLCSSTTY

SEQ ID NO: 6206 - protein, 121 aa, Homo sapiens
MGFSSELCSPQGHGVLQQMQEAELRLLEGMRKWMAQRVKSDREYAGLLHHMSLQDSGGQSRAISPDSPISQVGLYGTLVGAGCICLLLPLLGALWGSGWRSGRPMLGSHCAPLPASPICAV

SEQ ID NO: 6207 - protein, 169 aa, Homo sapiens
MGFSSELCSPQGHGVLQQMQEAELRLLEGMRKWMAQRVKSDREYAGLLHHMSLQDSGGQSRAISPDSPISQSWAEITSQTEGLSRLLRQHAEDLNSGPLSKLSLLIRERQQLRKTYSEQWQQLQQELTKTHSQDIEKLKSQYRALARDSAQAKRKYQEASKDKDRDKAK

SEQ ID NO: 6208 - protein, 760 aa, Homo sapiens
MKTWVKIVFGVATSAVLALLVMCIVLRPSRVHNSEENTMRALTLKDILNGTFSYKTFFPNWISGQEYLHQSADNNIVLYNIETGQSYTILSNRTMKSVNASNYGLSPDRQFVYLESDYSKLWRYSYTATYYIYDLSNGEFVRGNELPRPIQYLCWSPVGSKLAYVYQNNIYLKQRPGDPPFQITFNGRENKIFNGIPDWVYEEEMLATKYALWWSPNGKFLAYAEFNDTDIPVIAYSYYGDEQYPRTINIPYPKAGAKNPVVRIFIIDTTYPAYVGPQEVPVPAMIASSDYYFSWLTWVTDERVCLQWLKRVQNVSVLSICDFREDWQTWDCPKTQEHIEESRTGWAGGFFVSTPVFSYDAISYYKIFSDKDGYKHIHYIKDTVENAIQITSGKWEAINIFRVTQDSLFYSSNEFEEYPGRRNIYRISIGSYPPSKKCVTCHLRKERCQYYTASFSDYAKYYALVCYGPGIPISTLHDGRTDQEIKILEENKELENALKNIQLPKEEIKKLEVDEITLWYKMILPPQFDRSKKYPLLIQVYGGPCSQSVRSVFAVNWISYLASKEGMVIALVDGRGTAFQGDKLLYAVYRKLGVYEVEDQITAVRKFIEMGFIDEKRIAIWGWSYGGYVSSLALASGTGLFKCGIAVAPVSSWEYYASVYTERFMGLPTKDDNLEHYKNSTVMARAEYFRNVDYLLIHGTADDNVHFQNSAQIAKALVNAQVDFQAMWYSDQNHGLSGLSTNHLYTHMTHFLKQCFSLSD

SEQ ID NO: 6209 - protein, 735 aa, Homo sapiens
MKTWVKIVFGVATSAVLALLVMCIVLRPSRVHNSEENTMRALTLKDILNGTFSYKTFFPNWISGQEYLHQSADNNIVLYNIETGQSYTILSNRTMLWRYSYTATYYIYDLSNGEFVRGNELPRPIQYLCWSPVGSKLAYVYQNNIYLKQRPGDPPFQITFNGRENKIFNGIPDWVYEEEMLATKYALWWSPNGKFLAYAEFNDTDIPVIAYSYYGDEQYPRTINIPYPKAGAKNPVVRIFIIDTTYPAYVGPQEVPVPAMIASSDYYFSWLTWVTDERVCLQWLKRVQNVSVLSICDFREDWQTWDCPKTQEHIEESRTGWAGGFFVSTPVFSYDAISYYKIFSDKDGYKHIHYIKDTVENAIQITSGKWEAINIFRVTQDSLFYSSNEFEEYPGRRNIYRISIGSYPPSKKCVTCHLRKERCQYYTASFSDYAKYYALVCYGPGIPISTLHDGRTDQEIKILEENKELENALKNIQLPKEEIKKLEVDEITLWYKMILPPQFDRSKKYPLLIQVYGGPCSQSVRSVFAVNWISYLASKEGMVIALVDGRGTAFQGDKLLYAVYRKLGVYEVEDQITAVRKFIEMGFIDEKRIAIWGWSYGGYVSSLALASGTGLFKCGIAVAPVSSWEYYASVYTERFMGLPTKDDNLEHYKNSTVMARAEYFRNVDYLLIHGTADDNVHFQNSAQIAKALVNAQVDFQAMWYSDQNHGLSGLSTNHLYTHMTHFLKQCFSLSD

SEQ ID NO: 6210 - protein, 155 aa, Homo sapiens
MAEGEITTFTALTEKFNLPPGNYKKPKLLYCSNGGHFLRILPDGTVDGTRDRSDQHIQLQLSAESVGEVYIKSTETGQYLAMDTDGLLYGSQTPNEECLFLERLEENHYNTYISKKHAEKNWFVGLKKNGSCKRGPRTHYGQKAILFLPLPVSSD

SEQ ID NO: 6211 - protein, 155 aa, Homo sapiens; identical to SEQ ID NO: 6210

SEQ ID NO: 6212 - protein, 155 aa, Homo sapiens; identical to SEQ ID NO: 6210

SEQ ID NO: 6213 - protein, 58 aa, Homo sapiens
MAEGEITTFTALTEKFNLPPGNYKKPKLLYCSNGGHFLRILPDGTVDGTRDRSDQHIQ

SEQ ID NO: 6214 - protein, 41 aa, Homo sapiens
MAEGEITTFTALTEKFNLPPGNYKKPKLLYCSNGGHFLRIL

SEQ ID NO: 6215 - protein, 155 aa, Homo sapiens; identical to SEQ ID NO: 6210

SEQ ID NO: 6216 - protein, 155 aa, Homo sapiens; identical to SEQ ID NO: 6210

SEQ ID NO: 6217 - protein, 60 aa, Homo sapiens
MAEGEITTFTALTEKFNLPPGNYKKPKLLYCSNGGHFLRILPDGTVDGTRDRSDQHTDTK

SEQ ID NO: 6218 - protein, 208 aa, Homo sapiens
MWKWILTHCASAFPHLPGCCCCCFLLLFLVSSVPVTCQALGQDMVSPEATNSSSSSFSSPSSAGRHVRSYNHLQGDVRWRKLFSFTKYFLKIEKNGKVSGTKKENCPYSILEITSVEIGVVAVKAINSNYYLAMNKKGKLYGSKEFNNDCKLKERIEENGYNTYASFNWQHNGRQMYVALNGKGAPRRGQKTRRKNTSAHFLPMVVHS

SEQ ID NO: 6219 - protein, 66 aa, Homo sapiens
MWKWILTHCASAFPHLPGCCCCCFLLLFLVSSVPVTCQALGQDMVSPEATNSSSSSFSSPSSAGRH

SEQ ID NO: 6220 - protein, 288 aa, Homo sapiens
LVGVGGGDVEDVTPRPGGCQISGRGARGCNGIPGAAAWEAALPRRRPRRHPSVNPRSRAAGSPRTRGRRTEERPSGSRLGDRGRGRALPGGRLGGRGRGRAPERVGGRGRGRGTAAPRAAPAARGSRPGPAGTMAAGSITTLPALPEDGGSGAFPPGHFKDPKRLYCKNGGFFLRIHPDGRVDGVREKSDPHIKLQLQAEERGVVSIKGVCANRYLAMKEDGRLLASKCVTDECFFFERLESNNYNTYRSRKYTSWYVALKRTGQYKLGSKTGPGQKAILFLPMSAKS

SEQ ID NO: 6221 - protein, 194 aa, Homo sapiens
MHKWILTWILPTLLYRSCFHIICLVGTISLACNDMTPEQMATNVNCSSPERHTRSYDYMEGGDIRVRRLFCRTQWYLRIDKRGKVKGTQEMKNNYNIMEIRTVAVGIVAIKGVESEFYLAMNKEGKLYAKKECNEDCNFKELILENHYNTYASAKWTHNGGEMFVALNQKGIPVRGKKTKKEQKTAHFLPMAIT

SEQ ID NO: 6222 - protein, 194 aa, Homo sapiens; identical to SEQ ID NO: 6221

SEQ ID NO: 6223 - protein, 234 aa, Homo sapiens [sequence omitted]

SEQ ID NO: 6224 - protein, 234 aa, Homo sapiens [sequence omitted]

SEQ ID NO: 6225 - protein, 806 aa, Homo sapiens
MGAPACALALCVAVAIVAGASSESLGTEQRVVGRAAEVPGPEPGQQEQLVFGSGDAVELSCPPPGGGPMGPTVWVKDGTGLVPSERVLVGPQRLQVLNASHEDSGAYSCRQRLTQRVLCHFSVRVTDAPSSGDDEDGEDEAEDTGVDTGAPYWTRPERMDKKLLAVPAANTVRFRCPAAGNPTPSISWLKNGREFRGEHRIGGIKLRHQQWSLVMESVVPSDRGNYTCVVENKFGSIRQTYTLDVLERSPHRPILQAGLPANQTAVLGSDVEFHCKVYSDAQPHIQWLKHVEVNGSKVGPDGTPYVTVLKTAGANTTDKELEVLSLHNVTFEDAGEYTCLAGNSIGFSHHSAWLVVLPAEEELVEADEAGSVYAGILSYGVGFFLFILVVAAVTLCRLRSPPKKGLGSPTVHKISRFPLKRQVSLESNASMSSNTPLVRIARLSSGEGPTLANVSELELPADPKWELSRARLTLGKPLGEGCFGQVVMAEAIGIDKDRAAKPVTVAVKMLKDDATDKDLSDLVSEMEMMKMIGKHKNIINLLGACTQGGPLYVLVEYAAKGNLREFLRARRPPGLDYSFDTCKPPEEQLTFKDLVSCAYQVARGMEYLASQKCIHRDLAARNVLVTEDNVMKIADFGLARDVHNLDYYKKTTNGRLPVKWMAPEALFDRVYTHQSDVWSFGVLLWEIFTLGGSPYPGIPVEELFKLLKEGHRMDKPANCTHDLYMIMRECWHAAPSQRPTFKQLVEDLDRVLTVTSTDEYLDLSAPFEQYSPGGQDTPSSSSSGDDSVFAHDLLPPAPPSSGGSRT

SEQ ID NO: 6226 - protein, 170 aa, Homo sapiens
EYLDLSAPFEQYSPGGQDTPSSSSSGDDSVFAHDLLATGPQQCEGSLAAHPAAGAQPLPGMRLSADGETATQSFGLCVCVCVCVCCTSACACVRAHLASRCRGTLGVPAAVQRSPDWCCSTEGPLFWGDPVQNVSGPTRWDPGQGAGPDMRPLPLHHGTSQGLGPSHTQS

SEQ ID NO: 6227 - protein, 808 aa, Homo sapiens
MGAPACALALCVAVAIVAGASSESLGTEQRVVGRAAEVPGPEPGQQEQLVFGSGDAVELSCPPPGGGPMGPTVWVKDGTGLVPSERVLVGPQRLQVLNASHEDSGAYSCRQRLTQRVLCHFSVRVTDAPSSGDDEDGEDEAEDTGVDTGAPYWTRPERMDKKLLAVPAANTVRFRCPAAGNPTPSISWLKNGREFRGEHRIGGIKLRHQQWSLVMESVVPSDRGNYTCVVENKFGSIRQTYTLDVLERSPHRPILQAGLPANQTAVLGSDVEFHCKVYSDAQPHIQWLKHVEVNGSKVGPDGTPYVTVLKSWISESVEADVRLRLANVSERDGGEYLCRATNFIGVAEKAFWLSVHGPRAAEEELVEADEAGSVYAGILSYGVGFFLFILVVAAVTLCRLRSPPKKGLGSPTVHKISRFPLKRQVSLESNASMSSNTPLVRIARLSSGEGPTLANVSELELPADPKWELSRARLTLGKPLGEGCFGQVVMAEAIGIDKDRAAKPVTVAVKMLKDDATDKDLSDLVSEMEMMKMIGKHKNIINLLGACTQGGPLYVLVEYAAKGNLREFLRARRPPGLDYSFDTCKPPEEQLTFKDLVSCAYQVARGMEYLASQKCIHRDLAARNVLVTEDNVMKIADFGLARDVHNLDYYKKTTNGRLPVKWMAPEALFDRVYTHQSDVWSFGVLLWEIFTLGGSPYPGIPVEELFKLLKEGHRMDKPANCTHDLYMIMRECWHAAPSQRPTFKQLVEDLDRVLTVTSTDEYLDLSAPFEQYSPGGQDTPSSSSSGDDSVFAHDLLPPAPPSSGGSRT

SEQ ID NO: 6228 - protein, 694 aa, Homo sapiens
MGAPACALALCVAVAIVAGASSESLGTEQRVVGRAAEVPGPEPGQQEQLVFGSGDAVELSCPPPGGGPMGPTVWVKDGTGLVPSERVLVGPQRLQVLNASHEDSGAYSCRQRLTQRVLCHFSVRVTDAPSSGDDEDGEDEAEDTGVDTGAPYWTRPERMDKKLLAVPAANTVRFRCPAAGNPTPSISWLKNGREFRGEHRIGGIKLRHQQWSLVMESVVPSDRGNYTCVVENKFGSIRQTYTLDVLERSPHRPILQAGLPANQTAVLGSDVEFHCKVYSDAQPHIQWLKHVEVNGSKVGPDGTPYVTVLKVSLESNASMSSNTPLVRIARLSSGEGPTLANVSELELPADPKWELSRARLTLGKPLGEGCFGQVVMAEAIGIDKDRAAKPVTVAVKMLKDDATDKDLSDLVSEMEMMKMIGKHKNIINLLGACTQGGPLYVLVEYAAKGNLREFLRARRPPGLDYSFDTCKPPEEQLTFKDLVSCAYQVARGMEYLASQKCIHRDLAARNVLVTEDNVMKIADFGLARDVHNLDYYKKTTNGRLPVKWMAPEALFDRVYTHQSDVWSFGVLLWEIFTLGGSPYPGIPVEELFKLLKEGHRMDKPANCTHDLYMIMRECWHAAPSQRPTFKQLVEDLDRVLTVTSTDEYLDLSAPFEQYSPGGQDTPSSSSSGDDSVFAHDLLPPAPPSSGGSRT

SEQ ID NO: 6229 - protein, 806 aa, Homo sapiens; identical to SEQ ID NO: 6225

SEQ ID NO: 6230 - protein, 792 aa, Homo sapiens
MGAPACALALCVAVAIVAGASSESLGTEQRVVGRAAEVPGPEPGQQEQLVFGSGDAVELSCPPPGGGPMGPTVWVKDGTGLVPSERVLVGPQRLQVLNASHEDSGAYSCRQRLTQRVLCHFSVRVTDAPSSGDDEDGEDEAEDTGVDTGAPYWTRPERMDKKLLAVPAANTVRFRCPAAGNPTPSISWLKNGREFRGEHRIGGIKLRHQQWSLVMESVVPSDRGNYTCVVENKFGSIRQTYTLDVLERSPHRPILQAGLPANQTAVLGSDVEFHCKVYSDAQPHIQWLKHVEVNGSKVGPDGTPYVTVLKTAGANTTDKELEVLSLHNVTFEDAGEYTCLAGNSIGFSHHSAWLVVLPAEEELVEADEAGSVYAGILSYGVGFFLFILVVAAVTLCRLRSPPKKGLGSPTVHKISRFPLKRQQVSLESNASMSSNTPLVRIARLSSGEGPTLANVSELELPADPKWELSRARLTLGKPLGEGCFGQVVMAEAIGIDKDRAAKPVTVAVKMLKDDATDKDLSDLVSEMEMMKMIGKHKNIINLLGACTQGGPLYVLVEYAAKGNLREFLRARRPPGLDYSFDTCKPPEEQLTFKDLVSCAYQVARGMEYLASQKCIHRDLAARNVLVTEDNVMKIADFGLARDVHNLDYYKKTTNLVLWGPALGDLHAGGLPVPRHPCGGALQAAEGGPPHGQARQLHTRPVHDHAGVLACRALPEAHLQAAGGGPGPCPYRDVHRRVPGPVGAFRAVLPGWPGHPQLQLLRGRLRVCPRPAAPGPTQQWGLADVKGHWSPTM

SEQ ID NO: 6231 - protein, 802 aa, Homo sapiens
MRLLLALLGVLLSVPGPPVLSLEASEEVELEPCLAPSLEQQEQELTVALGQPVRLCCGRAERGGHWYKEGSRLAPAGRVRGWRGRLEIASFLPEDAGRYLCLARGSMIVLQNLTLITGDSLTSSNDDEDPKSHRDPSNRHSYPQQAPYWTHPQRMEKKLHAVPAGNTVKFRCPAAGNPTPTIRWLKDGQAFHGENRIGGIRLRHQHWSLVMESVVPSDRGTYTCLVENAVGSIRYNYLLDVLERSPHRPILQAGLPANTTAVVGSDVELLCKVYSDAQPHIQWLKHIVINGSSFGADGFPYVQVLKTADINSSEVEVLYLRNVSAEDAGEYTCLAGNSIGLSYQSAWLTVLPEEDPTWTAAAPEARYTDIILYASGSLALAVLLLLAGLYRGQALHGRHPRPPATVQKLSRFPLARQFSLESGSSGKSSSSLVRGVRLSSSGPALLAGLVSLDLPLDPLWEFPRDRLVLGKPLGEGCFGQVVRAEAFGMDPARPDQASTVAVKMLKDNASDKDLADLVSEMEVMKLIGRHKNIINLLGVCTQEGPLYVIVECAAKGNLREFLRARRPPGPDLSPDGPRSSEGPLSFPVLVSCAYQVARGMQYLESRKCIHRDLAARNVLVTEDNVMKIADFGLARGVHHIDYYKKTSNGRLPVKWMAPEALFDRVYTHQSDVWSFGILLWEIFTLGGSPYPGIPVEELFSLLREGHRMDRPPHCPPELYGLMRECWHAAPSQRPTFKQLVEALDKVLLAVSEEYLDLRLTFGPYSPSGGDASSTCSSSDSVFSHDPLPLGSSSFPFGSGVQT

SEQ ID NO: 6232 - protein, 762 aa, Homo sapiens
MRLLLALLGVLLSVPGPPVLSLEASEEVELEPCLAPSLEQQEQELTVALGQPVRLCCGRAERGGHWYKEGSRLAPAGRVRGWRGRLEIASFLPEDAGRYLCLARGSMIVLQNLTLITGDSLTSSNDDEDPKSHRDPSNRHSYPQQAPYWTHPQRMEKKLHAVPAGNTVKFRCPAAGNPTPTIRWLKDGQAFHGENRIGGIRLRHQHWSLVMESVVPSDRGTYTCLVENAVGSIRYNYLLDVLERSPHRPILQAGLPANTTAVVGSDVELLCKVYSDAQPHIQWLKHIVINGSSFGADGFPYVQVLKTADINSSEVEVLYLRNVSAEDAGEYTCLAGNSIGLSYQSAWLTVLPGTGRIPHLTCDSLTPAGRTKSPTLQFSLESGSSGKSSSSLVRGVRLSSSGPALLAGLVSLDLPLDPLWEFPRDRLVLGKPLGEGCFGQVVRAEAFGMDPARPDQASTVAVKMLKDNASDKDLADLVSEMEVMKLIGRHKNIINLLGVCTQEGPLYVIVECAAKGNLREFLRARRPPGPDLSPDGPRSSEGPLSFPVLVSCAYQVARGMQYLESRKCIHRDLAARNVLVTEDNVMKIADFGLARGVHHIDYYKKTSNGRLPVKWMAPEALFDRVYTHQSDVWSFGILLWEIFTLGGSPYPGIPVEELFSLLREGHRMDRPPHCPPELYGLMRECWHAAPSQRPTFKQLVEALDKVLLAVSEEYLDLRLTFGPYSPSGGDASSTCSSSDSVFSHDPLPLGSSSFPFGSGVQT

SEQ ID NO: 6233 - protein, 1030 aa, Homo sapiens
PCMWHQQHVPCVCVCPYVCVCMRVCVCVCWPLSCALNAVCVTCPKSVAFALGVASAACGCVGVKEWWLLQHALQSACALHVRCVLCTQEAASDGAAGSADLCPLPTEPCLAPSLEQQEQELTVALGQPVRLCCGRAERGGHWYKEGSRLAPAGRVRGWRGRLEIASFLPEDAGRYLCLARGSMIVLQNLTLITGDSPPATMMRTPSPIGTPRIGTVTPSKVSRSPRTCVPAAAHLITEKRRPVWEHTVILGAFPCPPAPYWTHPQRMEKKLHAVPAGNTVKFRCPAAGNPTPTIRWLKDGQAFHGENRIGGIRLRHQHWSLVMESVVPSDRGTYTCLVENAVGSIRYNYLLDVLERSPHRPILQAGLPANTTAVVGSDVELLCKVYSDAQPHIQWLKHIVINGSSFGADGFPYVQVLKTADINSSEVEVLYLRNVSAEDAGEYTCLAGNSIGLSYQSAWLTVLPGEHLKGQEMLRDAPLGQQWGLWPVGWSVSVGLWGLAWGAVCGFVGLSCMTAPLCLSTRGRPCDRLLRCGCLGLGITTASSVCVPTYVGSWEGLGCTGRPVSPLTSLSVCVCPCARAEEDPTWTAAAPEARYTDIILYASGSLALAVLLLLAGLYRGQALHGRHPRPPATVQKLSRFPLARQFSLESGSSGKSSSSLVRGVRLSSSGPALLAGLVSLDLPLDPLWEFPRDRLVLGKPLGEGCFGQVVRAEAFGMDPARPDQASTVAVKMLKDNASDKDLADLVSEMEVMKLIGRHKNIINLLGVCTQEGPLYVIVECAAKGNLREFLRARRPPGPDLSPDGPRSSEGPLSFPVLVSCAYQVARGMQYLESRKCIHRDLAARNVLVTEDNVMKIADFGLARGVHHIDYYKKTSNGRLPVKWMAPEALFDRVYTHQSDVWSFGILLWEIFTLGGSPYPGIPVEELFSLLREGHRMDRPPHCPPELYGLMRECWHAAPSQRPTFKQLVEALDKVLLAVSEEYLDLRLTFGPYSPSGGDASSTCSSSDSVFSHDPLPLGSSSFPFGSGVQT

SEQ ID NO: 6234 - protein, 762 aa, Homo sapiens; identical to SEQ ID NO: 6232

SEQ ID NO: 6235 - protein, 802 aa, Homo sapiens; identical to SEQ ID NO: 6231

SEQ ID NO: 6236 - protein, 201 aa, Homo sapiens
MRLLLALLGVLLSVPGPPVLSLEASEEVELEPCLAPSLEQQEQELTVALGQPVRLCCGRAERGGHWYKEGSRLAPAGRVRGWRGRLEIASFLPEDAGRYLCLARGSMIVLQNLTLITGDSLTSSNDDEDPKSHRDPSNRHSYPQQAPYWTHPQRMEKKLHAVPAGNTVKFRCPAAGNPTPTIRWLKDGQAFHGENRIGGIR

SEQ ID NO: 6237 - protein, 87 aa, Homo sapiens
MRLLLALLGVLLSVPGPPVLSLEASEEVELEPCLAPSLEQQEQELTVALGQPVRLCCGRAERGGHWYKEGSRLAPAGRVRGWRGRLE

SEQ ID NO: 6238 - protein, 108 aa, Homo sapiens
MRLLLALLGVLLSVPGPPVLSLEASEEVELEPCLAPSLEQQEQELTVALGQPVRLCCGRAERGGHWYKEGSRLAPAGRVRGWRGRLEIASFLPEDAGRYLCLARGSMI

SEQ ID NO: 6239 - protein, 114 aa, Homo sapiens
MRLLLALLGVLLSVPGPPVLSLEASEEVELEPCLAPSLEQQEQELTVALGQPVRLCCGRAERGGHWYKEGSRLAPAGRVRGWRGRLEIASFLPEDAGRYLCLARGSMIVLQNLT

SEQ ID NO: 6240 - protein, 2387 aa, Homo sapiens
MLRGPGPGLLLLAVQCLGTAVPSTGASKSKRQAQQMVQPQSPVAVSQSKPGCYDNGKHYQINQQWERTYLGNALVCTCYGGSRGFNCESKPEAEETCFDKYTGNTYRVGDTYERPKDSMIWDCTCIGAGRGRISCTIANRCHEGGQSYKIGDTWRRPHETGGYMLECVCLGNGKGEWTCKPIAEKCFDHAAGTSYVVGETWEKPYQGWMMVDCTCLGEGSGRITCTSRNRCNDQDTRTSYRIGDTWSKKDNRGNLLQCICTGNGRGEWKCERHTSVQTTSSGSGPFTDVRAAVYQPQPHPQPPPYGHCVTDSGVVYSVGMQWLKTQGNKQMLCTCLGNGVSCQETAVTQTYGGNSNGEPCVLPFTYNGRTFYSCTTEGRQDGHLWCSTTSNYEQDQKYSFCTDHTVLVQTRGGNSNGALCHFPFLYNNHNYTDCTSEGRRDNMKWCGTTQNYDADQKFGFCPMAAHEEICTTNEGVMYRIGDQWDKQHDMGHMMRCTCVGNGRGEWTCIAYSQLRDQCIVDDITYNVNDTFHKRHEEGHMLNCTCFGQGRGRWKCDPVDQCQDSETGTFYQIGDSWEKYVHGVRYQCYCYGRGIGEWHCQPLQTYPSSSGPVEVFITETPSQPNSHPIQWNAPQPSHISKYILRWRPKNSVGRWKEATIPGHLNSYTIKGLKPGVVYEGQLISIQQYGHQEVTRFDFTTTSTSTPVTSNTVTGETTPFSPLVATSESVTEITASSFVVSWVSASDTVSGFRVEYELSEEGDEPQYLDLPSTATSVNIPDLLPGRKYIVNVYQISEDGEQSLILSTSQTTAPDAPPDTTVDQVDDTSIVVRWSRPQAPITGYRIVYSPSVEGSSTELNLPETANSVTLSDLQPGVQYNITIYAVEENQESTPVVIQQETTGTPRSDTVPSPRDLQFVEVTDVKVTIMWTPPESAVTGYRVDVIPVNLPGEHGQRLPISRNTFAEVTGLSPGVTYYFKVFAVSHGRESKPLTAQQTTKLDAPTNLQFVNETDSTVLVRWTPPRAQITGYRLTVGLTRRGQPRQYNVGPSVSKYPLRNLQPASEYTVSLVAIKGNQESPKATGVFTTLQPGSSIPPYNTEVTETTIVITWTPAPRIGFKLGVRPSQGGEAPREVTSDSGSIVVSGLTPGVEYVYTIQVLRDGQERDAPIVNKVVTPLSPPTNLHLEANPDTGVLTVSWERSTTPDITGYRITTTPTNGQQGNSLEEVVHADQSSCTFDNLSPGLEYNVSVYTVKDDKESVPISDTIIPEVPQLTDLSFVDITDSSIGLRWTPLNSSTIIGYRITVVAAGEGIPIFEDFVDSSVGYYTVTGLEPGIDYDISVITLINGGESAPTTLTQQTAVPPPTDLRFFSDITANSFTVHWIAPRATITGYRIRHHPEHFSGRPREDRVPHSRNSITLTNLTPGTEYVVSIVALNGREESPLLIGQQSTVSDVPRDLEVVAATPTSLLISWDAPAVTVRYYRITYGETGGNSPVQEFTVPGSKSTATISGLKPGVDYTITVYAVTGRGDSPASSKPISINYRTEIDKPSQMQVTDVQDNSISVKWLPSSSPVTGYRVTTTPKNGPGPTKTKTAGPDQTEMTIEGLQPTVEYVVSVYAQNPSGESQPLVQTAVTNIDRPKGLAFTDVDVDSIKIAWESPQGQVSRYRVTYSSPEDGIHELFPAPDGEEDTAELQGLRPGSEYTVSVVALHDDMESQPLIGTQSTAIPAPTDLKFTQVTPTSLSAQWTPPNVQLTGYRVRVTPKEKTGPMKEINLAPDSSSVVVSGLMVATKYEVSVYALKDTLTSRPAQGVVTTLENVSPPRRARVTDATETTITISWRTKTETITGFQVDAVPANGQTPIQRTIKPDVRSYTITGLQPGTDYKIYLYTLNDNARSSPVVIDASTAIDAPSNLRFLATTPNSLLVSWQPPRARITGYIIKYEKPGSPPREVVPRPRPGVTEATITGLEPGTEYTIYVIALKNNQKSEPLIGRKKTDELPQLVTLPHPNLHGPEILDVPSTVQKTPFVTHPGYDTGNGIQLPGTSGQQPSVGQQMIFEEHGFRRTTPPTTATPIRHRPRPYPPNVGEEIQIGHIPREDVDYHLYPHGPGLNPNASTGQEALSQTTISWAPFQDTSEYIISCHPVGTDEEPLQFRVPGTSTSATLTGLTRGATYNVIVEALKDQQRHKVREEVVTVGNSVNEGLNQPTDDSCFDPYTVSHYAVGDEWERMSESGFKLLCQCLGFGSGHFRCDSSRWCHDNGVNYKIGEKWDRQGENGQMMSCTCLGNGKGEFKCDPHEATCYDDGKTYHVGEQWQKEYLGAICSCTCFGGQRGWRCDNCRRPGGEPSPEGTTGQSYNQYSQRYHQRTNTNVNCPIECFMPLDVQADREDSRE

SEQ ID NO: 6241 - protein, 2446 aa, Homo sapiens
MLRGPGPGLLLLAVQCLGTAVPSTGASKSKRQAQQMVQPQSPVAVSQSKPGCYDNGKHYQINQQWERTYLGNALVCTCYGGSRGFNCESKPEAEETCFDKYTGNTYRVGDTYERPKDSMIWDCTCIGAGRGRISCTIANRCHEGGQSYKIGDTWRRPHETGGYMLECVCLGNGKGEWTCKPIAEKCFDHAAGTSYVVGETWEKPYQGWMMVDCTCLGEGSGRITCTSRNRCNDQDTRTSYRIGDTWSKKDNRGNLLQCICTGNGRGEWKCERHTSVQTTSSGSGPFTDVRAAVYQPQPHPQPPPYGHCVTDSGVVYSVGMQWLKTQGNKQMLCTCLGNGVSCQETAVTQTYGGNSNGEPCVLPFTYNGRTFYSCTTEGRQDGHLWCSTTSNYEQDQKYSFCTDHTVLVQTRGGNSNGALCHFPFLYNNHNYTDCTSEGRRDNMKWCGTTQNYDADQKFGFCPMAAHEEICTTNEGVMYRIGDQWDKQHDMGHMMRCTCVGNGRGEWTCIAYSQLRDQCIVDDITYNVNDTFHKRHEEGHMLNCTCFGQGRGRWKCDPVDQCQDSETGTFYQIGDSWEKYVHGVRYQCYCYGRGIGEWHCQPLQTYPSSSGPVEVFITETPSQPNSHPIQWNAPQPSHISKYILRWRPKNSVGRWKEATIPGHLNSYTIKGLKPGVVYEGQLISIQQYGHQEVTRFDFTTTSTSTPVTSNTVTGETTPFSPLVATSESVTEITASSFVVSWVSASDTVSGFRVEYELSEEGDEPQYLDLPSTATSVNIPDLLPGRKYIVNVYQISEDGEQSLILSTSQTTAPDAPPDTTVDQVDDTSIVVRWSRPQAPITGYRIVYSPSVEGSSTELNLPETANSVTLSDLQPGVQYNITIYAVEENQESTPVVIQQETTGTPRSDTVPSPRDLQFVEVTDVKVTIMWTPPESAVTGYRVDVIPVNLPGEHGQRLPISRNTFAEVTGLSPGVTYYFKVFAVSHGRESKPLTAQQTTKLDAPTNLQFVNETDSTVLVRWTPPRAQITGYRLTVGLTRRGQPRQYNVGPSVSKYPLRNLQPASEYTVSLVAIKGNQESPKATGVFTTLQPGSSIPPYNTEVTETTIVITWTPAPRIGFKLGVRPSQGGEAPREVTSDSGSIVVSGLTPGVEYVYTIQVLRDGQERDAPIVNKVVTPLSPPTNLHLEANPDTGVLTVSWERSTTPDITGYRITTTPTNGQQGNSLEEVVHADQSSCTFDNLSPGLEYNVSVYTVKDDKESVPISDTIIPEVPQLTDLSFVDITDSSIGLRWTPLNSSTIIGYRITVVAAGEGIPIFEDFVDSSVGYYTVTGLEPGIDYDISVITLINGGESAPTTLTQQTAVPPPTDLRFTNIGPDTMRVTWAPPPSIDLTNFLVRYSPVKNEEDVAELSISPSDNAVVLTNLLPGTEYVVSVSSVYEQHESTPLRGRQKTGLDSPTGIDFSDITANSFTVHWIAPRATITGYRIRHHPEHFSGRPREDRVPHSRNSITLTNLTPGTEYVVSIVALNGREESPLLIGQQSTVSDVPRDLEVVAATPTSLLISWDAPAVTVRYYRITYGETGGNSPVQEFTVPGSKSTATISGLKPGVDYTITVYAVTGRGDSPASSKPISINYRTEIDKPSQMQVTDVQDNSISVKWLPSSSPVTGYRVTTTPKNGPGPTKTKTAGPDQTEMTIEGLQPTVEYVVSVYAQNPSGESQPLVQTAVTNIDRPKGLAFTDVDVDSIKIAWESPQGQVSRYRVTYSSPEDGIHELFPAPDGEEDTAELQGLRPGSEYTVSVVALHDDMESQPLIGTQSTAIPAPTDLKFTQVTPTSLSAQWTPPNVQLTGYRVRVTPKEKTGPMKEINLAPDSSSVVVSGLMVATKYEVSVYALKDTLTSRPAQGVVTTLENVSPPRRARVTDATETTITISWRTKTETITGFQVDAVPANGQTPIQRTIKPDVRSYTITGLQPGTDYKIYLYTLNDNARSSPVVIDASTAIDAPSNLRFLATTPNSLLVSWQPPRARITGYIIKYEKPGSPPREVVPRPRPGVTEATITGLEPGTEYTIYVIALKNNQKSEPLIGRKKTDELPQLVTLPHPNLHGPEILDVPSTVQKTPFVTHPGYDTGNGIQLPGTSGQQPSVGQQMIFEEHGFRRTTPPTTATPIRHRPRPYPPNVGQEALSQTTISWAPFQDTSEYIISCHPVGTDEEPLQFRVPGTSTSATLTGLTRGATYNVIVEALKDQQRHKVREEVVTVGNSVNEGLNQPTDDSCFDPYTVSHYAVGDEWERMSESGFKLLCQCLGFGSGHFRCDSSRWCHDNGVNYKIGEKWDRQGENGQMMSCTCLGNGKGEFKCDPHEATCYDDGKTYHVGEQWQKEYLGAICSCTCFGGQRGWRCDNCRRPGGEPSPEGTTGQSYNQYSQRYHQRTNTNVNCPIECFMPLDVQADREDSRE

SEQ ID NO: 6242 - protein, 2355 aa, Homo sapiens
MLRGPGPGLLLLAVQCLGTAVPSTGASKSKRQAQQMVQPQSPVAVSQSKPGCYDNGKHYQINQQWERTYLGNALVCTCYGGSRGFNCESKPEAEETCFDKYTGNTYRVGDTYERPKDSMIWDCTCIGAGRGRISCTIANRCHEGGQSYKIGDTWRRPHETGGYMLECVCLGNGKGEWTCKPIAEKCFDHAAGTSYVVGETWEKPYQGWMMVDCTCLGEGSGRITCTSRNRCNDQDTRTSYRIGDTWSKKDNRGNLLQCICTGNGRGEWKCERHTSVQTTSSGSGPFTDVRAAVYQPQPHPQPPPYGHCVTDSGVVYSVGMQWLKTQGNKQMLCTCLGNGVSCQETAVTQTYGGNSNGEPCVLPFTYNGRTFYSCTTEGRQDGHLWCSTTSNYEQDQKYSFCTDHTVLVQTRGGNSNGALCHFPFLYNNHNYTDCTSEGRRDNMKWCGTTQNYDADQKFGFCPMAAHEEICTTNEGVMYRIGDQWDKQHDMGHMMRCTCVGNGRGEWTCIAYSQLRDQCIVDDITYNVNDTFHKRHEEGHMLNCTCFGQGRGRWKCDPVDQCQDSETGTFYQIGDSWEKYVHGVRYQCYCYGRGIGEWHCQPLQTYPSSSGPVEVFITETPSQPNSHPIQWNAPQPSHISKYILRWRPKNSVGRWKEATIPGHLNSYTIKGLKPGVVYEGQLISIQQYGHQEVTRFDFTTTSTSTPVTSNTVTGETTPFSPLVATSESVTEITASSFVVSWVSASDTVSGFRVEYELSEEGDEPQYLDLPSTATSVNIPDLLPGRKYIVNVYQISEDGEQSLILSTSQTTAPDAPPDTTVDQVDDTSIVVRWSRPQAPITGYRIVYSPSVEGSSTELNLPETANSVTLSDLQPGVQYNITIYAVEENQESTPVVIQQETTGTPRSDTVPSPRDLQFVEVTDVKVTIMWTPPESAVTGYRVDVIPVNLPGEHGQRLPISRNTFAEVTGLSPGVTYYFKVFAVSHGRESKPLTAQQTTKLDAPTNLQFVNETDSTVLVRWTPPRAQITGYRLTVGLTRRGQPRQYNVGPSVSKYPLRNLQPASEYTVSLVAIKGNQESPKATGVFTTLQPGSSIPPYNTEVTETTIVITWTPAPRIGFKLGVRPSQGGEAPREVTSDSGSIVVSGLTPGVEYVYTIQVLRDGQERDAPIVNKVVTPLSPPTNLHLEANPDTGVLTVSWERSTTPDITGYRITTTPTNGQQGNSLEEVVHADQSSCTFDNLSPGLEYNVSVYTVKDDKESVPISDTIIPAVPPPTDLRFTNIGPDTMRVTWAPPPSIDLTNFLVRYSPVKNEEDVAELSISPSDNAVVLTNLLPGTEYVVSVSSVYEQHESTPLRGRQKTGLDSPTGIDFSDITANSFTVHWIAPRATITGYRIRHHPEHFSGRPREDRVPHSRNSITLTNLTPGTEYVVSIVALNGREESPLLIGQQSTVSDVPRDLEVVAATPTSLLISWDAPAVTVRYYRITYGETGGNSPVQEFTVPGSKSTATISGLKPGVDYTITVYAVTGRGDSPASSKPISINYRTEIDKPSQMQVTDVQDNSISVKWLPSSSPVTGYRVTTTPKNGPGPTKTKTAGPDQTEMTIEGLQPTVEYVVSVYAQNPSGESQPLVQTAVTNIDRPKGLAFTDVDVDSIKIAWESPQGQVSRYRVTYSSPEDGIHELFPAPDGEEDTAELQGLRPGSEYTVSVVALHDDMESQPLIGTQSTAIPAPTDLKFTQVTPTSLSAQWTPPNVQLTGYRVRVTPKEKTGPMKEINLAPDSSSVVVSGLMVATKYEVSVYALKDTLTSRPAQGVVTTLENVSPPRRARVTDATETTITISWRTKTETITGFQVDAVPANGQTPIQRTIKPDVRSYTITGLQPGTDYKIYLYTLNDNARSSPVVIDASTAIDAPSNLRFLATTPNSLLVSWQPPRARITGYIIKYEKPGSPPREVVPRPRPGVTEATITGLEPGTEYTIYVIALKNNQKSEPLIGRKKTDELPQLVTLPHPNLHGPEILDVPSTVQKTPFVTHPGYDTGNGIQLPGTSGQQPSVGQQMIFEEHGFRRTTPPTTATPIRHRPRPYPPNVGQEALSQTTISWAPFQDTSEYIISCHPVGTDEEPLQFRVPGTSTSATLTGLTRGATYNVIVEALKDQQRHKVREEVVTVGNSVNEGLNQPTDDSCFDPYTVSHYAVGDEWERMSESGFKLLCQCLGFGSGHFRCDSSRWCHDNGVNYKIGEKWDRQGENGQMMSCTCLGNGKGEFKCDPHEATCYDDGKTYHVGEQWQKEYLGAICSCTCFGGQRGWRCDNCRRPGGEPSPEGTTGQSYNQYSQRYHQRTNTNVNCPIECFMPLDVQADREDSRE

SEQ ID NO: 6243 - protein, 2184 aa, Homo sapiens
MLRGPGPGLLLLAVQCLGTAVPSTGASKSKRQAQQMVQPQSPVAVSQSKPGCYDNGKHYQINQQWERTYLGNALVCTCYGGSRGFNCESKPEAEETCFDKYTGNTYRVGDTYERPKDSMIWDCTCIGAGRGRISCTIANRCHEGGQSYKIGDTWRRPHETGGYMLECVCLGNGKGEWTCKPIAEKCFDHAAGTSYVVGETWEKPYQGWMMVDCTCLGEGSGRITCTSRNRCNDQDTRTSYRIGDTWSKKDNRGNLLQCICTGNGRGEWKCERHTSVQTTSSGSGPFTDVRAAVYQPQPHPQPPPYGHCVTDSGVVYSVGMQWLKTQGNKQMLCTCLGNGVSCQETAVTQTYGGNSNGEPCVLPFTYNGRTFYSCTTEGRQDGHLWCSTTSNYEQDQKYSFCTDHTVLVQTRGGNSNGALCHFPFLYNNHNYTDCTSEGRRDNMKWCGTTQNYDADQKFGFCPMAAHEEICTTNEGVMYRIGDQWDKQHDMGHMMRCTCVGNGRGEWTCIAYSQLRDQCIVDDITYNVNDTFHKRHEEGHMLNCTCFGQGRGRWKCDPVDQCQDSETGTFYQIGDSWEKYVHGVRYQCYCYGRGIGEWHCQPLQTYPSSSGPVEVFITETPSQPNSHPIQWNAPQPSHISKYILRWRPKNSVGRWKEATIPGHLNSYTIKGLKPGVVYEGQLISIQQYGHQEVTRFDFTTTSTSTPVTSNTVTGETTPFSPLVATSESVTEITASSFVVSWVSASDTVSGFRVEYELSEEGDEPQYLDLPSTATSVNIPDLLPGRKYIVNVYQISEDGEQSLILSTSQTTAPDAPPDTTVDQVDDTSIVVRWSRPQAPITGYRIVYSPSVEGSSTELNLPETANSVTLSDLQPGVQYNITIYAVEENQESTPVVIQQETTGTPRSDTVPSPRDLQFVEVTDVKVTIMWTPPESAVTGYRVDVIPVNLPGEHGQRLPISRNTFAEVTGLSPGVTYYFKVFAVSHGRESKPLTAQQTTKLDAPTNLQFVNETDSTVLVRWTPPRAQITGYRLTVGLTRRGQPRQYNVGPSVSKYPLRNLQPASEYTVSLVAIKGNQESPKATGVFTTLQPGSSIPPYNTEVTETTIVITWTPAPRIGFKLGVRPSQGGEAPREVTSDSGSIVVSGLTPGVEYVYTIQVLRDGQERDAPIVNKVVTPLSPPTNLHLEANPDTGVLTVSWERSTTPDITGYRITTTPTNGQQGNSLEEVVHADQSSCTFDNLSPGLEYNVSVYTVKDDKESVPISDTIIPAVPPPTDLRFTNIGPDTMRVTWAPPPSIDLTNFLVRYSPVKNEEDVAELSISPSDNAVVLTNLLPGTEYVVSVSSVYEQHESTPLRGRQKTGLDSPTGIDFSDITANSFTVHWIAPRATITGYRIRHHPEHFSGRPREDRVPHSRNSITLTNLTPGTEYVVSIVALNGREESPLLIGQQSTVSDVPRDLEVVAATPTSLLISWDAPAVTVRYYRITYGETGGNSPVQEFTVPGSKSTATISGLKPGVDYTITVYAVTGRGDSPASSKPISINYRTEIDKPSQMQVTDVQDNSISVKWLPSSSPVTGYRVTTTPKNGPGPTKTKTAGPDQTEMTIEGLQPTVEYVVSVYAQNPSGESQPLVQTAVTNIDRPKGLAFTDVDVDSIKIAWESPQGQVSRYRVTYSSPEDGIHELFPAPDGEEDTAELQGLRPGSEYTVSVVALHDDMESQPLIGTQSTAIPAPTDLKFTQVTPTSLSAQWTPPNVQLTGYRVRVTPKEKTGPMKEINLAPDSSSVVVSGLMVATKYEVSVYALKDTLTSRPAQGVVTTLENVSPPRRARVTDATETTITISWRTKTETITGFQVDAVPANGQTPIQRTIKPDVRSYTITGLQPGTDYKIYLYTLNDNARSSPVVIDASTAIDAPSNLRFLATTPNSLLVSWQPPRARITGYIIKYEKPGSPPREVVPRPRPGVTEATITGLEPGTEYTIYVIALKNNQKSEPLIGRKKTVNEGLNQPTDDSCFDPYTVSHYAVGDEWERMSESGFKLLCQCLGFGSGHFRCDSSRWCHDNGVNYKIGEKWDRQGENGQMMSCTCLGNGKGEFKCDPHEATCYDDGKTYHVGEQWQKEYLGAICSCTCFGGQRGWRCDNCRRPGGEPSPEGTTGQSYNQYSQRYHQRTNTNVNCPIECFMPLDVQADREDSRE

SEQ ID NO: 6244 - protein, 2211 aa, Homo sapiens
MLRGPGPGLLLLAVQCLGTAVPSTGASKSKRQAQQMVQPQSPVAVSQSKPGCYDNGKHYQINQQWERTYLGNALVCTCYGGSRGFNCESKPEAEETCFDKYTGNTYRVGDTYERPKDSMIWDCTCIGAGRGRISCTIANRCHEGGQSYKIGDTWRRPHETGGYMLECVCLGNGKGEWTCKPIAEKCFDHAAGTSYVVGETWEKPYQGWMMVDCTCLGEGSGRITCTSRNRCNDQDTRTSYRIGDTWSKKDNRGNLLQCICTGNGRGEWKCERHTSVQTTSSGSGPFTDVRAAVYQPQPHPQPPPYGHCVTDSGVVYSVGMQWLKTQGNKQMLCTCLGNGVSCQETAVTQTYGGNSNGEPCVLPFTYNGRTFYSCTTEGRQDGHLWCSTTSNYEQDQKYSFCTDHTVLVQTRGGNSNGALCHFPFLYNNHNYTDCTSEGRRDNMKWCGTTQNYDADQKFGFCPMAAHEEICTTNEGVMYRIGDQWDKQHDMGHMMRCTCVGNGRGEWTCIAYSQLRDQCIVDDITYNVNDTFHKRHEEGHMLNCTCFGQGRGRWKCDPVDQCQDSETGTFYQIGDSWEKYVHGVRYQCYCYGRGIGEWHCQPLQTYPSSSGPVEVFITETPSQPNSHPIQWNAPQPSHISKYILRWRPKNSVGRWKEATIPGHLNSYTIKGLKPGVVYEGQLISIQQYGHQEVTRFDFTTTSTSTPVTSNTVTGETTPFSPLVATSESVTEITASSFVVSWVSASDTVSGFRVEYELSEEGDEPQYLDLPSTATSVNIPDLLPGRKYIVNVYQISEDGEQSLILSTSQTTAPDAPPDTTVDQVDDTSIVVRWSRPQAPITGYRIVYSPSVEGSSTELNLPETANSVTLSDLQPGVQYNITIYAVEENQESTPVVIQQETTGTPRSDTVPSPRDLQFVEVTDVKVTIMWTPPESAVTGYRVDVIPVNLPGEHGQRLPISRNTFAEVTGLSPGVTYYFKVFAVSHGRESKPLTAQQTTKLDAPTNLQFVNETDSTVLVRWTPPRAQITGYRLTVGLTRRGQPRQYNVGPSVSKYPLRNLQPASEYTVSLVAIKGNQESPKATGVFTTLQPGSSIPPYNTEVTETTIVITWTPAPRIGFKLGVRPSQGGEAPREVTSDSGSIVVSGLTPGVEYVYTIQVLRDGQERDAPIVNKVVTPLSPPTNLHLEANPDTGVLTVSWERSTTPDITGYRITTTPTNGQQGNSLEEVVHADQSSCTFDNLSPGLEYNVSVYTVKDDKESVPISDTIIPAVPPPTDLRFTNIGPDTMRVTWAPPPSIDLTNFLVRYSPVKNEEDVAELSISPSDNAVVLTNLLPGTEYVVSVSSVYEQHESTPLRGRQKTGLDSPTGIDFSDITANSFTVHWIAPRATITGYRIRHHPEHFSGRPREDRVPHSRNSITLTNLTPGTEYVVSIVALNGREESPLLIGQQSTVSDVPRDLEVVAATPTSLLISWDAPAVTVRYYRITYGETGGNSPVQEFTVPGSKSTATISGLKPGVDYTITVYAVTGRGDSPASSKPISINYRTEIDKPSQMQVTDVQDNSISVKWLPSSSPVTGYRVTTTPKNGPGPTKTKTAGPDQTEMTIEGLQPTVEYVVSVYAQNPSGESQPLVQTAVTNIDRPKGLAFTDVDVDSIKIAWESPQGQVSRYRVTYSSPEDGIHELFPAPDGEEDTAELQGLRPGSEYTVSVVALHDDMESQPLIGTQSTAIPAPTDLKFTQVTPTSLSAQWTPPNVQLTGYRVRVTPKEKTGPMKEINLAPDSSSVVVSGLMVATKYEVSVYALKDTLTSRPAQGVVTTLENVSPPRRARVTDATETTITISWRTKTETITGFQVDAVPANGQTPIQRTIKPDVRSYTITGLQPGTDYKIYLYTLNDNARSSPVVIDASTAIDAPSNLRFLATTPNSLLVSWQPPRARITGYIIKYEKPGSPPREVVPRPRPGVTEATITGLEPGTEYTIYVIALKNNQKSEPLIGRKKTGQEALSQTTISWAPFQDTSEYIISCHPVGTDEEPLQFRVPGTSTSATLTGLTRGATYNVIVEALKDQQRHKVREEVVTVGNSGWCHDNGVNYKIGEKWDRQGENGQMMSCTCLGNGKGEFKCDPHEATCYDDGKTYHVGEQWQKEYLGAICSCTCFGGQRGWRCDNCRRPGGEPSPEGTTGQSYNQYSQRYHQRTNTNVNCPIECFMPLDVQADREDSRE

SEQ ID NO: 6245 - protein, 2477 aa, Homo sapiens
MLRGPGPGLLLLAVQCLGTAVPSTGASKSKRQAQQMVQPQSPVAVSQSKPGCYDNGKHYQINQQWERTYLGNALVCTCYGGSRGFNCESKPEAEETCFDKYTGNTYRVGDTYERPKDSMIWDCTCIGAGRGRISCTIANRCHEGGQSYKIGDTWRRPHETGGYMLECVCLGNGKGEWTCKPIAEKCFDHAAGTSYVVGETWEKPYQGWMMVDCTCLGEGSGRITCTSRNRCNDQDTRTSYRIGDTWSKKDNRGNLLQCICTGNGRGEWKCERHTSVQTTSSGSGPFTDVRAAVYQPQPHPQPPPYGHCVTDSGVVYSVGMQWLKTQGNKQMLCTCLGNGVSCQETAVTQTYGGNSNGEPCVLPFTYNGRTFYSCTTEGRQDGHLWCSTTSNYEQDQKYSFCTDHTVLVQTRGGNSNGALCHFPFLYNNHNYTDCTSEGRRDNMKWCGTTQNYDADQKFGFCPMAAHEEICTTNEGVMYRIGDQWDKQHDMGHMMRCTCVGNGRGEWTCIAYSQLRDQCIVDDITYNVNDTFHKRHEEGHMLNCTCFGQGRGRWKCDPVDQCQDSETGTFYQIGDSWEKYVHGVRYQCYCYGRGIGEWHCQPLQTYPSSSGPVEVFITETPSQPNSHPIQWNAPQPSHISKYILRWRPKNSVGRWKEATIPGHLNSYTIKGLKPGVVYEGQLISIQQYGHQEVTRFDFTTTSTSTPVTSNTVTGETTPFSPLVATSESVTEITASSFVVSWVSASDTVSGFRVEYELSEEGDEPQYLDLPSTATSVNIPDLLPGRKYIVNVYQISEDGEQSLILSTSQTTAPDAPPDTTVDQVDDTSIVVRWSRPQAPITGYRIVYSPSVEGSSTELNLPETANSVTLSDLQPGVQYNITIYAVEENQESTPVVIQQETTGTPRSDTVPSPRDLQFVEVTDVKVTIMWTPPESAVTGYRVDVIPVNLPGEHGQRLPISRNTFAEVTGLSPGVTYYFKVFAVSHGRESKPLTAQQTTKLDAPTNLQFVNETDSTVLVRWTPPRAQITGYRLTVGLTRRGQPRQYNVGPSVSKYPLRNLQPASEYTVSLVAIKGNQESPKATGVFTTLQPGSSIPPYNTEVTETTIVITWTPAPRIGFKLGVRPSQGGEAPREVTSDSGSIVVSGLTPGVEYVYTIQVLRDGQERDAPIVNKVVTPLSPPTNLHLEANPDTGVLTVSWERSTTPDITGYRITTTPTNGQQGNSLEEVVHADQSSCTFDNLSPGLEYNVSVYTVKDDKESVPISDTIIPEVPQLTDLSFVDITDSSIGLRWTPLNSSTIIGYRITVVAAGEGIPIFEDFVDSSVGYYTVTGLEPGIDYDISVITLINGGESAPTTLTQQTAVPPPTDLRFTNIGPDTMRVTWAPPPSIDLTNFLVRYSPVKNEEDVAELSISPSDNAVVLTNLLPGTEYVVSVSSVYEQHESTPLRGRQKTGLDSPTGIDFSDITANSFTVHWIAPRATITGYRIRHHPEHFSGRPREDRVPHSRNSITLTNLTPGTEYVVSIVALNGREESPLLIGQQSTVSDVPRDLEVVAATPTSLLISWDAPAVTVRYYRITYGETGGNSPVQEFTVPGSKSTATISGLKPGVDYTITVYAVTGRGDSPASSKPISINYRTEIDKPSQMQVTDVQDNSISVKWLPSSSPVTGYRVTTTPKNGPGPTKTKTAGPDQTEMTIEGLQPTVEYVVSVYAQNPSGESQPLVQTAVTNIDRPKGLAFTDVDVDSIKIAWESPQGQVSRYRVTYSSPEDGIHELFPAPDGEEDTAELQGLRPGSEYTVSVVALHDDMESQPLIGTQSTAIPAPTDLKFTQVTPTSLSAQWTPPNVQLTGYRVRVTPKEKTGPMKEINLAPDSSSVVVSGLMVATKYEVSVYALKDTLTSRPAQGVVTTLENVSPPRRARVTDATETTITISWRTKTETITGFQVDAVPANGQTPIQRTIKPDVRSYTITGLQPGTDYKIYLYTLNDNARSSPVVIDASTAIDAPSNLRFLATTPNSLLVSWQPPRARITGYIIKYEKPGSPPREVVPRPRPGVTEATITGLEPGTEYTIYVIALKNNQKSEPLIGRKKTDELPQLVTLPHPNLHGPEILDVPSTVQKTPFVTHPGYDTGNGIQLPGTSGQQPSVGQQMIFEEHGFRRTTPPTTATPIRHRPRPYPPNVGEEIQIGHIPREDVDYHLYPHGPGLNPNASTGQEALSQTTISWAPFQDTSEYIISCHPVGTDEEPLQFRVPGTSTSATLTGLTRGATYNVIVEALKDQQRHKVREEVVTVGNSVNEGLNQPTDDSCFDPYTVSHYAVGDEWERMSESGFKLLCQCLGFGSGHFRCDSSRWCHDNGVNYKIGEKWDRQGENGQMMSCTCLGNGKGEFKCDPHEATCYDDGKTYHVGEQWQKEYLGAICSCTCFGGQRGWRCDNCRRPGGEPSPEGTTGQSYNQYSQRYHQRTNTNVNCPIECFMPLDVQADREDSRE

SEQ ID NO: 6246 - protein, 2296 aa, Homo sapiens
MLRGPGPGLLLLAVQCLGTAVPSTGASKSKRQAQQMVQPQSPVAVSQSKPGCYDNGKHYQINQQWERTYLGNALVCTCYGGSRGFNCESKPEAEETCFDKYTGNTYRVGDTYERPKDSMIWDCTCIGAGRGRISCTIANRCHEGGQSYKIGDTWRRPHETGGYMLECVCLGNGKGEWTCKPIAEKCFDHAAGTSYVVGETWEKPYQGWMMVDCTCLGEGSGRITCTSRNRCNDQDTRTSYRIGDTWSKKDNRGNLLQCICTGNGRGEWKCERHTSVQTTSSGSGPFTDVRAAVYQPQPHPQPPPYGHCVTDSGVVYSVGMQWLKTQGNKQMLCTCLGNGVSCQETAVTQTYGGNSNGEPCVLPFTYNGRTFYSCTTEGRQDGHLWCSTTSNYEQDQKYSFCTDHTVLVQTRGGNSNGALCHFPFLYNNHNYTDCTSEGRRDNMKWCGTTQNYDADQKFGFCPMAAHEEICTTNEGVMYRIGDQWDKQHDMGHMMRCTCVGNGRGEWTCIAYSQLRDQCIVDDITYNVNDTFHKRHEEGHMLNCTCFGQGRGRWKCDPVDQCQDSETGTFYQIGDSWEKYVHGVRYQCYCYGRGIGEWHCQPLQTYPSSSGPVEVFITETPSQPNSHPIQWNAPQPSHISKYILRWRPKNSVGRWKEATIPGHLNSYTIKGLKPGVVYEGQLISIQQYGHQEVTRFDFTTTSTSTPVTSNTVTGETTPFSPLVATSESVTEITASSFVVSWVSASDTVSGFRVEYELSEEGDEPQYLDLPSTATSVNIPDLLPGRKYIVNVYQISEDGEQSLILSTSQTTAPDAPPDTTVDQVDDTSIVVRWSRPQAPITGYRIVYSPSVEGSSTELNLPETANSVTLSDLQPGVQYNITIYAVEENQESTPVVIQQETTGTPRSDTVPSPRDLQFVEVTDVKVTIMWTPPESAVTGYRVDVIPVNLPGEHGQRLPISRNTFAEVTGLSPGVTYYFKVFAVSHGRESKPLTAQQTTKLDAPTNLQFVNETDSTVLVRWTPPRAQITGYRLTVGLTRRGQPRQYNVGPSVSKYPLRNLQPASEYTVSLVAIKGNQESPKATGVFTTLQPGSSIPPYNTEVTETTIVITWTPAPRIGFKLGVRPSQGGEAPREVTSDSGSIVVSGLTPGVEYVYTIQVLRDGQERDAPIVNKVVTPLSPPTNLHLEANPDTGVLTVSWERSTTPDITGYRITTTPTNGQQGNSLEEVVHADQSSCTFDNLSPGLEYNVSVYTVKDDKESVPISDTIIPAVPPPTDLRFTNIGPDTMRVTWAPPPSIDLTNFLVRYSPVKNEEDVAELSISPSDNAVVLTNLLPGTEYVVSVSSVYEQHESTPLRGRQKTGLDSPTGIDFSDITANSFTVHWIAPRATITGYRIRHHPEHFSGRPREDRVPHSRNSITLTNLTPGTEYVVSIVALNGREESPLLIGQQSTVSDVPRDLEVVAATPTSLLISWDAPAVTVRYYRITYGETGGNSPVQEFTVPGSKSTATISGLKPGVDYTITVYAVTGRGDSPASSKPISINYRTEIDKPSQMQVTDVQDNSISVKWLPSSSPVTGYRVTTTPKNGPGPTKTKTAGPDQTEMTIEGLQPTVEYVVSVYAQNPSGESQPLVQTAVTTIPAPTDLKFTQVTPTSLSAQWTPPNVQLTGYRVRVTPKEKTGPMKEINLAPDSSSVVVSGLMVATKYEVSVYALKDTLTSRPAQGVVTTLENVSPPRRARVTDATETTITISWRTKTETITGFQVDAVPANGQTPIQRTIKPDVRSYTITGLQPGTDYKIYLYTLNDNARSSPVVIDASTAIDAPSNLRFLATTPNSLLVSWQPPRARITGYIIKYEKPGSPPREVVPRPRPGVTEATITGLEPGTEYTIYVIALKNNQKSEPLIGRKKTDELPQLVTLPHPNLHGPEILDVPSTVQKTPFVTHPGYDTGNGIQLPGTSGQQPSVGQQMIFEEHGFRRTTPPTTATPIRHRPRPYPPNVGEEIQIGHIPREDVDYHLYPHGPGLNPNASTGQEALSQTTISWAPFQDTSEYIISCHPVGTDEEPLQFRVPGTSTSATLTGLTRGATYNVIVEALKDQQRHKVREEVVTVGNSVNEGLNQPTDDSCFDPYTVSHYAVGDEWERMSESGFKLLCQCLGFGSGHFRCDSSRWCHDNGVNYKIGEKWDRQGENGQMMSCTCLGNGKGEFKCDPHEATCYDDGKTYHVGEQWQKEYLGAICSCTCFGGQRGWRCDNCRRPGGEPSPEGTTGQSYNQYSQRYHQRTNTNVNCPIECFMPLDVQADREDSRE

SEQ ID NO: 6247 - protein, 2031 aa, Homo sapiens
MLRGPGPGLLLLAVQCLGTAVPSTGASKSKRQAQQMVQPQSPVAVSQSKPGCYDNGKHYQINQQWERTYLGNALVCTCYGGSRGFNCESKPEAEETCFDKYTGNTYRVGDTYERPKDSMIWDCTCIGAGRGRISCTIANRCHEGGQSYKIGDTWRRPHETGGYMLECVCLGNGKGEWTCKPIAEKCFDHAAGTSYVVGETWEKPYQGWMMVDCTCLGEGSGRITCTSRNRCNDQDTRTSYRIGDTWSKKDNRGNLLQCICTGNGRGEWKCERHTSVQTTSSGSGPFTDVRAAVYQPQPHPQPPPYGHCVTDSGVVYSVGMQWLKTQGNKQMLCTCLGNGVSCQETAVTQTYGGNSNGEPCVLPFTYNGRTFYSCTTEGRQDGHLWCSTTSNYEQDQKYSFCTDHTVLVQTRGGNSNGALCHFPFLYNNHNYTDCTSEGRRDNMKWCGTTQNYDADQKFGFCPMAAHEEICTTNEGVMYRIGDQWDKQHDMGHMMRCTCVGNGRGEWTCIAYSQLRDQCIVDDITYNVNDTFHKRHEEGHMLNCTCFGQGRGRWKCDPVDQCQDSETGTFYQIGDSWEKYVHGVRYQCYCYGRGIGEWHCQPLQTYPSSSGPVEVFITETPSQPNSHPIQWNAPQPSHISKYILRWRPKNSVGRWKEATIPGHLNSYTIKGLKPGVVYEGQLISIQQYGHQEVTRFDFTTTSTSTPVTSNTVTGETTPFSPLVATSESVTEITASSFVVSWVSASDTVSGFRVEYELSEEGDEPQYLDLPSTATSVNIPDLLPGRKYIVNVYQISEDGEQSLILSTSQTTAPDAPPDTTVDQVDDTSIVVRWSRPQAPITGYRIVYSPSVEGSSTELNLPETANSVTLSDLQPGVQYNITIYAVEENQESTPVVIQQETTGTPRSDTVPSPRDLQFVEVTDVKVTIMWTPPESAVTGYRVDVIPVNLPGEHGQRLPISRNTFAEVTGLSPGVTYYFKVFAVSHGRESKPLTAQQTTKLDAPTNLQFVNETDSTVLVRWTPPRAQITGYRLTVGLTRRGQPRQYNVGPSVSKYPLRNLQPASEYTVSLVAIKGNQESPKATGVFTTLQPGSSIPPYNTEVTETTIVITWTPAPRIGFKLGVRPSQGGEAPREVTSDSGSIVVSGLTPGVEYVYTIQVLRDGQERDAPIVNKVVTPLSPPTNLHLEANPDTGVLTVSWERSTTPDITGYRITTTPTNGQQGNSLEEVVHADQSSCTFDNLSPGLEYNVSVYTVKDDKESVPISDTIIPAVPPPTDLRFTNIGPDTMRVTWAPPPSIDLTNFLVRYSPVKNEEDVAELSISPSDNAVVLTNLLPGTEYVVSVSSVYEQHESTPLRGRQKTGLDSPTGIDFSDITANSFTVHWIAPRATITGYRIRHHPEHFSGRPREDRVPHSRNSITLTNLTPGTEYVVSIVALNGREESPLLIGQQSTVSDVPRDLEVVAATPTSLLISWDAPAVTVRYYRITYGETGGNSPVQEFTVPGSKSTATISGLKPGVDYTITVYAVTGRGDSPASSKPISINYRTEIDKPSQMQVTDVQDNSISVKWLPSSSPVTGYRVTTTPKNGPGPTKTKTAGPDQTEMTIEGLQPTVEYVVSVYAQNPSGESQPLVQTAVTNIDRPKGLAFTDVDVDSIKIAWESPQGQVSRYRVTYSSPEDGIHELFPAPDGEEDTAELQGLRPGSEYTVSVVALHDDMESQPLIGTQSTAIPAPTDLKFTQVTPTSLSAQWTPPNVQLTGYRVRVTPKEKTGPMKEINLAPDSSSVVVSGLMVATKYEVSVYALKDTLTSRPAQGVVTTLENVSPPRRARVTDATETTITISWRTKTETITGFQVDAVPANGQTPIQRTIKPDVRSYTITGLQPGTDYKIYLYTLNDNARSSPVVIDASTAIDAPSNLRFLATTPNSLLVSWQPPRARITGYIIKYEKPGSPPREVVPRPRPGVTEATITGLEPGTEYTIYVIALKNNQKSEPLIGRKKTGQEALSQTTISWAPFQDTSEYIISCHPVGTDEEPLQSTKA

SEQ ID NO: 6248 - protein, 2176 aa, Homo sapiens
MLRGPGPGLLLLAVQCLGTAVPSTGASKSKRQAQQMVQPQSPVAVSQSKPGCYDNGKHYQINQQWERTYLGNALVCTCYGGSRGFNCESKPEAEETCFDKYTGNTYRVGDTYERPKDSMIWDCTCIGAGRGRISCTIANRCHEGGQSYKIGDTWRRPHETGGYMLECVCLGNGKGEWTCKPIAEKCFDHAAGTSYVVGETWEKPYQGWMMVDCTCLGEGSGRITCTSRNRCNDQDTRTSYRIGDTWSKKDNRGNLLQCICTGNGRGEWKCERHTSVQTTSSGSGPFTDVRAAVYQPQPHPQPPPYGHCVTDSGVVYSVGMQWLKTQGNKQMLCTCLGNGVSCQETAVTQTYGGNSNGEPCVLPFTYNGRTFYSCTTEGRQDGHLWCSTTSNYEQDQKYSFCTDHTVLVQTRGGNSNGALCHFPFLYNNHNYTDCTSEGRRDNMKWCGTTQNYDADQKFGFCPMAAHEEICTTNEGVMYRIGDQWDKQHDMGHMMRCTCVGNGRGEWTCIAYSQLRDQCIVDDITYNVNDTFHKRHEEGHMLNCTCFGQGRGRWKCDPVDQCQDSETGTFYQIGDSWEKYVHGVRYQCYCYGRGIGEWHCQPLQTYPSSSGPVEVFITETPSQPNSHPIQWNAPQPSHISKYILRWRPKNSVGRWKEATIPGHLNSYTIKGLKPGVVYEGQLISIQQYGHQEVTRFDFTTTSTSTPVTSNTVTGETTPFSPLVATSESVTEITASSFVVSWVSASDTVSGFRVEYELSEEGDEPQYLDLPSTATSVNIPDLLPGRKYIVNVYQISEDGEQSLILSTSQTTAPDAPPDTTVDQVDDTSIVVRWSRPQAPITGYRIVYSPSVEGSSTELNLPETANSVTLSDLQPGVQYNITIYAVEENQESTPVVIQQETTGTPRSDTVPSPRDLQFVEVTDVKVTIMWTPPESAVTGYRVDVIPVNLPGEHGQRLPISRNTFAEVTGLSPGVTYYFKVFAVSHGRESKPLTAQQTTKLDAPTNLQFVNETDSTVLVRWTPPRAQITGYRLTVGLTRRGQPRQYNVGPSVSKYPLRNLQPASEYTVSLVAIKGNQESPKATGVFTTLQPGSSIPPYNTEVTETTIVITWTPAPRIGFKLGVRPSQGGEAPREVTSDSGSIVVSGLTPGVEYVYTIQVLRDGQERDAPIVNKVVTPLSPPTNLHLEANPDTGVLTVSWERSTTPDITGYRITTTPTNGQQGNSLEEVVHADQSSCTFDNLSPGLEYNVSVYTVKDDKESVPISDTIIPAVPPPTDLRFTNIGPDTMRVTWAPPPSIDLTNFLVRYSPVKNEEDVAELSISPSDNAVVLTNLLPGTEYVVSVSSVYEQHESTPLRGRQKTGLDSPTGIDFSDITANSFTVHWIAPRATITGYRIRHHPEHFSGRPREDRVPHSRNSITLTNLTPGTEYVVSIVALNGREESPLLIGQQSTVSDVPRDLEVVAATPTSLLISWDAPAVTVRYYRITYGETGGNSPVQEFTVPGSKSTATISGLKPGVDYTITVYAVTGRGDSPASSKPISINYRTEIDKPSQMQVTDVQDNSISVKWLPSSSPVTGYRVTTTPKNGPGPTKTKTAGPDQTEMTIEGLQPTVEYVVSVYAQNPSGESQPLVQTAVTTIPAPTDLKFTQVTPTSLSAQWTPPNVQLTGYRVRVTPKEKTGPMKEINLAPDSSSVVVSGLMVATKYEVSVYALKDTLTSRPAQGVVTTLENVSPPRRARVTDATETTITISWRTKTETITGFQVDAVPANGQTPIQRTIKPDVRSYTITGLQPGTDYKIYLYTLNDNARSSPVVIDASTAIDAPSNLRFLATTPNSLLVSWQPPRARITGYIIKYEKPGSPPREVVPRPRPGVTEATITGLEPGTEYTIYVIALKNNQKSEPLIGRKKTGQEALSQTTISWAPFQDTSEYIISCHPVGTDEEPLQFRVPGTSTSATLTGLTRGATYNVIVEALKDQQRHKVREEVVTVGNSVNEGLNQPTDDSCFDPYTVSHYAVGDEWERMSESGFKLLCQCLGFGSGHFRCDSSRWCHDNGVNYKIGEKWDRQGENGQMMSCTCLGNGKGEFKCDPHEATCYDDGKTYHVGEQWQKEYLGAICSCTCFGGQRGWRCDNCRRPGGEPSPEGTTGQSYNQYSQRYHQRTNTNVNCPIECFMPLDVQADREDSRE

SEQ ID NO: 6249 - protein, 2386 aa, Homo sapiens
MLRGPGPGLLLLAVQCLGTAVPSTGASKSKRQAQQMVQPQSPVAVSQSKPGCYDNGKHYQINQQWERTYLGNALVCTCYGGSRGFNCESKPEAEETCFDKYTGNTYRVGDTYERPKDSMIWDCTCIGAGRGRISCTIANRCHEGGQSYKIGDTWRRPHETGGYMLECVCLGNGKGEWTCKPIAEKCFDHAAGTSYVVGETWEKPYQGWMMVDCTCLGEGSGRITCTSRNRCNDQDTRTSYRIGDTWSKKDNRGNLLQCICTGNGRGEWKCERHTSVQTTSSGSGPFTDVRAAVYQPQPHPQPPPYGHCVTDSGVVYSVGMQWLKTQGNKQMLCTCLGNGVSCQETAVTQTYGGNSNGEPCVLPFTYNGRTFYSCTTEGRQDGHLWCSTTSNYEQDQKYSFCTDHTVLVQTRGGNSNGALCHFPFLYNNHNYTDCTSEGRRDNMKWCGTTQNYDADQKFGFCPMAAHEEICTTNEGVMYRIGDQWDKQHDMGHMMRCTCVGNGRGEWTCIAYSQLRDQCIVDDITYNVNDTFHKRHEEGHMLNCTCFGQGRGRWKCDPVDQCQDSETGTFYQIGDSWEKYVHGVRYQCYCYGRGIGEWHCQPLQTYPSSSGPVEVFITETPSQPNSHPIQWNAPQPSHISKYILRWRPKNSVGRWKEATIPGHLNSYTIKGLKPGVVYEGQLISIQQYGHQEVTRFDFTTTSTSTPVTSNTVTGETTPFSPLVATSESVTEITASSFVVSWVSASDTVSGFRVEYELSEEGDEPQYLDLPSTATSVNIPDLLPGRKYIVNVYQISEDGEQSLILSTSQTTAPDAPPDTTVDQVDDTSIVVRWSRPQAPITGYRIVYSPSVEGSSTELNLPETANSVTLSDLQPGVQYNITIYAVEENQESTPVVIQQETTGTPRSDTVPSPRDLQFVEVTDVKVTIMWTPPESAVTGYRVDVIPVNLPGEHGQRLPISRNTFAEVTGLSPGVTYYFKVFAVSHGRESKPLTAQQTTKLDAPTNLQFVNETDSTVLVRWTPPRAQITGYRLTVGLTRRGQPRQYNVGPSVSKYPLRNLQPASEYTVSLVAIKGNQESPKATGVFTTLQPGSSIPPYNTEVTETTIVITWTPAPRIGFKLGVRPSQGGEAPREVTSDSGSIVVSGLTPGVEYVYTIQVLRDGQERDAPIVNKVVTPLSPPTNLHLEANPDTGVLTVSWERSTTPDITGYRITTTPTNGQQGNSLEEVVHADQSSCTFDNLSPGLEYNVSVYTVKDDKESVPISDTIIPAVPPPTDLRFTNIGPDTMRVTWAPPPSIDLTNFLVRYSPVKNEEDVAELSISPSDNAVVLTNLLPGTEYVVSVSSVYEQHESTPLRGRQKTGLDSPTGIDFSDITANSFTVHWIAPRATITGYRIRHHPEHFSGRPREDRVPHSRNSITLTNLTPGTEYVVSIVALNGREESPLLIGQQSTVSDVPRDLEVVAATPTSLLISWDAPAVTVRYYRITYGETGGNSPVQEFTVPGSKSTATISGLKPGVDYTITVYAVTGRGDSPASSKPISINYRTEIDKPSQMQVTDVQDNSISVKWLPSSSPVTGYRVTTTPKNGPGPTKTKTAGPDQTEMTIEGLQPTVEYVVSVYAQNPSGESQPLVQTAVTNIDRPKGLAFTDVDVDSIKIAWESPQGQVSRYRVTYSSPEDGIHELFPAPDGEEDTAELQGLRPGSEYTVSVVALHDDMESQPLIGTQSTAIPAPTDLKFTQVTPTSLSAQWTPPNVQLTGYRVRVTPKEKTGPMKEINLAPDSSSVVVSGLMVATKYEVSVYALKDTLTSRPAQGVVTTLENVSPPRRARVTDATETTITISWRTKTETITGFQVDAVPANGQTPIQRTIKPDVRSYTITGLQPGTDYKIYLYTLNDNARSSPVVIDASTAIDAPSNLRFLATTPNSLLVSWQPPRARITGYIIKYEKPGSPPREVVPRPRPGVTEATITGLEPGTEYTIYVIALKNNQKSEPLIGRKKTDELPQLVTLPHPNLHGPEILDVPSTVQKTPFVTHPGYDTGNGIQLPGTSGQQPSVGQQMIFEEHGFRRTTPPTTATPIRHRPRPYPPNVGEEIQIGHIPREDVDYHLYPHGPGLNPNASTGQEALSQTTISWAPFQDTSEYIISCHPVGTDEEPLQFRVPGTSTSATLTGLTRGATYNVIVEALKDQQRHKVREEVVTVGNSVNEGLNQPTDDSCFDPYTVSHYAVGDEWERMSESGFKLLCQCLGFGSGHFRCDSSRWCHDNGVNYKIGEKWDRQGENGQMMSCTCLGNGKGEFKCDPHEATCYDDGKTYHVGEQWQKEYLGAICSCTCFGGQRGWRCDNCRRPGGEPSPEGTTGQSYNQYSQRYHQRTNTNVNCPIECFMPLDVQADREDSRE

SEQ ID NO: 6250 - protein, 2240 aa, Homo sapiens
MLRGPGPGLLLLAVQCLGTAVPSTGASKSKRQAQQMVQPQSPVAVSQSKPGCYDNGKHYQINQQWERTYLGNALVCTCYGGSRGFNCESKPEAEETCFDKYTGNTYRVGDTYERPKDSMIWDCTCIGAGRGRISCTIANRCHEGGQSYKIGDTWRRPHETGGYMLECVCLGNGKGEWTCKPIAEKCFDHAAGTSYVVGETWEKPYQGWMMVDCTCLGEGSGRITCTSRNRCNDQDTRTSYRIGDTWSKKDNRGNLLQCICTGNGRGEWKCERHTSVQTTSSGSGPFTDVRAAVYQPQPHPQPPPYGHCVTDSGVVYSVGMQWLKTQGNKQMLCTCLGNGVSCQETAVTQTYGGNSNGEPCVLPFTYNGRTFYSCTTEGRQDGHLWCSTTSNYEQDQKYSFCTDHTVLVQTRGGNSNGALCHFPFLYNNHNYTDCTSEGRRDNMKWCGTTQNYDADQKFGFCPMAAHEEICTTNEGVMYRIGDQWDKQHDMGHMMRCTCVGNGRGEWTCIAYSQLRDQCIVDDITYNVNDTFHKRHEEGHMLNCTCFGQGRGRWKCDPVDQCQDSETGTFYQIGDSWEKYVHGVRYQCYCYGRGIGEWHCQPLQTYPSSSGPVEVFITETPSQPNSHPIQWNAPQPSHISKYILRWRPKNSVGRWKEATIPGHLNSYTIKGLKPGVVYEGQLISIQQYGHQEVTRFDFTTTSTSTPVTSNTVTGETTPFSPLVATSESVTEITASSFVVSWVSASDTVSGFRVEYELSEEGDEPQYLDLPSTATSVNIPDLLPGRKYIVNVYQISEDGEQSLILSTSQTTAPDAPPDTTVDQVDDTSIVVRWSRPQAPITGYRIVYSPSVEGSSTELNLPETANSVTLSDLQPGVQYNITIYAVEENQESTPVVIQQETTGTPRSDTVPSPRDLQFVEVTDVKVTIMWTPPESAVTGYRVDVIPVNLPGEHGQRLPISRNTFAEVTGLSPGVTYYFKVFAVSHGRESKPLTAQQTTKLDAPTNLQFVNETDSTVLVRWTPPRAQITGYRLTVGLTRRGQPRQYNVGPSVSKYPLRNLQPASEYTVSLVAIKGNQESPKATGVFTTLQPGSSIPPYNTEVTETTIVITWTPAPRIGFKLGVRPSQGGEAPREVTSDSGSIVVSGLTPGVEYVYTIQVLRDGQERDAPIVNKVVTPLSPPTNLHLEANPDTGVLTVSWERSTTPDITGYRITTTPTNGQQGNSLEEVVHADQSSCTFDNLSPGLEYNVSVYTVKDDKESVPISDTIIPAVPPPTDLRFTNIGPDTMRVTWAPPPSIDLTNFLVRYSPVKNEEDVAELSISPSDNAVVLTNLLPGTEYVVSVSSVYEQHESTPLRGRQKTGLDSPTGIDFSDITANSFTVHWIAPRATITGYRIRHHPEHFSGRPREDRVPHSRNSITLTNLTPGTEYVVSIVALNGREESPLLIGQQSTVSDVPRDLEVVAATPTSLLISWDAPAVTVRYYRITYGETGGNSPVQEFTVPGSKSTATISGLKPGVDYTITVYAVTGRGDSPASSKPISINYRTEIDKPSQMQVTDVQDNSISVKWLPSSSPVTGYRVTTTPKNGPGPTKTKTAGPDQTEMTIEGLQPTVEYVVSVYAQNPSGESQPLVQTAVTTIPAPTDLKFTQVTPTSLSAQWTPPNVQLTGYRVRVTPKEKTGPMKEINLAPDSSSVVVSGLMVATKYEVSVYALKDTLTSRPAQGVVTTLENVSPPRRARVTDATETTITISWRTKTETITGFQVDAVPANGQTPIQRTIKPDVRSYTITGLQPGTDYKIYLYTLNDNARSSPVVIDASTAIDAPSNLRFLATTPNSLLVSWQPPRARITGYIIKYEKPGSPPREVVPRPRPGVTEATITGLEPGTEYTIYVIALKNNQKSEPLIGRKKTVQKTPFVTHPGYDTGNGIQLPGTSGQQPSVGQQMIFEEHGFRRTTPPTTATPIRHRPRPYPPNVGQEALSQTTISWAPFQDTSEYIISCHPVGTDEEPLQFRVPGTSTSATLTGLTRGATYNVIVEALKDQQRHKVREEVVTVGNSVNEGLNQPTDDSCFDPYTVSHYAVGDEWERMSESGFKLLCQCLGFGSGHFRCDSSRWCHDNGVNYKIGEKWDRQGENGQMMSCTCLGNGKGEFKCDPHEATCYDDGKTYHVGEQWQKEYLGAICSCTCFGGQRGWRCDNCRRPGGEPSPEGTTGQSYNQYSQRYHQRTNTNVNCPIECFMPLDVQADREDSRE

SEQ ID NO: 6251 - protein, 657 aa, Homo sapiens
MLRGPGPGLLLLAVQCLGTAVPSTGASKSKRQAQQMVQPQSPVAVSQSKPGCYDNGKHYQINQQWERTYLGNALVCTCYGGSRGFNCESKPEAEETCFDKYTGNTYRVGDTYERPKDSMIWDCTCIGAGRGRISCTIANRCHEGGQSYKIGDTWRRPHETGGYMLECVCLGNGKGEWTCKPIAEKCFDHAAGTSYVVGETWEKPYQGWMMVDCTCLGEGSGRITCTSRNRCNDQDTRTSYRIGDTWSKKDNRGNLLQCICTGNGRGEWKCERHTSVQTTSSGSGPFTDVRAAVYQPQPHPQPPPYGHCVTDSGVVYSVGMQWLKTQGNKQMLCTCLGNGVSCQETAVTQTYGGNSNGEPCVLPFTYNGRTFYSCTTEGRQDGHLWCSTTSNYEQDQKYSFCTDHTVLVQTRGGNSNGALCHFPFLYNNHNYTDCTSEGRRDNMKWCGTTQNYDADQKFGFCPMAAHEEICTTNEGVMYRIGDQWDKQHDMGHMMRCTCVGNGRGEWTCIAYSQLRDQCIVDDITYNVNDTFHKRHEEGHMLNCTCFGQGRGRWKCDPVDQCQDSETGTFYQIGDSWEKYVHGVRYQCYCYGRGIGEWHCQPLQTYPSSSGPVEVFITETPSQPNSHPIQWNAPQPSHISKYILRWRPVSIPPRNLGY

SEQ ID NO: 6252 - protein, 2267 aa, Homo sapiens
MLRGPGPGLLLLAVQCLGTAVPSTGASKSKRQAQQMVQPQSPVAVSQSKPGCYDNGKHYQINQQWERTYLGNALVCTCYGGSRGFNCESKPEAEETCFDKYTGNTYRVGDTYERPKDSMIWDCTCIGAGRGRISCTIANRCHEGGQSYKIGDTWRRPHETGGYMLECVCLGNGKGEWTCKPIAEKCFDHAAGTSYVVGETWEKPYQGWMMVDCTCLGEGSGRITCTSRNRCNDQDTRTSYRIGDTWSKKDNRGNLLQCICTGNGRGEWKCERHTSVQTTSSGSGPFTDVRAAVYQPQPHPQPPPYGHCVTDSGVVYSVGMQWLKTQGNKQMLCTCLGNGVSCQETAVTQTYGGNSNGEPCVLPFTYNGRTFYSCTTEGRQDGHLWCSTTSNYEQDQKYSFCTDHTVLVQTRGGNSNGALCHFPFLYNNHNYTDCTSEGRRDNMKWCGTTQNYDADQKFGFCPMAAHEEICTTNEGVMYRIGDQWDKQHDMGHMMRCTCVGNGRGEWTCIAYSQLRDQCIVDDITYNVNDTFHKRHEEGHMLNCTCFGQGRGRWKCDPVDQCQDSETGTFYQIGDSWEKYVHGVRYQCYCYGRGIGEWHCQPLQTYPSSSGPVEVFITETPSQPNSHPIQWNAPQPSHISKYILRWRPKNSVGRWKEATIPGHLNSYTIKGLKPGVVYEGQLISIQQYGHQEVTRFDFTTTSTSTPVTSNTVTGETTPFSPLVATSESVTEITASSFVVSWVSASDTVSGFRVEYELSEEGDEPQYLDLPSTATSVNIPDLLPGRKYIVNVYQISEDGEQSLILSTSQTTAPDAPPDTTVDQVDDTSIVVRWSRPQAPITGYRIVYSPSVEGSSTELNLPETANSVTLSDLQPGVQYNITIYAVEENQESTPVVIQQETTGTPRSDTVPSPRDLQFVEVTDVKVTIMWTPPESAVTGYRVDVIPVNLPGEHGQRLPISRNTFAEVTGLSPGVTYYFKVFAVSHGRESKPLTAQQTTKLDAPTNLQFVNETDSTVLVRWTPPRAQITGYRLTVGLTRRGQPRQYNVGPSVSKYPLRNLQPASEYTVSLVAIKGNQESPKATGVFTTLQPGSSIPPYNTEVTETTIVITWTPAPRIGFKLGVRPSQGGEAPREVTSDSGSIVVSGLTPGVEYVYTIQVLRDGQERDAPIVNKVVTPLSPPTNLHLEANPDTGVLTVSWERSTTPDITGYRITTTPTNGQQGNSLEEVVHADQSSCTFDNLSPGLEYNVSVYTVKDDKESVPISDTIIPEVPQLTDLSFVDITDSSIGLRWTPLNSSTIIGYRITVVAAGEGIPIFEDFVDSSVGYYTVTGLEPGIDYDISVITLINGGESAPTTLTQQTAVPPPTDLRFTNIGPDTMRVTWAPPPSIDLTNFLVRYSPVKNEEDVAELSISPSDNAVVLTNLLPGTEYVVSVSSVYEQHESTPLRGRQKTGLDSPTGIDFSDITANSFTVHWIAPRATITGYRIRHHPEHFSGRPREDRVPHSRNSITLTNLTPGTEYVVSIVALNGREESPLLIGQQSTVSDVPRDLEVVAATPTSLLISWDAPAVTVRYYRITYGETGGNSPVQEFTVPGSKSTATISGLKPGVDYTITVYAVTGRGDSPASSKPISINYRTEIDKPSQMQVTDVQDNSISVKWLPSSSPVTGYRVTTTPKNGPGPTKTKTAGPDQTEMTIEGLQPTVEYVVSVYAQNPSGESQPLVQTAVTTIPAPTDLKFTQVTPTSLSAQWTPPNVQLTGYRVRVTPKEKTGPMKEINLAPDSSSVVVSGLMVATKYEVSVYALKDTLTSRPAQGVVTTLENVSPPRRARVTDATETTITISWRTKTETITGFQVDAVPANGQTPIQRTIKPDVRSYTITGLQPGTDYKIYLYTLNDNARSSPVVIDASTAIDAPSNLRFLATTPNSLLVSWQPPRARITGYIIKYEKPGSPPREVVPRPRPGVTEATITGLEPGTEYTIYVIALKNNQKSEPLIGRKKTGQEALSQTTISWAPFQDTSEYIISCHPVGTDEEPLQFRVPGTSTSATLTGLTRGATYNVIVEALKDQQRHKVREEVVTVGNSVNEGLNQPTDDSCFDPYTVSHYAVGDEWERMSESGFKLLCQCLGFGSGHFRCDSSRWCHDNGVNYKIGEKWDRQGENGQMMSCTCLGNGKGEFKCDPHEATCYDDGKTYHVGEQWQKEYLGAICSCTCFGGQRGWRCDNCRRPGGEPSPEGTTGQSYNQYSQRYHQRTNTNVNCPIECFMPLDVQADREDSRE

SEQ ID NO: 6253 - protein, 2265 aa, Homo sapiens
MLRGPGPGLLLLAVQCLGTAVPSTGASKSKRQAQQMVQPQSPVAVSQSKPGCYDNGKHYQINQQWERTYLGNALVCTCYGGSRGFNCESKPEAEETCFDKYTGNTYRVGDTYERPKDSMIWDCTCIGAGRGRISCTIANRCHEGGQSYKIGDTWRRPHETGGYMLECVCLGNGKGEWTCKPIAEKCFDHAAGTSYVVGETWEKPYQGWMMVDCTCLGEGSGRITCTSRNRCNDQDTRTSYRIGDTWSKKDNRGNLLQCICTGNGRGEWKCERHTSVQTTSSGSGPFTDVRAAVYQPQPHPQPPPYGHCVTDSGVVYSVGMQWLKTQGNKQMLCTCLGNGVSCQETAVTQTYGGNSNGEPCVLPFTYNGRTFYSCTTEGRQDGHLWCSTTSNYEQDQKYSFCTDHTVLVQTRGGNSNGALCHFPFLYNNHNYTDCTSEGRRDNMKWCGTTQNYDADQKFGFCPMAAHEEICTTNEGVMYRIGDQWDKQHDMGHMMRCTCVGNGRGEWTCIAYSQLRDQCIVDDITYNVNDTFHKRHEEGHMLNCTCFGQGRGRWKCDPVDQCQDSETGTFYQIGDSWEKYVHGVRYQCYCYGRGIGEWHCQPLQTYPSSSGPVEVFITETPSQPNSHPIQWNAPQPSHISKYILRWRPKNSVGRWKEATIPGHLNSYTIKGLKPGVVYEGQLISIQQYGHQEVTRFDFTTTSTSTPVTSNTVTGETTPFSPLVATSESVTEITASSFVVSWVSASDTVSGFRVEYELSEEGDEPQYLDLPSTATSVNIPDLLPGRKYIVNVYQISEDGEQSLILSTSQTTAPDAPPDTTVDQVDDTSIVVRWSRPQAPITGYRIVYSPSVEGSSTELNLPETANSVTLSDLQPGVQYNITIYAVEENQESTPVVIQQETTGTPRSDTVPSPRDLQFVEVTDVKVTIMWTPPESAVTGYRVDVIPVNLPGEHGQRLPISRNTFAEVTGLSPGVTYYFKVFAVSHGRESKPLTAQQTTKLDAPTNLQFVNETDSTVLVRWTPPRAQITGYRLTVGLTRRGQPRQYNVGPSVSKYPLRNLQPASEYTVSLVAIKGNQESPKATGVFTTLQPGSSIPPYNTEVTETTIVITWTPAPRIGFKLGVRPSQGGEAPREVTSDSGSIVVSGLTPGVEYVYTIQVLRDGQERDAPIVNKVVTPLSPPTNLHLEANPDTGVLTVSWERSTTPDITGYRITTTPTNGQQGNSLEEVVHADQSSCTFDNLSPGLEYNVSVYTVKDDKESVPISDTIIPAVPPPTDLRFTNIGPDTMRVTWAPPPSIDLTNFLVRYSPVKNEEDVAELSISPSDNAVVLTNLLPGTEYVVSVSSVYEQHESTPLRGRQKTGLDSPTGIDFSDITANSFTVHWIAPRATITGYRIRHHPEHFSGRPREDRVPHSRNSITLTNLTPGTEYVVSIVALNGREESPLLIGQQSTVSDVPRDLEVVAATPTSLLISWDAPAVTVRYYRITYGETGGNSPVQEFTVPGSKSTATISGLKPGVDYTITVYAVTGRGDSPASSKPISINYRTEIDKPSQMQVTDVQDNSISVKWLPSSSPVTGYRVTTTPKNGPGPTKTKTAGPDQTEMTIEGLQPTVEYVVSVYAQNPSGESQPLVQTAVTTIPAPTDLKFTQVTPTSLSAQWTPPNVQLTGYRVRVTPKEKTGPMKEINLAPDSSSVVVSGLMVATKYEVSVYALKDTLTSRPAQGVVTTLENVSPPRRARVTDATETTITISWRTKTETITGFQVDAVPANGQTPIQRTIKPDVRSYTITGLQPGTDYKIYLYTLNDNARSSPVVIDASTAIDAPSNLRFLATTPNSLLVSWQPPRARITGYIIKYEKPGSPPREVVPRPRPGVTEATITGLEPGTEYTIYVIALKNNQKSEPLIGRKKTDELPQLVTLPHPNLHGPEILDVPSTVQKTPFVTHPGYDTGNGIQLPGTSGQQPSVGQQMIFEEHGFRRTTPPTTATPIRHRPRPYPPNVGQEALSQTTISWAPFQDTSEYIISCHPVGTDEEPLQFRVPGTSTSATLTGLTRGATYNVIVEALKDQQRHKVREEVVTVGNSVNEGLNQPTDDSCFDPYTVSHYAVGDEWERMSESGFKLLCQCLGFGSGHFRCDSSRWCHDNGVNYKIGEKWDRQGENGQMMSCTCLGNGKGEFKCDPHEATCYDDGKTYHVGEQWQKEYLGAICSCTCFGGQRGWRCDNCRRPGGEPSPEGTTGQSYNQYSQRYHQRTNTNVNCPIECFMPLDVQADREDSRE

SEQ ID NO: 6254 - protein, 2330 aa, Homo sapiens
MLRGPGPGLLLLAVQCLGTAVPSTGASKSKRQAQQMVQPQSPVAVSQSKPGCYDNGKHYQINQQWERTYLGNALVCTCYGGSRGFNCESKPEAEETCFDKYTGNTYRVGDTYERPKDSMIWDCTCIGAGRGRISCTIANRCHEGGQSYKIGDTWRRPHETGGYMLECVCLGNGKGEWTCKPIAEKCFDHAAGTSYVVGETWEKPYQGWMMVDCTCLGEGSGRITCTSRNRCNDQDTRTSYRIGDTWSKKDNRGNLLQCICTGNGRGEWKCERHTSVQTTSSGSGPFTDVRAAVYQPQPHPQPPPYGHCVTDSGVVYSVGMQWLKTQGNKQMLCTCLGNGVSCQETAVTQTYGGNSNGEPCVLPFTYNGRTFYSCTTEGRQDGHLWCSTTSNYEQDQKYSFCTDHTVLVQTRGGNSNGALCHFPFLYNNHNYTDCTSEGRRDNMKWCGTTQNYDADQKFGFCPMAAHEEICTTNEGVMYRIGDQWDKQHDMGHMMRCTCVGNGRGEWTCIAYSQLRDQCIVDDITYNVNDTFHKRHEEGHMLNCTCFGQGRGRWKCDPVDQCQDSETGTFYQIGDSWEKYVHGVRYQCYCYGRGIGEWHCQPLQTYPSSSGPVEVFITETPSQPNSHPIQWNAPQPSHISKYILRWRPKNSVGRWKEATIPGHLNSYTIKGLKPGVVYEGQLISIQQYGHQEVTRFDFTTTSTSTPVTSNTVTGETTPFSPLVATSESVTEITASSFVVSWVSASDTVSGFRVEYELSEEGDEPQYLDLPSTATSVNIPDLLPGRKYIVNVYQISEDGEQSLILSTSQTTAPDAPPDTTVDQVDDTSIVVRWSRPQAPITGYRIVYSPSVEGSSTELNLPETANSVTLSDLQPGVQYNITIYAVEENQESTPVVIQQETTGTPRSDTVPSPRDLQFVEVTDVKVTIMWTPPESAVTGYRVDVIPVNLPGEHGQRLPISRNTFAEVTGLSPGVTYYFKVFAVSHGRESKPLTAQQTTKLDAPTNLQFVNETDSTVLVRWTPPRAQITGYRLTVGLTRRGQPRQYNVGPSVSKYPLRNLQPASEYTVSLVAIKGNQESPKATGVFTTLQPGSSIPPYNTEVTETTIVITWTPAPRIGFKLGVRPSQGGEAPREVTSDSGSIVVSGLTPGVEYVYTIQVLRDGQERDAPIVNKVVTPLSPPTNLHLEANPDTGVLTVSWERSTTPDITGYRITTTPTNGQQGNSLEEVVHADQSSCTFDNLSPGLEYNVSVYTVKDDKESVPISDTIIPAVPPPTDLRFTNIGPDTMRVTWAPPPSIDLTNFLVRYSPVKNEEDVAELSISPSDNAVVLTNLLPGTEYVVSVSSVYEQHESTPLRGRQKTGLDSPTGIDFSDITANSFTVHWIAPRATITGYRIRHHPEHFSGRPREDRVPHSRNSITLTNLTPGTEYVVSIVALNGREESPLLIGQQSTVSDVPRDLEVVAATPTSLLISWDAPAVTVRYYRITYGETGGNSPVQEFTVPGSKSTATISGLKPGVDYTITVYAVTGRGDSPASSKPISINYRTEIDKPSQMQVTDVQDNSISVKWLPSSSPVTGYRVTTTPKNGPGPTKTKTAGPDQTEMTIEGLQPTVEYVVSVYAQNPSGESQPLVQTAVTNIDRPKGLAFTDVDVDSIKIAWESPQGQVSRYRVTYSSPEDGIHELFPAPDGEEDTAELQGLRPGSEYTVSVVALHDDMESQPLIGTQSTAIPAPTDLKFTQVTPTSLSAQWTPPNVQLTGYRVRVTPKEKTGPMKEINLAPDSSSVVVSGLMVATKYEVSVYALKDTLTSRPAQGVVTTLENVSPPRRARVTDATETTITISWRTKTETITGFQVDAVPANGQTPIQRTIKPDVRSYTITGLQPGTDYKIYLYTLNDNARSSPVVIDASTAIDAPSNLRFLATTPNSLLVSWQPPRARITGYIIKYEKPGSPPREVVPRPRPGVTEATITGLEPGTEYTIYVIALKNNQKSEPLIGRKKTVQKTPFVTHPGYDTGNGIQLPGTSGQQPSVGQQMIFEEHGFRRTTPPTTATPIRHRPRPYPPNVGQEALSQTTISWAPFQDTSEYIISCHPVGTDEEPLQFRVPGTSTSATLTGLTRGATYNVIVEALKDQQRHKVREEVVTVGNSVNEGLNQPTDDSCFDPYTVSHYAVGDEWERMSESGFKLLCQCLGFGSGHFRCDSSRWCHDNGVNYKIGEKWDRQGENGQMMSCTCLGNGKGEFKCDPHEATCYDDGKTYHVGEQWQKEYLGAICSCTCFGGQRGWRCDNCRRPGGEPSPEGTTGQSYNQYSQRYHQRTNTNVNCPIECFMPLDVQADREDSRE

SEQ ID NO: 6255 - protein, 1103 aa, Homo sapiens
LRWTPLNSSTIIGYRITVVAAGEGIPIFEDFVDSSVGYYTVTGLEPGIDYDISVITLINGGESAPTTLTQQTAVPPPTDLRFTNIGPDTMRVTWAPPPSIDLTNFLVRYSPVKNEEDVAELSISPSDNAVVLTNLLPGTEYVVSVSSVYEQHESTPLRGRQKTGLDSPTGIDFSDITANSFTVHWIAPRATITGYRIRHHPEHFSGRPREDRVPHSRNSITLTNLTPGTEYVVSIVALNGREESPLLIGQQSTVSDVPRDLEVVAATPTSLLISWDAPAVTVRYYRITYGETGGNSPVQEFTVPGSKSTATISGLKPGVDYTITVYAVTGRGDSPASSKPISINYRTEIDKPSQMQVTDVQDNSISVKWLPSSSPVTGYRVTTTPKNGPGPTKTKTAGPDQTEMTIEGLQPTVEYVVSVYAQNPSGESQPLVQTAVTTIPAPTDLKFTQVTPTSLSAQWTPPNVQLTGYRVRVTPKEKTGPMKEINLAPDSSSVVVSGLMVATKYEVSVYALKDTLTSRPAQGVVTTLENVSPPRRARVTDATETTITISWRTKTETITGFQVDAVPANGQTPIQRTIKPDVRSYTITGLQPGTDYKIYLYTLNDNARSSPVVIDASTAIDAPSNLRFLATTPNSLLVSWQPPRARITGYIIKYEKPGSPPREVVPRPRPGVTEATITGLEPGTEYTIYVIALKNNQKSEPLIGRKKTDELPQLVTLPHPNLHGPEILDVPSTVQKTPFVTHPGYDTGNGIQLPGTSGQQPSVGQQMIFEEHGFRRTTPPTTATPIRHRPRPYPPNVGEEIQIGHIPREDVDYHLYPHGPGLNPNASTGQEALSQTTISWAPFQDTSEYIISCHPVGTDEEPLQFRVPGTSTSATLTGLTRGATYNVIVEALKDQQRHKVREEVVTVGNSVNEGLNQPTDDSCFDPYTVSHYAVGDEWERMSESGFKLLCQCLGFGSGHFRCDSSRWCHDNGVNYKIGEKWDRQGENGQMMSCTCLGNGKGEFKCDPHEATCYDDGKTYHVGEQWQKEYLGAICSCTCFGGQRGWRCDNCRRPGGEPSPEGTTGQSYNQYSQRYHQRTNTNVNCPIECFMPLDVQADREDSRE

SEQ ID NO: 6256 - protein, 103 aa, Homo sapiens
MPVSVSSGRTFPKRGQTCVVHYTGMLEDGKKFDSSRDRNKPFKFMLGKQEVIRGWEEGVAQMSVGQRAKLTISPDYAYGATGHPGIIPPHATLVFDVELLKLE

SEQ ID NO: 6257 - protein, 108 aa, Homo sapiens
MGVQVETISPGDGRTFPKRGQTCVVHYTGMLEDGKKFDSSRDRNKPFKFMLGKQEVIRGWEEGVAQMSVGQRAKLTISPDYAYGATGHPGIIPPHATLVFDVELLKLE

SEQ ID NO: 6258 - protein, 103 aa, Homo sapiens; identical to SEQ ID NO: 6256

SEQ ID NO: 6259 - protein, 108 aa, Homo sapiens; identical to SEQ ID NO: 6257

SEQ ID NO: 6260 - protein, 92 aa, Homo sapiens
MGVQVETISPGDGMLEDGKKFDSSRDRNKPFKFMLGKQEVIRGWEEGVAQMSVGQRAKLTISPDYAYGATGHPGIIPPHATLVFDVELLKLE

SEQ ID NO: 6261 - protein, 380 aa, Homo sapiens
MGIQGLAKLIADVAPSAIRENDIKSYFGRKVAIDASMSIYQFLIAVRQGGDVLQNEEGETTSHLMGMFYRTIRMMENGIKPVYVFDGKPPQLKSGELAKRSERRAEAEKQLQQAQAAGAEQEVEKFTKRLVKVTKQHNDECKHLLSLMGIPYLDAPSEAEASCAALVKAGKVYAAATEDMDCLTFGSPVLMRHLTASEAKKLPIQEFHLSRILQELGLNQEQFVDLCILLGSDYCESIRGIGPKRAVDLIQKHKSIEEIVRRLDPNKYPVPENWLHKEAHQLFLEPEVLDPESVELKWSEPNEEELIKFMCGEKQFSEERIRSGVKRLSKSRQGSTQGRLDDFFKVTGSLSSAKRKEPEPKGSTKKKAKTGAAGKFKRGK

SEQ ID NO: 6262 - protein, 165 aa, Homo sapiens
MGIQGLAKLIADVAPSAIRENDIKSYFGRKVAIDASMSIYQFLIAVRQGGDVLQNEEGETTSHLMGMFYRTIRMMENGIKPVYVFDGKPPQLKSGELAKRSERRAEAEKQLQQAQAAGAEQEVEKFTKRLVKVTKQHNDECKHLLSLMGIPYLDAPSEAEASCAA

SEQ ID NO: 6263 - protein, 1338 aa, Homo sapiens
MVSYWDTGVLLCALLSCLLLTGSSSGSKLKDPELSLKGTQHIMQAGQTLHLQCRGEAAHKWSLPEMVSKESERLSITKSACGRNGKQFCSTLTLNTAQANHTGFYSCKYLAVPTSKKKETESAIYIFISDTGRPFVEMYSEIPEIIHMTEGRELVIPCRVTSPNITVTLKKFPLDTLIPDGKRIIWDSRKGFIISNATYKEIGLLTCEATVNGHLYKTNYLTHRQTNTIIDVQISTPRPVKLLRGHTLVLNCTATTPLNTRVQMTWSYPDEKNKRASVRRRIDQSNSHANIFYSVLTIDKMQNKDKGLYTCRVRSGPSFKSVNTSVHIYDKAFITVKHRKQQVLETVAGKRSYRLSMKVKAFPSPEVVWLKDGLPATEKSARYLTRGYSLIIKDVTEEDAGNYTILLSIKQSNVFKNLTATLIVNVKPQIYEKAVSSFPDPALYPLGSRQILTCTAYGIPQPTIKWFWHPCNHNHSEARCDFCSNNEESFILDADSNMGNRIESITQRMAIIEGKNKMASTLVVADSRISGIYICIASNKVGTVGRNISFYITDVPNGFHVNLEKMPTEGEDLKLSCTVNKFLYRDVTWILLRTVNNRTMHYSISKQKMAITKEHSITLNLTIMNVSLQDSGTYACRARNVYTGEEILQKKEITIRDQEAPYLLRNLSDHTVAISSSTTLDCHANGVPEPQITWFKNNHKIQQEPGIILGPGSSTLFIERVTEEDEGVYHCKATNQKGSVESSAYLTVQGTSDKSNLELITLTCTCVAATLFWLLLTLFIRKMKRSSSEIKTDYLSIIMDPDEVPLDEQCERLPYDASKWEFARERLKLGKSLGRGAFGKVVQASAFGIKKSPTCRTVAVKMLKEGATASEYKALMTELKILTHIGHHLNVVNLLGACTKQGGPLMVIVEYCKYGNLSNYLKSKRDLFFLNKDAALHMEPKKEKMEPGLEQGKKPRLDSVTSSESFASSGFQEDKSLSDVEEEEDSDGFYKEPITMEDLISYSFQVARGMEFLSSRKCIHRDLAARNILLSENNVVKICDFGLARDIYKNPDYVRKGDTRLPLKWMAPESIFDKIYSTKSDVWSYGVLLWEIFSLGGSPYPGVQMDEDFCSRLREGMRMRAPEYSTPEIYQIMLDCWHRDPKERPRFAELVEKLGDLLQANVQQDGKDYIPINAILTGNSGFTYSTPAFSEDFFKESISAPKFNSGSSDDVRYVNAFKFMSLERIKTFEELLPNATSMFDDYQGDSSTLLASPMLKRFTWTDSKPKASLKIDLRVTSKSKESGLSDVSRPSFCHSSCGHVSEGKRRFTYDHAELERKIACCSPPPDYNSVVLYSTPPI

SEQ ID NO: 6264 - protein, 176 aa, Homo sapiens
MVSYWDTGVLLCALLSCLLLTGSSSGSKLKDPELSLKGTQHIMQAGQTLHLQCRGEAAHKWSLPEMVSKESERLSITKSACGRNGKQFCSTLTLNTAQANHTGFYSCKYLAVPTSKKKETESAIYIFISDTGRPFVEMYSEIPEIIHMTEGRELVIPCRVTSPNITVTLKKKNKRA

SEQ ID NO: 6265 - protein, 541 aa, Homo sapiens
MVSYWDTGVLLCALLSCLLLTGSSSGSKLKDPELSLKGTQHIMQAGQTLHLQCRGEAAHKWSLPEMVSKESERLSITKSACGRNGKQFCSTLTLNTAQANHTGFYSCKYLAVPTSKKKETESAIYIFISDTGRPFVEMYSEIPEIIHMTEGRELVIPCRVTSPNITVTLKKFPLDTLIPDGKRIIWDSRKGFIISNATYKEIGLLTCEATVNGHLYKTNYLTHRQTNTIIDVQISTPRPVKLLRGHTLVLNCTATTPLNTRVQMTWSYPDEKNKRASVRRRIDQSNSHANIFYSVLTIDKMQNKDKGLYTCRVRSGPSFKSVNTSVHIYDKAFITVKHRKQQVLETVAGKRSYRLSMKVKAFPSPEVVWLKDGLPATEKSARYLTRGYSLIIKDVTEEDAGNYTILLSIKQSNVFKNLTATLIVNVKPQIYEKAVSSFPDPALYPLGSRQILTCTAYGIPQPTIKWFWHPCNHNHSEARCDFCSNNEESFILDADSNMGNRIESITQRMAIIEGKNKLPPANSSFMLPPTSFSSNYFHFLP

SEQ ID NO: 6266 - protein, 556 aa, Homo sapiens
MKRSSSEIKTDYLSIIMDPDEVPLDEQCERLPYDASKWEFARERLKLGKSLGRGAFGKVVQASAFGIKKSPTCRTVAVKMLKEGATASEYKALMTELKILTHIGHHLNVVNLLGACTKQGGPLMVIVEYCKYGNLSNYLKSKRDLFFLNKDAALHMEPKKEKMEPGLEQGKKPRLDSVTSSESFASSGFQEDKSLSDVEEEEDSDGFYKEPITMEDLISYSFQVARGMEFLSSRKCIHRDLAARNILLSENNVVKICDFGLARDIYKNPDYVRKGDTRLPLKWMAPESIFDKIYSTKSDVWSYGVLLWEIFSLGGSPYPGVQMDEDFCSRLREGMRMRAPEYSTPEIYQIMLDCWHRDPKERPRFAELVEKLGDLLQANVQQDGKDYIPINAILTGNSGFTYSTPAFSEDFFKESISAPKFNSGSSDDVRYVNAFKFMSLERIKTFEELLPNATSMFDDYQGDSSTLLASPMLKRFTWTDSKPKASLKIDLRVTSKSKESGLSDVSRPSFCHSSCGHVSEGKRRFTYDHAELERKIACCSPPPDYNSVVLYSTPPI

SEQ ID NO: 6267 - protein, 14 aa, Homo sapiens
ELSNFECLHPCSQE

SEQ ID NO: 6268 - protein, 733 aa, Homo sapiens
MVSYWDTGVLLCALLSCLLLTGSSSGSKLKDPELSLKGTQHIMQAGQTLHLQCRGEAAHKWSLPEMVSKESERLSITKSACGRNGKQFCSTLTLNTAQANHTGFYSCKYLAVPTSKKKETESAIYIFISDTGRPFVEMYSEIPEIIHMTEGRELVIPCRVTSPNITVTLKKFPLDTLIPDGKRIIWDSRKGFIISNATYKEIGLLTCEATVNGHLYKTNYLTHRQTNTIIDVQISTPRPVKLLRGHTLVLNCTATTPLNTRVQMTWSYPDEKNKRASVRRRIDQSNSHANIFYSVLTIDKMQNKDKGLYTCRVRSGPSFKSVNTSVHIYDKAFITVKHRKQQVLETVAGKRSYRLSMKVKAFPSPEVVWLKDGLPATEKSARYLTRGYSLIIKDVTEEDAGNYTILLSIKQSNVFKNLTATLIVNVKPQIYEKAVSSFPDPALYPLGSRQILTCTAYGIPQPTIKWFWHPCNHNHSEARCDFCSNNEESFILDADSNMGNRIESITQRMAIIEGKNKMASTLVVADSRISGIYICIASNKVGTVGRNISFYITDVPNGFHVNLEKMPTEGEDLKLSCTVNKFLYRDVTWILLRTVNNRTMHYSISKQKMAITKEHSITLNLTIMNVSLQDSGTYACRARNVYTGEEILQKKEITIRDQEAPYLLRNLSDHTVAISSSTTLDCHANGVPEPQITWFKNNHKIQQEPELYTSTSPSSSSSSPLSSSSSSSSSSSS

SEQ ID NO: 6269 - protein, 361 aa, Homo sapiens
MNSDLLVDSDGFYKEPITMEDLISYSFQVARGMEFLSSRKCIHRDLAARNILLSENNVVKICDFGLARDIYKNPDYVRKGDTRLPLKWMAPESIFDKIYSTKSDVWSYGVLLWEIFSLGGSPYPGVQMDEDFCSRLREGMRMRAPEYSTPEIYQIMLDCWHRDPKERPRFAELVEKLGDLLQANVQQDGKDYIPINAILTGNSGFTYSTPAFSEDFFKESISAPKFNSGSSDDVRYVNAFKFMSLERIKTFEELLPNATSMFDDYQGDSSTLLASPMLKRFTWTDSKPKASLKIDLRVTSKSKESGLSDVSRPSFCHSSCGHVSEGKRRFTYDHAELERKIACCSPPPDYNSVVLYSTPPI

SEQ ID NO: 6270 - protein, 24 aa, Homo sapiens
LPPANSSFMLPPTSFSSNYFHFLP

SEQ ID NO: 6271 - protein, 235 aa, Homo sapiens
MTVLAPAWSPTTYLLLLLLLSSGLSGTQDCSFQHSPISSDFAVKIRELSDYLLQDYPVTVASNLQDEELCGGLWRLVLAQRWMERLKTVAGSKMQGLLERVNTEIHFVTKCAFQPPPSCLRFVQTNISRLLQETSEQLVALKPWITRQNFSRCLELQCQPDSSTLPPPWSPRPLEATAPTAPQPPLLLLLLLPVGLLLLAAAWCLHWQRTRRRTPRPGEQVPPVPSPQDLLLVEH

SEQ ID NO: 6272 - protein, 178 aa, Homo sapiens
MTVLAPAWSPTTYLLLLLLLSSGLSGTQDCSFQHSPISSDFAVKIRELSDYLLQDYPVTVASNLQDEELCGGLWRLVLAQRWMERLKTVAGSKMQGLLERVNTEIHFVTKCAFQPPPSCLRFVQTNISRLLQETSEQLVALKPWITRQNFSRCLELQCQPVETVFHRVSQDGLDLLTS

SEQ ID NO: 6273 - protein, 235 aa, Homo sapiens; identical to SEQ ID NO: 6271

SEQ ID NO: 6274 - protein, 1363 aa, Homo sapiens
MQRGAALCLRLWLCLGLLDGLVSGYSMTPPTLNITEESHVIDTGDSLSISCRGQHPLEWAWPGAQEAPATGDKDSEDTGVVRDCEGTDARPYCKVLLLHEVHANDTGSYVCYYKYIKARIEGTTAASSYVFVRDFEQPFINKPDTLLVNRKDAMWVPCLVSIPGLNVTLRSQSSVLWPDGQEVVWDDRRGMLVSTPLLHDALYLQCETTWGDQDFLSNPFLVHITGNELYDIQLLPRKSLELLVGEKLVLNCTVWAEFNSGVTFDWDYPGKQAERGKWVPERRSQQTHTELSSILTIHNVSQHDLGSYVCKANNGIQRFRESTEVIVHENPFISVEWLKGPILEATAGDELVKLPVKLAAYPPPEFQWYKDGKALSGRHSPHALVLKEVTEASTGTYTLALWNSAAGLRRNISLELVVNVPPQIHEKEASSPSIYSRHSRQALTCTAYGVPLPLSIQWHWRPWTPCKMFAQRSLRRRQQQDLMPQCRDWRAVTTQDAVNPIESLDTWTEFVEGKNKTVSKLVIQNANVSAMYKCVVSNKVGQDERLIYFYVTTIPDGFTIESKPSEELLEGQPVLLSCQADSYKYEHLRWYRLNLSTLHDAHGNPLLLDCKNVHLFATPLAASLEEVAPGARHATLSLSIPRVAPEHEGHYVCEVQDRRSHDKHCHKKYLSVQALEAPRLTQNLTDLLVNVSDSLEMQCLVAGAHAPSIVWYKDERLLEEKSGVDLADSNQKLSIQRVREEDAGRYLCSVCNAKGCVNSSASVAVEGSEDKGSMEIVILVGTGVIAVFFWVLLLLIFCNMRRPAHADIKTGYLSIIMDPGEVPLEEQCEYLSYDASQWEFPRERLHLGRVLGYGAFGKVVEASAFGIHKGSSCDTVAVKMLKEGATASEHRALMSELKILIHIGNHLNVVNLLGACTKPQGPLMVIVEFCKYGNLSNFLRAKRDAFSPCAEKSPEQRGRFRAMVELARLDRRRPGSSDRVLFARFSKTEGGARRASPDQEAEDLWLSPLTMEDLVCYSFQVARGMEFLASRKCIHRDLAARNILLSESDVVKICDFGLARDIYKDPDYVRKGSARLPLKWMAPESIFDKVYTTQSDVWSFGVLLWEIFSLGASPYPGVQINEEFCQRLRDGTRMRAPELATPAIRRIMLNCWSGDPKARPAFSELVEILGDLLQGRGLQEEEEVCMAPRSSQSSEEGSFSQVSTMALHIAQADAEDSPPSLQRHSLAARYYNWVSFPGCLARGAETRGSSRMKTFEEFPMTPTTYKGSVDNQTDSGMVLASEEFEQIESRHRQESGFSCKGPGQNVAVTRAHPDSQGRRRRPERGARGGQVFYNSEYGELSEPSEEDHCSPSARVTFFTDNSY

SEQ ID NO: 6275 - protein, 760 aa, Homo sapiens
MLVSTPLLHDALYLQCETTWGDQDFLSNPFLVHITGNELYDIQLLPRKSLELLVGEKLVLNCTVWAEFNSGVTFDWDYPGKQAERGKWVPERRSQQTHTELSSILTIHNVSQHDLGSYVCKANNGIQRFRESTEVIVHENPFISVEWLKGPILEATAGDELVKLPVKLAAYPPPEFQWYKDGKALSGRHSPHALVLKEVTEASTGTYTLALWNSAAGLRRNISLELVVNVPPQIHEKEASSPSIYSRHSRQALTCTAYGVPLPLSIQWHWRPWTPCKMFAQRSLRRRQQQDLMPQCRDWRAVTTQDAVNPIESLDTWTEFVEGKNKTVSKLVIQNANVSAMYKCVVSNKVGQDERLIYFYVTTIPDGFTIESKPSEELLEGQPVLLSCQADSYKYEHLRWYRLNLSTLHDAHGNPLLLDCKNVHLFATPLAASLEEVAPGARHATLSLSIPRVAPEHEGHYVCEVQDRRSHDKHCHKKYLSVQALEAPRLTQNLTDLLVNVSDSLEMQCLVAGAHAPSIVWYKDERLLEEKSGVDLADSNQKLSIQRVREEDAGRYLCSVCNAKGCVNSSASVAVEGSEDKGSMEIVILVGTGVIAVFFWVLLLLIFCNMRRPAHADIKTGYLSIIMDPGEVPLEEQCEYLSYDASQWEFPRERLHLGRVLGYGAFGKVVEASAFGIHKGSSCDTVAVKMLKGVGSAGGRGSLAGEEQQLGVGRWDGNSGRETEAGSQSHPRFYREAAGFRAEGPPEPPSVGPAGCPGGP

SEQ ID NO: 6276 - protein, 1298 aa, Homo sapiens
MQRGAALCLRLWLCLGLLDGLVSGYSMTPPTLNITEESHVIDTGDSLSISCRGQHPLEWAWPGAQEAPATGDKDSEDTGVVRDCEGTDARPYCKVLLLHEVHANDTGSYVCYYKYIKARIEGTTAASSYVFVRDFEQPFINKPDTLLVNRKDAMWVPCLVSIPGLNVTLRSQSSVLWPDGQEVVWDDRRGMLVSTPLLHDALYLQCETTWGDQDFLSNPFLVHITGNELYDIQLLPRKSLELLVGEKLVLNCTVWAEFNSGVTFDWDYPGKQAERGKWVPERRSQQTHTELSSILTIHNVSQHDLGSYVCKANNGIQRFRESTEVIVHENPFISVEWLKGPILEATAGDELVKLPVKLAAYPPPEFQWYKDGKALSGRHSPHALVLKEVTEASTGTYTLALWNSAAGLRRNISLELVVNVPPQIHEKEASSPSIYSRHSRQALTCTAYGVPLPLSIQWHWRPWTPCKMFAQRSLRRRQQQDLMPQCRDWRAVTTQDAVNPIESLDTWTEFVEGKNKTVSKLVIQNANVSAMYKCVVSNKVGQDERLIYFYVTTIPDGFTIESKPSEELLEGQPVLLSCQADSYKYEHLRWYRLNLSTLHDAHGNPLLLDCKNVHLFATPLAASLEEVAPGARHATLSLSIPRVAPEHEGHYVCEVQDRRSHDKHCHKKYLSVQALEAPRLTQNLTDLLVNVSDSLEMQCLVAGAHAPSIVWYKDERLLEEKSGVDLADSNQKLSIQRVREEDAGRYLCSVCNAKGCVNSSASVAVEGSEDKGSMEIVILVGTGVIAVFFWVLLLLIFCNMRRPAHADIKTGYLSIIMDPGEVPLEEQCEYLSYDASQWEFPRERLHLGRVLGYGAFGKVVEASAFGIHKGSSCDTVAVKMLKEGATASEHRALMSELKILIHIGNHLNVVNLLGACTKPQGPLMVIVEFCKYGNLSNFLRAKRDAFSPCAEKSPEQRGRFRAMVELARLDRRRPGSSDRVLFARFSKTEGGARRASPDQEAEDLWLSPLTMEDLVCYSFQVARGMEFLASRKCIHRDLAARNILLSESDVVKICDFGLARDIYKDPDYVRKGSARLPLKWMAPESIFDKVYTTQSDVWSFGVLLWEIFSLGASPYPGVQINEEFCQRLRDGTRMRAPELATPAIRRIMLNCWSGDPKARPAFSELVEILGDLLQGRGLQEEEEVCMAPRSSQSSEEGSFSQVSTMALHIAQADAEDSPPSLQRHSLAARYYNWVSFPGCLARGAETRGSSRMKTFEEFPMTPTTYKGSVDNQTDSGMVLASEEFEQIESRHRQESGFR

SEQ ID NO: 6277 - protein, 1306 aa, Homo sapiens
MQRGAALCLRLWLCLGLLDGLVSGYSMTPPTLNITEESHVIDTGDSLSISCRGQHPLEWAWPGAQEAPATGDKDSEDTGVVRDCEGTDARPYCKVLLLHEVHANDTGSYVCYYKYIKARIEGTTAASSYVFVRDFEQPFINKPDTLLVNRKDAMWVPCLVSIPGLNVTLRSQSSVLWPDGQEVVWDDRRGMLVSTPLLHDALYLQCETTWGDQDFLSNPFLVHITGNELYDIQLLPRKSLELLVGEKLVLNCTVWAEFNSGVTFDWDYPGKQAERGKWVPERRSQQTHTELSSILTIHNVSQHDLGSYVCKANNGIQRFRESTEVIVHENPFISVEWLKGPILEATAGDELVKLPVKLAAYPPPEFQWYKDGKALSGRHSPHALVLKEVTEASTGTYTLALWNSAAGLRRNISLELVVNVPPQIHEKEASSPSIYSRHSRQALTCTAYGVPLPLSIQWHWRPWTPCKMFAQRSLRRRQQQDLMPQCRDWRAVTTQDAVNPIESLDTWTEFVEGKNKTVSKLVIQNANVSAMYKCVVSNKVGQDERLIYFYVTTIPDGFTIESKPSEELLEGQPVLLSCQADSYKYEHLRWYRLNLSTLHDAHGNPLLLDCKNVHLFATPLAASLEEVAPGARHATLSLSIPRVAPEHEGHYVCEVQDRRSHDKHCHKKYLSVQALEAPRLTQNLTDLLVNVSDSLEMQCLVAGAHAPSIVWYKDERLLEEKSGVDLADSNQKLSIQRVREEDAGRYLCSVCNAKGCVNSSASVAVEGSEDKGSMEIVILVGTGVIAVFFWVLLLLIFCNMRRPAHADIKTGYLSIIMDPGEVPLEEQCEYLSYDASQWEFPRERLHLGRVLGYGAFGKVVEASAFGIHKGSSCDTVAVKMLKEGATASEHRALMSELKILIHIGNHLNVVNLLGACTKPQGPLMVIVEFCKYGNLSNFLRAKRDAFSPCAEKSPEQRGRFRAMVELARLDRRRPGSSDRVLFARFSKTEGGARRASPDQEAEDLWLSPLTMEDLVCYSFQVARGMEFLASRKCIHRDLAARNILLSESDVVKICDFGLARDIYKDPDYVRKGSARLPLKWMAPESIFDKVYTTQSDVWSFGVLLWEIFSLGASPYPGVQINEEFCQRLRDGTRMRAPELATPAIRRIMLNCWSGDPKARPAFSELVEILGDLLQGRGLQEEEEVCMAPRSSQSSEEGSFSQVSTMALHIAQADAEDSPPSLQRHSLAARYYNWVSFPGCLARGAETRGSSRMKTFEEFPMTPTTYKGSVDNQTDSGMVLASEEFEQIESRHRQESGFRGTRRTRGA

SEQ ID NO: 6278 - protein, 579 aa, Homo sapiens
MNAIVALCHFCELHGPRTLFCTEVLHAPLPQGDGNEDSPGQGEQAEEEEGGIQMNSRMRAHSPAEGASVESSSPGPKKSDMCEGCRSLAAGHPGYISHDKETSIKYVSHQHPSHPQLFSIVRQACVRSLSCEVCPGREGPIFFGDEQHGFVFSHTFFIKDSLARGFQRWYSIITIMMDRIYLINSWPFLLGKVRGIIDELQGKALKVFEAEQFGCPQRAQRMNTAFTPFLHQRNGNAARSLTSLTSDDNLWACLHTSFAWLLKACGSRLTEKLLEGAPTEDTLVQMEKLADLEEESESWDNSEAEEEEKAPVLPESTEGRELTQGPAESSSLSGCGSWQPRKLPVFKSLRHMRQVLGAPSFRMLAWHVLMGNQVIWKSRDVDLVQSAFEVLRTMLPVGCVRIIPYSSQYEEAYRCNFLGLSPHVQIPPHVLSSEFAVIVEVHAAARSTLHPVGCEDDQSLSKYEFVVTSGSPVAADRVGPTILNKIEAALTNQNLSVDVVDQCLVCLKEEWMNKVKVLFKFTKVDSRPKEDTQKLLSILGASEEDNVKLLKFWMTGLSKTYKSHLMSTVRSPTASESRN

SEQ ID NO: 6279 - protein, 197 aa, Homo sapiens
MNAIVALCHFCELHGPRTLFCTEVLHAPLPQGDGNEDSPGQGEQAEEEEGGIQMNSRMRAHSPAEGASVESSSPGPKKSDMCEGCRSLAAGHPGYISHDKETSIKYVSHQHPSHPQLFSIVRQACVRSLSCEVSLVATEPVSVGAHMLPGALGGLGASIAQGGRHWSSLRADPQISTAQGTGRLPCPELREESCWTC

SEQ ID NO: 6280 - protein, 342 aa, Homo sapiens
MNAIVALCHFCELHGPRTLFCTEVLHAPLPQGDGNEDSPGQGEQAEEEEGGIQMNSRMRAHSPAEGASVESSSPGPKKSDMCEGCRSLAAGHPGYISHDKETSIKYVSHQHPSHPQLFSIVRQACVRSLSCEVCPGREGPIFFGDEQHGFVFSHTFFIKDSLARGFQRWYSIITIMMDRIYLINSWPFLLGKVRGIIDELQGKALKVFEAEQFGCPQRAQRMNTAFTPFLHQRNGNAARSLTSLTSDDNLWACLHTSFAWLLKACGSRLTEKLLEGAPTEDTLVQMEKLAGEAGVLLPGPWPGWPWGGTSCLLSWQESLREGNAALNQPRTSLREAHPPISV

SEQ ID NO: 6281 - protein, 197 aa, Homo sapiens; identical to SEQ ID NO: 6279

SEQ ID NO: 6282 - protein, 153 aa, Homo sapiens
MNSRMRAHSPAEGASVESSSPGPKKSDMCEGCRSLAAGHPGYISHDKETSIKYVSHQHPSHPQLFSIVRQACVRSLSCEVCPGREGPIFFGDEQHGFVFSHTFFIKDSLARGFQRWYSIITIMMDRIYLINSWPFLLGKVRGIIDELQGKALK

SEQ ID NO: 6283 - protein, 472 aa, Homo sapiens
MLGTVKMEGHETSDWNSYYADTQEAYSSVPVSNMNSGLGSMNSMNTYMTMNTMTTSGNMTPASFNMSYANPGLGAGLSPGAVAGMPGGSAGAMNSMTAAGVTAMGTALSPSGMGAMGAQQAASMNGLGPYAAAMNPCMSPMAYAPSNLGRSRAGGGGDAKTFKRSYPHAKPPYSYISLITMAIQQAPSKMLTLSEIYQWIMDLFPYYRQNQQRWQNSIRHSLSFNDCFVKVARSPDKPGKGSYWTLHPDSGNMFENGCYLRRQKRFKCEKQPGAGGGGGSGSGGSGAKGGPESRKDPSGASNPSADSPLHRGVHGKTGQLEGAPAPGPAASPQTLDHSGATATGGASELKTPASSTAPPISSGPGALASVPASHPAHGLAPHESQLHLKGDPHYSFNHPFSINNLMSSSEQQHKLDFKAYEQALQYSPYGSTLPASLPLGSASVTTRSPIEPSALEPAYYQGVYSRPVLNTS

SEQ ID NO: 6284 - protein, 439 aa, Homo sapiens
MNSGLGSMNSMNTYMTMNTMTTSGNMTPASFNMSYANPGLGAGLSPGAVAGMPGGSAGAMNSMTAAGVTAMGTALSPSGMGAMGAQQAASMNGLGPYAAAMNPCMSPMAYAPSNLGRSRAGGGGDAKTFKRSYPHAKPPYSYISLITMAIQQAPSKMLTLSEIYQWIMDLFPYYRQNQQRWQNSIRHSLSFNDCFVKVARSPDKPGKGSYWTLHPDSGNMFENGCYLRRQKRFKCEKQPGAGGGGGSGSGGSGAKGGPESRKDPSGASNPSADSPLHRGVHGKTGQLEGAPAPGPAASPQTLDHSGATATGGASELKTPASSTAPPISSGPGALASVPASHPAHGLAPHESQLHLKGDPHYSFNHPFSINNLMSSSEQQHKLDFKAYEQALQYSPYGSTLPASLPLGSASVTTRSPIEPSALEPAYYQGVYSRPVLNTS

SEQ ID NO: 6285 - protein, 501 aa, Homo sapiens
MQARYSVSDPNALGVVPYLSEQNYYRAAGSYGGMASPMGVYSGHPEQYSAGMGRSYAPYHHHQPAAPKDLVKPPYSYIALITMAIQNAPEKKITLNGIYQFIMDRFPFYRENKQGWQNSIRHNLSLNECFVKVPRDDKKPGKGSYWTLDPDSYNMFENGSFLRRRRRFKKKDVSKEKEERAHLKEPPPAASKGAPATPHLADAPKEAEKKVVIKSEAASPALPVITKVETLSPESALQGSPRSAASTPAGSPDGSLPEHHAAAPNGLPGFSVENIMTLRTSPPGGELSPGAGRAGLVVPPLALPYAAAPPAAYGQPCAQGLEAGAAGGYQCSMRAMSLYTGAERPAHMCVPPALDEALSDHPSGPTSPLSALNLAAGQEGALAATGHHHQHHGHHHPQAPPPPPAPQPQPTPQPGAAAAQAASWYLNHSGDLNHLPGHTFAAQQQTFPNVREMFNSHRLGIENSTLGESQVSGNASCQLPYRSTPPLYRHAAPYSYDCTKY

SEQ ID NO: 6286 - protein, 655 aa, Homo sapiens
MAEAPQVVEIDPDFEPLPRPRSCTWPLPRPEFSQSNSATSSPAPSGSAAANPDAAAGLPSASAAAVSADFMSNLSLLEESEDFPQAPGSVAAAVAAAAAAAATGGLCGDFQGPEAGCLHPAPPQPPPPGPLSQHPPVPPAAAGPLAGQPRKSSSSRRNAWGNLSYADLITKAIESSAEKRLTLSQIYEWMVKSVPYFKDKGDSNSSAGWKNSIRHNLSLHSKFIRVQNEGTGKSSWWMLNPEGGKSGKSPRRRAASMDNNSKFAKSRSRAAKKKASLQSGQEGAGDSPGSQFSKWPASPGSHSNDDFDNWSTFRPRTSSNASTISGRLSPIMTEQDDLGEGDVHSMVYPPSAAKMASTLPSLSEISNPENMENLLDNLNLLSSPTSLTVSTQSSPGTMMQQTPCYSFAPPNTSLNSPSPNYQKYTYGQSSMSPLPQMPIQTLQDNKSSYGGMSQYNCAPGLLKELLTSDSPPHNDIMTPVDPGVAQPNSRVLGQNVMMGPNSVMSTYGSQASHNKMMNPSSHTHPGHAQQTSAVNGRPLPHTVSTMPHTSGMNRLTQVKTPVQVPLPHPMQMSALGGYSSVSSCNGYGRMGLLHQEKLPSDLDGMFIERLDCDMESIIRNDLMDGDTLDFNFDNVLPNQSFPHSVKTTTHSWVSG

SEQ ID NO: 6287 - protein, 673 aa, Homo sapiens
MAEAPASPAPLSPLEVELDPEFEPQSRPRSCTWPLQRPELQASPAKPSGETAADSMIPEEEDDEDDEDGGGRAGSAMAIGGGGGSGTLGSGLLLEDSARVLAPGGQDPGSGPATAAGGLSGGTQALLQPQQPLPPPQPGAAGGSGQPRKCSSRRNAWGNLSYADLITRAIESSPDKRLTLSQIYEWMVRCVPYFKDKGDSNSSAGWKNSIRHNLSLHSRFMRVQNEGTGKSSWWIINPDGGKSGKAPRRRAVSMDNSNKYTKSRGRAAKKKAALQTAPESADDSPSQLSKWPGSPTSRSSDELDAWTDFRSRTNSNASTVSGRLSPIMASTELDEVQDDDAPLSPMLYSSSASLSPSVSKPCTVELPRLTDMAGTMNLNDGLTENLMDDLLDNITLPPSQPSPTGGLMQRSSSFPYTTKGSGLGSPTSSFNSTVFGPSSLNSLRQSPMQTIQENKPATFSSMSHYGNQTLQDLLTSDSLSHSDVMMTQSDPLMSQASTAVSAQNSRRNVMLRNDPMMSFAAQPNQGSLVNQNLLHHQHQTQGALGGSRALSNSVSNMGLSESSSLGSAKHQQQSPVSQSMQTLSDSLSGSSLYSTSANLPVMGHEKFPSDLDLDMFNGSLECDMESIIRSELMDADGLDFNFDSLISTQNVVGLNVGNFTGAKQASSQSWVPG

SEQ ID NO: 6288 - protein, 673 aa, Homo sapiens; identical to SEQ ID NO: 6287

SEQ ID NO: 6289 - protein, 433 aa, Homo sapiens
MRVQNEGTGKSSWWIINPDGGKSGKAPRRRAVSMDNSNKYTKSRGRAAKKKAALQTAPESADDSPSQLSKWPGSPTSRSSDELDAWTDFRSRTNSNASTVSGRLSPIMASTELDEVQDDDAPLSPMLYSSSASLSPSVSKPCTVELPRLTDMAGTMNLNDGLTENLMDDLLDNITLPPSQPSPTGGLMQRSSSFPYTTKGSGLGSPTSSFNSTVFGPSSLNSLRQSPMQTIQENKPATFSSMSHYGNQTLQDLLTSDSLSHSDVMMTQSDPLMSQASTAVSAQNSRRNVMLRNDPMMSFAAQPNQGSLVNQNLLHHQHQTQGALGGSRALSNSVSNMGLSESSSLGSAKHQQQSPVSQSMQTLSDSLSGSSLYSTSANLPVMGHEKFPSDLDLDMSMGAWNVTWSPLSVVNSWMLMGWILTLIPSSPHRMLLV

SEQ ID NO: 6290 - protein, 453 aa, Homo sapiens
MRVQNEGTGKSSWWIINPDGGKSGKAPRRRAVSMDNSNKYTKSRGRAAKKKAALQTAPESADDSPSQLSKWPGSPTSRSSDELDAWTDFRSRTNSNASTVSGRLSPIMASTELDEVQDDDAPLSPMLYSSSASLSPSVSKPCTVELPRLTDMAGTMNLNDGLTENLMDDLLDNITLPPSQPSPTGGLMQRSSSFPYTTKGSGLGSPTSSFNSTVFGPSSLNSLRQSPMQTIQENKPATFSSMSHYGNQTLQDLLTSDSLSHSDVMMTQSDPLMSQASTAVSAQNSRRNVMLRNDPMMSFAAQPNQGSLVNQNLLHHQHQTQGALGGSRALSNSVSNMGLSESSSLGSAKHQQQSPVSQSMQTLSDSLSGSSLYSTSANLPVMGHEKFPSDLDLDMFNGSLECDMESIIRSELMDADGLDFNFDSLISTQNVVGLNVGNFTGAKQASSQSWVPG

SEQ ID NO: 6291 - protein, 147 aa, Homo sapiens
MSFRFGQHLIKPSVVFLKTELSFALVNRKPVVPGHVLVCPLRPVERFHDLRPDEVADLFQTTQRVGTVVEKHFHGTSLTFSMQDGPEAGQTVKHVHVHVLPRKAGDFHRNDSIYEELQKHDKEDFPASWRSEEEMAAEAAALRVYFQ

SEQ ID NO: 6292 - protein, 147 aa, Homo sapiens; identical to SEQ ID NO: 6291

SEQ ID NO: 6293 - protein, 147 aa, Homo sapiens; identical to SEQ ID NO: 6291

SEQ ID NO: 6294 - protein, 79 aa, Homo sapiens
MSFRFGQHLIKPSVVFLKTELSFALVNRKPVVPGHVLVCPLRPVERFHDLRPDEVADLFQTTQRVGTVVEKHFHGTSLT

SEQ ID NO: 6295 - protein, 147 aa, Homo sapiens; identical to SEQ ID NO: 6291

SEQ ID NO: 6296 - protein, 574 aa, Homo sapiens
MRDPGAAAPLSSLGLCALVLALLGALSAGAGAQPYHGEKGISVPDHGFCQPISIPLCTDIAYNQTILPNLLGHTNQEDAGLEVHQFYPLVKVQCSPELRFFLCSMYAPVCTVLDQAIPPCRSLCERARQGCEALMNKFGFQWPERLRCENFPVHGAGEICVGQNTSDGSGGPGGGPTAYPTAPYLPDLPFTALPPGASDGRGRPAFPFSCPRQLKVPPYLGYRFLGERDCGAPCEPGRANGLMYFKEEERRFARLWVGVWSVLCCASTLFTVLTYLVDMRRFSYPERPIIFLSGCYFMVAVAHVAGFLLEDRAVCVERFSDDGYRTVAQGTKKEGCTILFMVLYFFGMASSIWWVILSLTWFLAAGMKWGHEAIEANSQYFHLAAWAVPAVKTITILAMGQVDGDLLSGVCYVGLSSVDALRGFVLAPLFVYLFIGTSFLLAGFVSLFRIRTIMKHDGTKTEKLEKLMVRIGVFSVLYTVPATIVLACYFYEQAFREHWERTWLLQTCKSYAVPCPPGHFPPMSPDFTVFMIKYLMTMIVGITTGFWIWSGKTLQSWRRFYHRLSHSSKGETAV

SEQ ID NO: 6297 - protein, 258 aa, Homo sapiens
MAEYSYVKSTKLVLKGTKTKSKKKKSKDKKRKREEDEETQLDIVGIWWTVTNFGEISGTIAIEMDKGTYIHALDNGLFTLGAPHKEVDEGPSPPEQFTAVKLSDSRIALKSGYGKYLGINSDGLVVGRSDAIGPREQWEPVFQNGKMALLASNSCFIRCNEAGDIEAKSKTAGEEEMIKIRSCAERETKKKDDIPEEDKGNVKQCEINYVKKFQSFQDHKLKISKEDSKILKKARKDGFLHETLLDRRAKLKADRYCK

SEQ ID NO: 6298 - protein, 510 aa, Homo sapiens
MYRALRLLARSRPLVRAPAAALASAPGLGGAAVPSFWPPNAARMASQNSFRIEYDTFGELKVPNDKYYGAQTVRSTMNFKIGGVTERMPTPVIKAFGILKRAAAEVNQDYGLDPKIANAIMKAADEVAEGKLNDHFPLVVWQTGSGTQTNMNVNEVISNRAIEMLGGELGSKIPVHPNDHVNKSQSSNDTFPTAMHIAAAIEVHEVLLPGLQKLHDALDAKSKEFAQIIKIGRTHTQDAVPLTLGQEFSGYVQQVKYAMTRIKAAMPRIYELAAGGTAVGTGLNTRIGFAEKVAAKVAALTGLPFVTAPNKFEALAAHDALVELSGAMNTTACSLMKIANDIRFLGSGPRSGLGELILPENEPGSSIMPGKVNPTQCEAMTMVAAQVMGNHVAVTVGGSNGHFELNVFKPMMIKNVLHSARLLGDASVSFTENCVVGIQANTERINKLMNESLMLVTALNPHIGYDKAAKIAKTAHKNGSTLKETAIELGYLTAEQFDEWVKPKDMLGPK

SEQ ID NO: 6299 - protein, 178 aa, Homo sapiens
MSPSGRLCLLTIVGLILPTRGQTLKDTTSSSSADSTIMDIQVPTRAPDAVYTELQPTSPTPTWPADETPQPQTQTQQLEGTDGPLVTDPETHKSTKAAHPTDDTTTLSERPSPSTDVQTDPQTLKPSGFHEDDPFFYDEHTLRKRGLLVAAVLFITGIIILTSGKCRQLSRLCRNRCR

SEQ ID NO: 6300 - protein, 107 aa, Homo sapiens
MQTLSNIPCFCLHGSLLPSTDLATLSAHPTDDTTTLSERPSPSTDVQTDPQTLKPSGFHEDDPFFYDEHTLRKRGLLVAAVLFITGIIILTSGKCRQLSRLCRNRCR

SEQ ID NO: 6301 - protein, 96 aa, Homo sapiens
MSPSGRLCLLTIVGLILPTRGQTLKDTTSSSSADSTIMDIQVPTRAPDAVYTELQPTSPTPTWPADGAYITAYGVTHFLMNMLAVSSFFCLHTAPQ

SEQ ID NO: 6302 - protein, 178 aa, Homo sapiens; identical to SEQ ID NO: 6299

SEQ ID NO: 6303 - protein, 178 aa, Homo sapiens; identical to SEQ ID NO: 6299

SEQ ID NO: 6304 - protein, 178 aa, Homo sapiens; identical to SEQ ID NO: 6299

SEQ ID NO: 6305 - protein, 194 aa, Homo sapiens
MSPSGRLCLLTIVGLILPTRGQTLKDTTSSSSADSTIMDIQVPTRAPDAVYTELQPTSPTPTWPADETPQPQTQTQQLEGTDGPLVTDPETHKSTKAAHPTDDTTTLSERPSPSTDVQTDPQTLKPSGFHEDDPFFYDEHTLRKRGLLVAAVLFITGIIILTSENWGWVGRTPRPGGGLMTEGWVLKGPWAILF

SEQ ID NO: 6306 - protein, 505 aa, Homo sapiens
MSNICQRLWEYLEPYLPCLSTEADKSTVIENPGALCSPQSQRHGHYFVALFDYQARTAEDLSFRAGDKLQVLDTLHEGWWFARHLEKRRDGSSQQLQGYIPSNYVAEDRSLQAEPWFFGAIGRSDAEKQLLYSENKTGSFLIRESESQKGEFSLSVLDGAVVKHYRIKRLDEGGFFLTRRRIFSTLNEFVSHYTKTSDGLCVKLGKPCLKIQVPAPFDLSYKTVDQWEIDRNSIQLLKRLGSGQFGEVWEGLWNNTTPVAVKTLKPGSMDPNDFLREAQIMKNLRHPKLIQLYAVCTLEDPIYIITELMRHGSLQEYLQNDTGSKIHLTQQVDMAAQVASGMAYLESRNYIHRDLAARNVLVGEHNIYKVADFGLARVFKVDNEDIYESRHEIKLPVKWTAPEAIRSNKFSIKSDVWSFGILLYEIITYGKMPYSGMTGAQVIQMLAQNYRLPQPSNCPQQFYNIMLECWNAEPKERPTFETLRWKLEDYFETDSSYSDANNFIR

SEQ ID NO: 6307 - protein, 363 aa, Homo sapiens
MDSTSLLPNPWIRVLDGAVVKHYRIKRLDEGGFFLTRRRIFSTLNEFVSHYTKTSDGLCVKLGKPCLKIQVPAPFDLSYKTVDQWEIDRNSIQLLKRLGSGQFGEVWEGLWNNTTPVAVKTLKPGSMDPNDFLREAQIMKNLRHPKLIQLYAVCTLEDPIYIITELMRHGSLQEYLQNDTGSKIHLTQQVDMAAQVASGMAYLESRNYIHRDLAARNVLVGEHNIYKVADFGLARVFKVDNEDIYESRHEIKLPVKWTAPEAIRSNKFSIKSDVWSFGILLYEIITYGKMPYSGMTGAQVIQMLAQNYRLPQPSNCPQQFYNIMLECWNAEPKERPTFETLRWKLEDYFETDSSYSDANNFIR

SEQ ID NO: 6308 - protein, 375 aa, Homo sapiens
MRSVAPSGPKMGNITADNSSMSCTIDHTIHQTLAPVVYVTVLVVGFPANCLSLYFGYLQIKARNELGVYLCNLTVADLFYICSLPFWLQYVLQHDNWSHGDLSCQVCGILLYENIYISVGFLCCISVDRYLAVAHPFRFHQFRTLKAAVGVSVVIWAKELLTSIYFLMHEEVIEDENQHRVCFEHYPIQAWQRAINYYRFLVGFLFPICLLLASYQGILRAVRRSHGTQKSRKDQIQRLVLSTVVIFLACFLPYHVLLLVRSVWEASCDFAKGVFNAYHFSLLLTSFNCVADPVLYCFVSETTHRDLARLRGACLAFLTCSRTGRAREAYPLGAPEASGKSGAQGEEPELLTKLHPAFQTPNSPGSGGFPTGRLA

SEQ ID NO: 6309 - protein, 338 aa, Homo sapiens
MGNITADNSSMSCTIDHTIHQTLAPVVYVTVLVVGFPANCLSLYFGYLQIKARNELGVYLCNLTVADLFYICSLPFWLQYVLQHDNWSHGDLSCQVCGILLYENIYISVGFLCCISVDRYLAVAHPFRFHQFRTLKAAVGVSVVIWAKELLTSIYFLMHEEVIEDENQHRVCFEHYPIQAWQRAINYYRFLVGFLFPICLLLASYQGILRAVRRSHGTQKSRKDQIQRLVLSTVVIFLACFLPYHVLLLVRSVWEASCDFAKGVFNAYHFSLLLTSFNCVADPVLYCFVSETTHRDLARLRGACLAFLTCSRTGRAREAYPLGAPEASGKSGAQGEEP

SEQ ID NO: 6310 - protein, 365 aa, Homo sapiens
MGNITADNSSMSCTIDHTIHQTLAPVVYVTVLVVGFPANCLSLYFGYLQIKARNELGVYLCNLTVADLFYICSLPFWLQYVLQHDNWSHGDLSCQVCGILLYENIYISVGFLCCISVDRYLAVAHPFRFHQFRTLKAAVGVSVVIWAKELLTSIYFLMHEEVIEDENQHRVCFEHYPIQAWQRAINYYRFLVGFLFPICLLLASYQGILRAVRRSHGTQKSRKDQIQRLVLSTVVIFLACFLPYHVLLLVRSVWEASCDFAKGVFNAYHFSLLLTSFNCVADPVLYCFVSETTHRDLARLRGACLAFLTCSRTGRAREAYPLGAPEASGKSGAQGEEPELLTKLHPAFQTPNSPGSGGFPTGRLA

SEQ ID NO: 6311 - protein, 365 aa, Homo sapiens; identical to SEQ ID NO: 6310

SEQ ID NO: 6312 - protein, 699 aa, Homo sapiens
MTLRRKCNEDDEVFFGPFGHKERCIAASLELNNPVPEQPPLPTSESPFAWSPLAGEKFVEVYKEAHLLALHIESSSRNQAAQAAKPEDPRSQGVERFIQESKLKINLFEKEKEMKKSPTSLKRETYYLSDSPLLGPPVGEPRLLASSPALPSSGAQARLTRAPGPPHSAHALPRESCTAHAASQAATQRKPGTKLLLPRAASVRGRSIPGAAEKPKKEIPASPSRTKIPAEKESHRDVLPDKPAPGAVNVPAAGSHLGQGKRAIPVPNKLGLKKTLLKAPGSTSNLARKSSSGPVWSGASSACTSPAVGKAKSSEFASIPANSSRPLSNISKSGRMGPAMLRPALPAGPVGASSWQAKRVDVSELAAEQLTAPPSASPTQPQTPEGGGQWLNSSCAWSESSQLNKTRSIRRRDSCLNSKTKVMPTPTNQFKIPKFSIGDSPDSSTPKLSRAQRPQSCTSVGRVTVHSTPVRRSSGPAPQSLLSAWRVSALPTPASRRCSGLPPMTPKTMPRAVGSPLCVPARRRSSEPRKNSAMRTEPTRESNRKTDSRLVDVSPDRGSPPSRVPQALNFSPEESDSTFSKSTATEVAREEAKPGGDAAPSEALLVDIKLEPLAVTPDAASQPLIDLPLIDFCDTPEAHVAVGSESRPLIDLMTNTPDMNKNVAKPSPVVGQLIDLSSPLIQLSPEADKENVDSPLLKF

SEQ ID NO: 6313 - protein, 739 aa, Homo sapiens
MEGGGGRDEPSACRAGDVNMDDPKKEDILLLADEKFDFDLSLSSSSANEDDEVFFGPFGHKERCIAASLELNNPVPEQPPLPTSESPFAWSPLAGEKFVEVYKEAHLLALHIESSSRNQAAQAAKPEDPRSQGVERFIQESKLKINLFEKEKEMKKSPTSLKRETYYLSDSPLLGPPVGEPRLLASSPALPSSGAQARLTRAPGPPHSAHALPRESCTAHAASQAATQRKPGTKLLLPRAASVRGRSIPGAAEKPKKEIPASPSRTKIPAEKESHRDVLPDKPAPGAVNVPAAGSHLGQGKRAIPVPNKLGLKKTLLKAPGSTSNLARKSSSGPVWSGASSACTSPAVGKAKSSEFASIPANSSRPLSNISKSGRMGPAMLRPALPAGPVGASSWQAKRVDVSELAAEQLTAPPSASPTQPQTPEGGGQWLNSSCAWSESSQLNKTRSIRRRDSCLNSKTKVMPTPTNQFKIPKFSIGDSPDSSTPKLSRAQRPQSCTSVGRVTVHSTPVRRSSGPAPQSLLSAWRVSALPTPASRRCSGLPPMTPKTMPRAVGSPLCVPARRRSSEPRKNSAMRTEPTRESNRKTDSRLVDVSPDRGSPPSRVPQALNFSPEESDSTFSKSTATEVAREEAKPGGDAAPSEALLVDIKLEPLAVTPDAASQPLIDLPLIDFCDTPEAHVAVGSESRPLIDLMTNTPDMNKNVAKPSPVVGQLIDLSSPLIQLSPEADKENVDSPLLKF

SEQ ID NO: 6314 - protein, 382 aa, Homo sapiens
MGDWSALGKLLDKVQAYSTAGGKVWLSVLFIFRILLLGTAVESAWGDEQSAFRCNTQQPGCENVCYDKSFPISHVRFWVLQIIFVSVPTLLYLAHVFYVMRKEEKLNKKEEELKVAQTDGVNVDMHLKQIEIKKFKYGIEEHGKVKMRGGLLRTYIISILFKSIFEVAFLLIQWYIYGFSLSAVYTCKRDPCPHQVDCFLSRPTEKTIFIIFMLVVSLVSLALNIIELFYVFFKGVKDRVKGKSDPYHATSGALSPAKDCGSQKYAYFNGCSSPTAPLSPMSPPGYKLVTGDRNNSSCRNYNKQASEQNWANYSAEQNRMGQAGSTISNSHAQPFDFPDDNQNSKKLAAGHELQPLAIVDQRPSSRASSRASSRPRPDDLEI

SEQ ID NO: 6315 - protein, 366 aa, Homo sapiens
MGDWSALGKLLDKVQAYSTAGGKVWLSAWGDEQSAFRCNTQQPGCENVCYDKSFPISHVRFWVLQIIFVSVPTLLYLAHVFYVMRKEEKLNKKEEELKVAQTDGVNVDMHLKQIEIKKFKYGIEEHGKVKMRGGLLRTYIISILFKSIFEVAFLLIQWYIYGFSLSAVYTCKRDPCPHQVDCFLSRPTEKTIFIIFMLVVSLVSLALNIIELFYVFFKGVKDRVKGKSDPYHATSGALSPAKDCGSQKYAYFNGCSSPTAPLSPMSPPGYKLVTGDRNNSSCRNYNKQASEQNWANYSAEQNRMGQAGSTISNSHAQPFDFPDDNQNSKKLAAGHELQPLAIVDQRPSSRASSRASSRPRPDDLEI

SEQ ID NO: 6316 - protein, 217 aa, Homo sapiens
MSFRGGGRGGFNRGGGGGGFNRGGSSNHFRGGGGGGGGGNFRGGGRGGFGRGGGRGGFNKGQDQGPPERVVLLGEFLHPCEDDIVCKCTTDENKVPYFNAPVYLENKEQIGKVDEIFGQLRDFYFSVKLSENMKASSFKKLQKFYIDPYKLLPLQRFLPRPPGEKGPPRGGGRGGRGGGRGGGGRGGGRGGGFRGGRGGGGGGFRGGRGGGFRGRGH

SEQ ID NO: 6317 - protein, 217 aa, Homo sapiens; identical to SEQ ID NO: 6316

SEQ ID NO: 6318 - protein, 529 aa, Homo sapiens
MGCVFCKKLEPVATAKEDAGLEGDFRSYGAADHYGPDPTKARPASSFAHIPNYSNFSSQAINPGFLDSGTIRGVSGIGVTLFIALYDYEARTEDDLTFTKGEKFHILNNTEGDWWEARSLSSGKTGCIPSNYVAPVDSIQAEEWYFGKIGRKDAERQLLSPGNPQGAFLIRESETTKGAYSLSIRDWDQTRGDHVKHYKIRKLDMGGYYITTRVQFNSVQELVQHYMEVNDGLCNLLIAPCTIMKPQTLGLAKDAWEISRSSITLERRLGTGCFGDVWLGTWNGSTKVAVKTLKPGTMSPKAFLEEAQVMKLLRHDKLVQLYAVVSEEPIYIVTEFMCHGSLLDFLKNPEGQDLRLPQLVDMAAQVAEGMAYMERMNYIHRDLRAANILVGERLACKIADFGLARLIKDDEYNPCQGSKFPIKWTAPEAALFGRFTIKSDVWSFGILLTELITKGRIPYPGMNKREVLEQVEQGYHMPCPPGCPASLYEAMEQTWRLDPEERPTFEYLQSFLEDYFTSAEPQYQPGDQT

SEQ ID NO: 6319 - protein, 529 aa, Homo sapiens; identical to SEQ ID NO: 6318

SEQ ID NO: 6320 - protein, 529 aa, Homo sapiens; identical to SEQ ID NO: 6318

SEQ ID NO: 6321 - protein, 529 aa, Homo sapiens; identical to SEQ ID NO: 6318

SEQ ID NO: 6322 - protein, 313 aa, Homo sapiens
MGCVFCKKLEPVATAKEDAGLEGDFRSYGAADHYGPDPTKARPASSFAHIPNYSNFSSQAINPGFLDSGTIRGVSGIGVTLFIALYDYEARTEDDLTFTKGEKFHILNNTEGDWWEARSLSSGKTGCIPSNYVAPVDSIQAEEWYFGKIGRKDAERQLLSPGNPQGAFLIRESETTKGAYSLSIRDWDQTRGDHVKHYKIRKLDMGGYYITTRVQFNSVQELVQHYMEVNDGLCNLLIAPCTIMKPQTLGLAKDAWEISRSSITLERRLGTGCFGDVWLGTWNGSTKVAVKTLKPGTMSPKAFLEEAQVMKLL

SEQ ID NO: 6323 - protein, 463 aa, Homo sapiens [sequence omitted]

SEQ ID NO: 6324 - protein, 334 aa, Homo sapiens
MEFPGLGSLGTSEPLPQFVDPALVSSTPESGVFFPSGPEGLDAAASSTAPSTATAAAAALAYYRDAEAYRHSPVFQVYPLLNCMEGIPGGSPYAGWAYGKTGLYPASTVCPTREDSPPQAVEDLDGKGSTSFLETLKTERLSPDLLTLGPALPSSLPVPNSAYGGPDFSSTFFSPTGSPLNSAAYSSPKLRGTLPLPPCEARECVNCGATATPLWRRDRTGHYLCNACGLYHKMNGQNRPLIRPKKRLIVSKRAGTQCTNCQTTTTTLWRRNASGDPVCNACGLYYKLHQHYCGGSAQLMRAQSMASRGGVVSFSSCSQNSGQPKSLGPRHPLA

SEQ ID NO: 6325 - protein, 413 aa, Homo sapiens
MEFPGLGSLGTSEPLPQFVDPALVSSTPESGVFFPSGPEGLDAAASSTAPSTATAAAAALAYYRDAEAYRHSPVFQVYPLLNCMEGIPGGSPYAGWAYGKTGLYPASTVCPTREDSPPQAVEDLDGKGSTSFLETLKTERLSPDLLTLGPALPSSLPVPNSAYGGPDFSSTFFSPTGSPLNSAAYSSPKLRGTLPLPPCEARECVNCGATATPLWRRDRTGHYLCNACGLYHKMNGQNRPLIRPKKRLIVSKRAGTQCTNCQTTTTTLWRRNASGDPVCNACGLYYKLHQVNRPLTMRKDGIQTRNRKASGKGKKKRGSSLGGTGAAEGPAGGFMVVAGGSGSGNCGEVASGLTLGPPGTAHLYQGLGPVVLSGPVSHLMPFPGPLLGSPTGSFPTGPMPPTTSTTVVAPLSS

SEQ ID NO: 6326 - protein, 122 aa, Homo sapiens
  VARIANT 1: note = MOD_RES - Any amino acid
XQNRPLIRPKKRLIVSKRAGTQCTNCQTTTTTLWRRNASGDPVCNACGLYYKLHQVNRPLTMRKDGIQTRNRKASGKGKKKRGSSLGGTGAAEGPALLWWLRSAHEGTEHGLQRRGGVLLLL

SEQ ID NO: 6327 - protein, 443 aa, Homo sapiens
MEVTADQPRWVSHHHPAVLNGQHPDTHHPGLSHSYMDAAQYPLPEEVDVLFNIDGQGNHVPPYYGNSVRATVQRYPPTHHGSQVCRPPLLHGSLPWLDGGKALGSHHTASPWNLSPFSKTSIHHGSPGPLSVYPPASSSSLSGGHASPHLFTFPPTPPKDVSPDPSLSTPGSAGSARQDEKECLKYQVPLPDSMKLESSHSRGSMTALGGASSSTHHPITTYPPYVPEYSSGLFPPSSLLGGSPTGFGCKSRPKARSSTGRECVNCGATSTPLWRRDGTGHYLCNACGLYHKMNGQNRPLIKPKRRLSAARRAGTSCANCQTTTTTLWRRNANGDPVCNACGLYYKLHNINRPLTMKKEGIQTRNRKMSSKSKKCKKVHDSLEDFPKNSSFNPAALSRHMSSLSHISPFSHSSHMLTTPTPMHPPSSLSFGPHHPSSMVTAMG

SEQ ID NO: 6328 - protein, 444 aa, Homo sapiens
MEVTADQPRWVSHHHPAVLNGQHPDTHHPGLSHSYMDAAQYPLPEEVDVLFNIDGQGNHVPPYYGNSVRATVQRYPPTHHGSQVCRPPLLHGSLPWLDGGKALGSHHTASPWNLSPFSKTSIHHGSPGPLSVYPPASSSSLSGGHASPHLFTFPPTPPKDVSPDPSLSTPGSAGSARQDEKECLKYQVPLPDSMKLESSHSRGSMTALGGASSSTHHPITTYPPYVPEYSSGLFPPSSLLGGSPTGFGCKSRPKARSSTEGRECVNCGATSTPLWRRDGTGHYLCNACGLYHKMNGQNRPLIKPKRRLSAARRAGTSCANCQTTTTTLWRRNANGDPVCNACGLYYKLHNINRPLTMKKEGIQTRNRKMSSKSKKCKKVHDSLEDFPKNSSFNPAALSRHMSSLSHISPFSHSSHMLTTPTPMHPPSSLSFGPHHPSSMVTAMG

SEQ ID NO: 6329 - protein, 130 aa, Homo sapiens
MEVTADQPRWVSHHHPAVLNGQHPDTHHPGLSHSYMDAAQYPLPEEVDVLFNIDGQGNHVPPYYGNSVRATVQRYPPTHHGSQVCRPPLLHGSLPWLDGGKALGSHHTASPWNLRPCLQCLWALLQASQC

SEQ ID NO: 6330 - protein, 265 aa, Homo sapiens
MRRAELAGLKTMAWVPAESAVEELMPRLLPVEPCDLTEGFDPSVPPRTPQEYLRRVQIEAAQCPDVVVAQIDPKKLKRKQSVNISLSGCQPAPEGYSPTLQWQQQQVAQFSTVRQNVNKHRSHWKSQQLDSNVTMPKSEDEEGWKKFCLGEKLCADGAVGPATNESPGIDYVQATVTSVLEYLSNWFGERDFTPELGRWLYALLACLEKPLLPEAHSLIRQLARRCSEVRLLVDSKDDERVPALNLLICLVSRYFDQRDLADEPS

SEQ ID NO: 6331 - protein, 280 aa, Homo sapiens
MRRAELAGLKTMAWVPAESAVEELMPRLLPVEPCDLTEGFDPSVPPRTPQEYLRRVQIEAAQCPDVVVAQIDPKKLKRKQSVNISLSGCQPAPEGYSPTLQWQQQQVAQFSTVRQNVNKHRSHWKSQQLDSNVTMPKSEDEEGWKKFCLGEKLCADGAVGPATNESPGIDYVQIGFPPLLSIVSRMNQATVTSVLEYLSNWFGERDFTPELGRWLYALLACLEKPLLPEAHSLIRQLARRCSEVRLLVDSKDDERVPALNLLICLVSRYFDQRDLADEPS

SEQ ID NO: 6332 - protein, 250 aa, Homo sapiens
MRRAELAGLKTMAWVPAESAVEELMPRLLPVEPCDLTEGFDPSVPPRTPQEYLRRVQIEAAQCPDVVVAQIDPKKLKRKQSVNISLSGCQPAPEGYSPTLQWQQQQVAQFSTVRQNVNKHRSHWKSQQLDSNVTMPKSEDEEGWKKFCLGEKLCADGAVGPATNESPGIDYVQIGFPPLLSIVSRMNQATVTSVLEYLSNWFGERDFTPELGRWLYALLACLEKPLLPEAHSLIRQLARRCSEVRLLVVF

SEQ ID NO: 6333 - protein, 1106 aa, Homo sapiens
MFNSMTPPPISSYGEPCCLRPLPSQGAPSVGTEGLSGPPFCHQANLMSGPHSYGPARETNSCTEGPLFSSPRSAVKLTKKRALSISPLSDASLDLQTVIRTSPSSLVAFINSRCTSPGGSYGHLSIGTMSPSLGFPAQMNHQKGPSPSFGVQPCGPHDSARGGMIPHPQSRGPFPTCQLKSELDMLVGKCREEPLEGDMSSPNSTGIQDPLLGMLDGREDLEREEKREPESVYETDCRWDGCSQEFDSQEQLVHHINSEHIHGERKEFVCHWGGCSRELRPFKAQYMLVVHMRRHTGEKPHKCTFEGCRKSYSRLENLKTHLRSHTGEKPYMCEHEGCSKAFSNASDRAKHQNRTHSNEKPYVCKLPGCTKRYTDPSSLRKHVKTVHGPDAHVTKRHRGDGPLPRAPSISTVEPKREREGGPIREESRLTVPEGAMKPQPSPGAQSSCSSDHSPAGSAANTDSGVEMTGNAGGSTEDLSSLDEGPCIAGTGLSTLRRLENLRLDQLHQLRPIGTRGLKLPSLSHTGTTVSRRVGPPVSLERRSSSSSSISSAYTVSRRSSLASPFPPGSPPENGASSLPGLMPAQHYLLRARYASARGGGTSPTAASSLDRIGGLPMPPWRSRAEYPGYNPNAGVTRRASDPAQAADRPAPARVQRFKSLGCVHTPPTVAGGGQNFDPYLPTSVYSPQPPSITENAAMDARGLQEEPEVGTSMVGSGLNPYMDFPPTDTLGYGGPEGAAAEPYGARGPGSLPLGPGPPTNYGPNPCPQQASYPDPTQETWGEFPSHSGLYPGPKALGGTYSQCPRLEHYGQVQVKPEQGCPVGSDSTGLAPCLNAHPSEGPPHPQPLFSHYPQPSPPQYLQSGPYTQPPPDYLPSEPRPCLDFDSPTHSTGQLKAQLVCNYVQSQQELLWEGGGREDAPAQEPSYQSPKFLGGSQVSPSRAKAPVNTYGPGFGPNLPNHKSGSYPTPSPCHENFVVGANRASHRAAAPPRLLPPLPTCYGPLKVGGTNPSCGHPEVGRLGGGPALYPPPEGQVCNPLDSLDLDNTQLDFVAILDEPQGLSPPPSHDQRGSSGHTPPPSGPPNMAVGNMSVLLRSLPGETEFLNSSA

SEQ ID NO: 6334 - protein, 574 aa, Homo sapiens
LSPSLGFPAQMNHQKGPSPSFGVQPCGPHDSARGGMIPHPQSRGPFPTCQLKSELDMLVGKCREEPLEGDMSSPNSTGIQDPLLGMLDGREDLEREEKREPESVYETDCRWDGCSQEFDSQEQLVHHINSEHIHGERKEFVCHWGGCSRELRPFKAQYMLVVHMRRHTGEKPHKCTFEGCRKSYSRLENLKTHLRSHTGEKPYMCEHEGCSKAFSNASDRAKHQNRTHSNEKPYVCKLPGCTKRYTDPSSLRKHVKTVHGPDAHVTKRHRGDGPLPRAPSISTVEPKREREGGPIREESRLTVPEGAMPPHPQPLFSHYPQPSPPQYLQSGPYTQPPPDYLPSEPRPCLDFDSPTHSTGQLKAQLVCNYVQSQQELLWEGGGREDAPAQEPSYQSPKFLGGSQVSPSRAKAPVNTYGPGFGPNLPNHKSGSYPTPSPCHENFVVGANRASHRAAAPPRLLPPLPTCYGPLKVGGTNPSCGHPEVGRLGGGPALYPPPEGQVCNPLDSLDLDNTQLDFVAILDEPQGLSPPPSHDQRGSSGHTPPPSGPPNMAVGNMSVLLRSLPGETEFLNSSA

SEQ ID NO: 6335 - protein, 129 aa, Homo sapiens
MFNSMTPPPISSYGEPCCLRPLPSQGAPSVGTEGLSGPPFCHQANLMSGPHSYGPARETNSCTEGPLFSSPRSAVKLTKKRALSISPLSDASLDLQTVIRTSPSSLVAFINSRCTSPGGSYGHLSIGTM

SEQ ID NO: 6336 - protein, 1065 aa, Homo sapiens
MFNSMTPPPISSYGEPCCLRPLPSQGAPSVGTEVKLTKKRALSISPLSDASLDLQTVIRTSPSSLVAFINSRCTSPGGSYGHLSIGTMSPSLGFPAQMNHQKGPSPSFGVQPCGPHDSARGGMIPHPQSRGPFPTCQLKSELDMLVGKCREEPLEGDMSSPNSTGIQDPLLGMLDGREDLEREEKREPESVYETDCRWDGCSQEFDSQEQLVHHINSEHIHGERKEFVCHWGGCSRELRPFKAQYMLVVHMRRHTGEKPHKCTFEGCRKSYSRLENLKTHLRSHTGEKPYMCEHEGCSKAFSNASDRAKHQNRTHSNEKPYVCKLPGCTKRYTDPSSLRKHVKTVHGPDAHVTKRHRGDGPLPRAPSISTVEPKREREGGPIREESRLTVPEGAMKPQPSPGAQSSCSSDHSPAGSAANTDSGVEMTGNAGGSTEDLSSLDEGPCIAGTGLSTLRRLENLRLDQLHQLRPIGTRGLKLPSLSHTGTTVSRRVGPPVSLERRSSSSSSISSAYTVSRRSSLASPFPPGSPPENGASSLPGLMPAQHYLLRARYASARGGGTSPTAASSLDRIGGLPMPPWRSRAEYPGYNPNAGVTRRASDPAQAADRPAPARVQRFKSLGCVHTPPTVAGGGQNFDPYLPTSVYSPQPPSITENAAMDARGLQEEPEVGTSMVGSGLNPYMDFPPTDTLGYGGPEGAAAEPYGARGPGSLPLGPGPPTNYGPNPCPQQASYPDPTQETWGEFPSHSGLYPGPKALGGTYSQCPRLEHYGQVQVKPEQGCPVGSDSTGLAPCLNAHPSEGPPHPQPLFSHYPQPSPPQYLQSGPYTQPPPDYLPSEPRPCLDFDSPTHSTGQLKAQLVCNYVQSQQELLWEGGGREDAPAQEPSYQSPKFLGGSQVSPSRAKAPVNTYGPGFGPNLPNHKSGSYPTPSPCHENFVVGANRASHRAAAPPRLLPPLPTCYGPLKVGGTNPSCGHPEVGRLGGGPALYPPPEGQVCNPLDSLDLDNTQLDFVAILDEPQGLSPPPSHDQRGSSGHTPPPSGPPNMAVGNMSVLLRSLPGETEFLNSSA

SEQ ID NO: 6337 - protein, 175 aa, Homo sapiens
MSPSLGFPAQMNHQKGPSPSFGVQPCGPHDSARGGMIPHPQSRGPFPTCQLKSELDMLVGKCREEPLEGDMSSPNSTGIQDPLLGMLDGREDLEREEKREPESVYETDCRWDGCSQEFDSQEQLVHHINSEHIHGERKEFVCHWGGCSRELRPFKAQYMLVVHMRRHTGEKPHKC

SEQ ID NO: 6338 - protein, 978 aa, Homo sapiens
MSPSLGFPAQMNHQKGPSPSFGVQPCGPHDSARGGMIPHPQSRGPFPTCQLKSELDMLVGKCREEPLEGDMSSPNSTGIQDPLLGMLDGREDLEREEKREPESVYETDCRWDGCSQEFDSQEQLVHHINSEHIHGERKEFVCHWGGCSRELRPFKAQYMLVVHMRRHTGEKPHKCTFEGCRKSYSRLENLKTHLRSHTGEKPYMCEHEGCSKAFSNASDRAKHQNRTHSNEKPYVCKLPGCTKRYTDPSSLRKHVKTVHGPDAHVTKRHRGDGPLPRAPSISTVEPKREREGGPIREESRLTVPEGAMKPQPSPGAQSSCSSDHSPAGSAANTDSGVEMTGNAGGSTEDLSSLDEGPCIAGTGLSTLRRLENLRLDQLHQLRPIGTRGLKLPSLSHTGTTVSRRVGPPVSLERRSSSSSSISSAYTVSRRSSLASPFPPGSPPENGASSLPGLMPAQHYLLRARYASARGGGTSPTAASSLDRIGGLPMPPWRSRAEYPGYNPNAGVTRRASDPAQAADRPAPARVQRFKSLGCVHTPPTVAGGGQNFDPYLPTSVYSPQPPSITENAAMDARGLQEEPEVGTSMVGSGLNPYMDFPPTDTLGYGGPEGAAAEPYGARGPGSLPLGPGPPTNYGPNPCPQQASYPDPTQETWGEFPSHSGLYPGPKALGGTYSQCPRLEHYGQVQVKPEQGCPVGSDSTGLAPCLNAHPSEGPPHPQPLFSHYPQPSPPQYLQSGPYTQPPPDYLPSEPRPCLDFDSPTHSTGQLKAQLVCNYVQSQQELLWEGGGREDAPAQEPSYQSPKFLGGSQVSPSRAKAPVNTYGPGFGPNLPNHKSGSYPTPSPCHENFVVGANRASHRAAAPPRLLPPLPTCYGPLKVGGTNPSCGHPEVGRLGGGPALYPPPEGQVCNPLDSLDLDNTQLDFVAILDEPQGLSPPPSHDQRGSSGHTPPPSGPPNMAVGNMSVLLRSLPGETEFLNSSA

SEQ ID NO: 6339 - protein, 44 aa, Homo sapiens
MSGPHSYGPARETNSCTEGPLFSSPRSAVKLTKKRALSISPLSD

SEQ ID NO: 6340 - protein, 1065 aa, Homo sapiens; identical to SEQ ID NO: 6336

SEQ ID NO: 6341 - protein, 515 aa, Homo sapiens [sequence omitted]

SEQ ID NO: 6342 - protein, 561 aa, Homo sapiens
MAEQVALSRTQVCGILREELFQGDAFHQSDTHIFIIMGASGDLAKKKIYPTIWWLFRDGLLPENTFIVGYARSRLTVADIRKQSEPFFKATPEEKLKLEDFFARNSYVAGQYDDAASYQRLNSHMNALHLGSQANRLFYLALPPTVYEAVTKNIHESCMSQIGWNRIIVEKPFGRDLQSSDRLSNHISSLFREDQIYRIDHYLGKEMVQNLMVLRFANRIFGPIWNRDNIACVILTFKEPFGTEGRGGYFDEFGIIRGPGRQGGSGSESCSLSLGSLVWGPHALEPGEQGGELRRALASSVPRDVMQNHLLQMLCLVAMEKPASTNSDDVRDEKVKVLKCISEVQANNVVLGQYVGNPDGEGEATKGYLDDPTVPRGSTTATFAAVVLYVENERWDGVPFILRCGKALNERKAEVRLQFHDVAGDIFHQQCKRNELVIRVQPNEAVYTKMMTKKPGMFFNPEESELDLTYGNRYKNVKLPDAYERLILDVFCGSQMHFVRSDELREAWRIFTPLLHQIELEKPKPIPYIYGSRGPTEADELMKRVGFQYEGTYKWVNPHKL

SEQ ID NO: 6343 - protein, 545 aa, Homo sapiens
MGRRGSAPGNGRTLRGCERGGRRRRSADSVMAEQVALSRTQVCGILREELFQGDAFHQSDTHIFIIMGASGDLAKKKIYPTIWWLFRDGLLPENTFIVGYARSRLTVADIRKQSEPFFKATPEEKLKLEDFFARNSYVAGQYDDAASYQRLNSHMNALHLGSQANRLFYLALPPTVYEAVTKNIHESCMSQIGWNRIIVEKPFGRDLQSSDRLSNHISSLFREDQIYRIDHYLGKEMVQNLMVLRFANRIFGPIWNRDNIACVILTFKEPFGTEGRGGYFDEFGIIRDVMQNHLLQMLCLVAMEKPASTNSDDVRDEKVKVLKCISEVQANNVVLGQYVGNPDGEGEATKGYLDDPTVPRGSTTATFAAVVLYVENERWDGVPFILRCGKALNERKAEVRLQFHDVAGDIFHQQCKRNELVIRVQPNEAVYTKMMTKKPGMFFNPEESELDLTYGNRYKNVKLPDAYERLILDVFCGSQMHFVRSDELREAWRIFTPLLHQIELEKPKPIPYIYGSRGPTEADELMKRVGFQYEGTYKWVNPHKL

SEQ ID NO: 6344 - protein, 515 aa, Homo sapiens [sequence omitted]

SEQ ID NO: 6345 - protein, 256 aa, Homo sapiens
MAEQVALSRTQVCGILREELFQGDAFHQSDTHIFIIMGASGDLAKKKIYPTIWWLFRDGLLPENTFIVGYARSRLTVADIRKQSEPFFKATPEEKLKLEDFFARNSYVAGQYDDAASYQRLNSHMNALHLGSQANRLFYLALPPTVYEAVTKNIHESCMSQIGWNRIIVEKPFGRDLQSSDRLSNHISSLFREDQIYRIDHYLGKEMVQNLMVLRFANRIFGPIWNRDNIACVILTFKEPFGTEGRGGYFDEFGII

SEQ ID NO: 6346 - protein, 226 aa, Homo sapiens
  MOD_RES 73: note = Selenocysteine
MARLLQASCLLSLLLAGFVSQSRGQEKSKMDCHGGISGTIYEYGALTIDGEEYIPFKQYAGKYVLFVNVASYCGLTGQYIELNALQEELAPFGLVILGFPCNQFGKQEPGENSEILPTLKYVRPGGGFVPNFQLFEKGDVNGEKEQKFYTFLKNSCPPTSELLGTSDRLFWEPMKVHDIRWNFEKFLVGPDGIPIMRWHHRTTVSNVKMDILSYMRRQAALGVKRK

SEQ ID NO: 6347 - protein, 72 aa, Homo sapiens
MARLLQASCLLSLLLAGFVSQSRGQEKSKMDCHGGISGTIYEYGALTIDGEEYIPFKQYAGKYVLFVNVASY

SEQ ID NO: 6348 - protein, 210 aa, Homo sapiens
MPPYTVVYFPVRGRCAALRMLLADQGQSWKEEVVTVETWQEGSLKASCLYGQLPKFQDGDLTLYQSNTILRHLGRTLGLYGKDQQEAALVDMVNDGVEDLRCKYISLIYTNYEAGKDDYVKALPGQLKPFETLLSQNQGGKTFIVGDQISFADYNLLDLLLIHEVLAPGCLDAFPLLSAYVGRLSARPKLKAFLASPEYVNLPINGNGKQ

SEQ ID NO: 6349 - protein, 727 aa, Homo sapiens
MAFQKAVKGTILVGGGALATVLGLSQFAHYRRKQMNLAYVKAADCISEPVNREPPSREAQLLTLQNTSEFDILVIGGGATGSGCALDAVTRGLKTALVERDDFSSGTSSRSTKLIHGGVRYLQKAIMKLDIEQYRMVKEALHERANLLEIAPHLSAPLPIMLPVYKWWQLPYYWVGIKLYDLVAGSNCLKSSYVLSKSRALEHFPMLQKDKLVGAIVYYDGQHNDARMNLAIALTAARYGAATANYMEVVSLLKKTDPQTGKVRVSGARCKDVLTGQEFDVRAKCVINATGPFTDSVRKMDDKDAAAICQPSAGVHIVMPGYYSPESMGLLDPATSDGRVIFFLPWQKMTIAGTTDTPTDVTHHPIPSEEDINFILNEVRNYLSCDVEVRRGDVLAAWSGIRPLVTDPKSADTQSISRNHVVDISESGLITIAGGKWTTYRSMAEDTINAAVKTHNLKAGPSRTVGLFLQGGKDWSPTLYIRLVQDYGLESEVAQHLAATYGDKAFEVAKMASVTGKRWPIVGVRLVSEFPYIEAEVKYGIKEYACTAVDMISRRTRLAFLNVQAAEEALPRIVELMGRELNWDDYKKQEQLETARKFLYYEMGYKSRSEQLTDRSEISLLPSDIDRYKKRFHKFDADQKGFITIVDVQRVLESINVQMDENTLHEILNEVDLNKNGQVELNEFLQLMSAIQKGRVSGSRLAILMKTAEENLDRRVPIPVDRSCGGL

SEQ ID NO: 6350 - protein, 500 aa, Homo sapiens
MNLAIALTAARYGAATANYMEVVSLLKKTDPQTGKVRVSGARCKDVLTGQEFDVRAKCVINATGPFTDSVRKMDDKDAAAICQPSAGVHIVMPGYYSPESMGLLDPATSDGRVIFFLPWQKMTIAGTTDTPTDVTHHPIPSEEDINFILNEVRNYLSCDVEVRRGDVLAAWSGIRPLVTDPKSADTQSISRNHVVDISESGLITIAGGKWTTYRSMAEDTINAAVKTHNLKAGPSRTVGLFLQGGKDWSPTLYIRLVQDYGLESEVAQHLAATYGDKAFEVAKMASVTGKRWPIVGVRLVSEFPYIEAEVKYGIKEYACTAVDMISRRTRLAFLNVQAAEEALPRIVELMGRELNWDDYKKQEQLETARKFLYYEMGYKSRSEQLTDRSEISLLPSDIDRYKKRFHKFDADQKGFITIVDVQRVLESINVQMDENTLHEILNEVDLNKNGQVELNEFLQLMSAIQKGRVSGSRLAILMKTAEENLDRRVPIPVDRSCGGL

SEQ ID NO: 6351 - protein, 727 aa, Homo sapiens; identical to SEQ ID NO: 6349

SEQ ID NO: 6352 - protein, 727 aa, Homo sapiens; identical to SEQ ID NO: 6349

SEQ ID NO: 6353 - protein, 109 aa, Homo sapiens
MAFQKAVKGTILVGGGALATVLGLSQFAHYRRKQMNLAYVKAADCISEPVNREPPSREAQLLTLQNTSEFDILVIGGGATGSGCALDAVTRGLKTALVERDDFSSGTSS

SEQ ID NO: 6354 - protein, 727 aa, Homo sapiens; identical to SEQ ID NO: 6349

SEQ ID NO: 6355 - protein, 379 aa, Homo sapiens
MAFQKAVKGTILVGGGALATVLGLSQFAHYRRKQMNLAYVKAADCISEPVNREPPSREAQLLTLQNTSEFDILVIGGGATGSGCALDAVTRGLKTALVERDDFSSGTSSRSTKLIHGGVRYLQKAIMKLDIEQYRMVKEALHERANLLEIAPHLSAPLPIMLPVYKWWQLPYYWVGIKLYDLVAGSNCLKSSYVLSKSRALEHFPMLQKDKLVGAIVYYDGQHNDARMNLAIALTAARYGAATANYMEVVSLLKKTDPQTGKVRVSGARCKDVLTGQEFDVRAKCVINATGPFTDSVRKMDDKDAAAICQPSAGVHIVMPGYYSPESMGLLDPATSDGRVIFFLPWQKMTIAGTTDTPTDVTHHPIPSEEDINFILNEV

SEQ ID NO: 6356 - protein, 420 aa, Homo sapiens
MSGRPRTTSFAESCKPVQQPSAFGSMKVSRDKDGSKVTTVVATPGQGPDRPQEVSYTDTKVIGNGSFGVVYQAKLCDSGELVAIKKVLQDKRFKNRELQIMRKLDHCNIVRLRYFFYSSGEKKDEVYLNLVLDYVPETVYRVARHYSRAKQTLPVIYVKLYMYQLFRSLAYIHSFGICHRDIKPQNLLLDPDTAVLKLCDFGSAKQLVRGEPNVSYICSRYYRAPELIFGATDYTSSIDVWSAGCVLAELLLGQPIFPGDSGVDQLVEIIKVLGTPTREQIREMNPNYTEFKFPQIKAHPWTKVFRPRTPPEAIALCSRLLEYTPTARLTPLEACAHSFFDELRDPNVKLPNGRDTPALFNFTTQELSSNPPLATILIPPHARIQAAASTPTNATAASDANTGDRGQTNNAASASASNST

SEQ ID NO: 6357 - protein, 433 aa, Homo sapiens
MSGRPRTTSFAESCKPVQQPSAFGSMKVSRDKDGSKVTTVVATPGQGPDRPQEVSYTDTKVIGNGSFGVVYQAKLCDSGELVAIKKVLQDKRFKNRELQIMRKLDHCNIVRLRYFFYSSGEKKDEVYLNLVLDYVPETVYRVARHYSRAKQTLPVIYVKLYMYQLFRSLAYIHSFGICHRDIKPQNLLLDPDTAVLKLCDFGSAKQLVRGEPNVSYICSRYYRAPELIFGATDYTSSIDVWSAGCVLAELLLGQPIFPGDSGVDQLVEIIKVLGTPTREQIREMNPNYTEFKFPQIKAHPWTKDSSGTGHFTSGVRVFRPRTPPEAIALCSRLLEYTPTARLTPLEACAHSFFDELRDPNVKLPNGRDTPALFNFTTQELSSNPPLATILIPPHARIQAAASTPTNATAASDANTGDRGQTNNAASASASNST

SEQ ID NO: 6358 - protein, 104 aa, Homo sapiens
MNPNYTEFKFPQIKAHPWTKVFRPRTPPEAIALCSRLLEYTPTARLTPLEACAHSFFDELRDPNVKLPNGRDTPALFNFTTQDANTGDRGQTNNAASASASNST

SEQ ID NO: 6359 - protein, 278 aa, Homo sapiens
MEENMEEGQTQKGCFECCIKCLGGIPYASLIATILLYAGVALFCGCGHEALSGTVNILQTYFEMARTAGDTLDVFTMIDIFKYVIYGIAAAFFVYGILLMVEGFFTTGAIKDLYGDFKITTCGRCVSAWFIMLTYLFMLAWLGVTAFTSLPVYMYFNLWTICRNTTLVEGANLCLDLRQFGIVTIGEEKKICTVSENFLRMCESTELNMTFHLFIVALAGAGAAVIAMVHYLMVLSANWAYVKDACRMQKYEDIKSKEEQELHDIHSTRSKERLNAYT

SEQ ID NO: 6360 - protein, 278 aa, Homo sapiens; identical to SEQ ID NO: 6359

SEQ ID NO: 6361 - protein, 10 aa, Homo sapiens
MEENMEEGQT

SEQ ID NO: 6362 - protein, 267 aa, Homo sapiens
MGCFECCIKCLGGIPYASLIATILLYAGVALFCGCGHEALSGTVNILQTYFEMARTAGDTLDVFTMIDIFKYVIYGIAAAFFVYGILLMVEGFFTTGAIKDLYGDFKITTCGRCVSAWFIMLTYLFMLAWLGVTAFTSLPVYMYFNLWTICRNTTLVEGANLCLDLRQFGIVTIGEEKKICTVSENFLRMCESTELNMTFHLFIVALAGAGAAVIAMVHYLMVLSANWAYVKDACRMQKYEDIKSKEEQELHDIHSTRSKERLNAYT

SEQ ID NO: 6363 - protein, 129 aa, Homo sapiens
MEENMEEGQTQKGCFECCIKCLGGIPYASLIATILLYAGVALFCGCGHEALSGTVNILQTYFEMARTAGDTLDVFTMIDIFKYVIYGIAAAFFVYGILLMVEGFFTTGAIKDLYGDFKITTCGRCVSAW

SEQ ID NO: 6364 - protein, 271 aa, Homo sapiens
MTDLEGCFECCIKCLGGIPYASLIATILLYAGVALFCGCGHEALSGTVNILQTYFEMARTAGDTLDVFTMIDIFKYVIYGIAAAFFVYGILLMVEGFFTTGAIKDLYGDFKITTCGRCVSAWFIMLTYLFMLAWLGVTAFTSLPVYMYFNLWTICRNTTLVEGANLCLDLRQFGIVTIGEEKKICTVSENFLRMCESTELNMTFHLFIVALAGAGAAVIAMVHYLMVLSANWAYVKDACRMQKYEDIKSKEEQELHDIHSTRSKERLNAYT

SEQ ID NO: 6365 - protein, 401 aa, Homo sapiens
MMGLGNGRRSMKSPPLVLAALVACIIVLGFNYWIASSRSVDLQTRIMELEGRVRRAAAERGAVELKKNEFQGELEKQREQLDKIQSSHNFQLESVNKLYQDEKAVLVNNITTGERLIRVLQDQLKTLQRNYGRLQQDVLQFQKNQTNLERKFSYDLSQCINQMKEVKEQCEERIEEVTKKGNEAVASRDLSENNDQRQQLQALSEPQPRLQAAGLPHTEVPQGKGNVLGNSKSQTPAPSSEVVLDSKRQVEKEETNEIQVVNEEPQRDRLPQEPGREQVVEDRPVGGRGFGGAGELGQTPQVQAALSVSQENPEMEGPERDQLVIPDGQEEEQEAAGEGRNQQKLRGEDDYNMDENEAESETDKQAALAGNDRNIDVFNVEDQKRDTINLLDQREKRNHTL

SEQ ID NO: 6366 - protein, 401 aa, Homo sapiens; identical to SEQ ID NO: 6365

SEQ ID NO: 6367 - protein, 80 aa, Homo sapiens
MMGLGNGRRSMKSPPLVLAALVACIIVLGFNYWIASSRSVDLQTRIMELEGRVRRAAAERGAVELKKNEFQGELEKQREQ

SEQ ID NO: 6368 - protein, 121 aa, Homo sapiens
MMGLGNGRRSMKSPPLVLAALVACIIVLGFNYWIASSRSVDLQTRIMELEGRVRRAAAERGAVELKKNEFQGELEKQREQLDKIQSSHNFQLESVNKLYQDEKAVLVNNITTGERLIRVLQ

SEQ ID NO: 6369 - protein, 92 aa, Homo sapiens
MKPIQKLLAGLILLTWCVEGCSSQHWSYGLRPGGKRDAENLIDSFQEIVKEVGQLAETQRFECTTHQPRSPLRDLKGALESLIEEETGQKKI

SEQ ID NO: 6370 - protein, 92 aa, Homo sapiens; identical to SEQ ID NO: 6369

SEQ ID NO: 6371 - protein, 257 aa, Homo sapiens
MPASMFSIDNILAARPRCKDSVLPVAHSAAAPVVFPALHGDSLYGASGGASSDYGAFYPRPVAPGGAGLPAAVSGSRLGYNNYFYGQLHVQAAPVGPACCGAVPPLGAQQCSCVPTPPGYEGPGSVLVSPVPHQMLPYMNVGTLSRTELQLLNQLHCRRKRRHRTIFTDEQLEALENLFQETKYPDVGTREQLARKVHLREEKVEVWFKNRRAKWRRQKRSSSEESENAEKWNKTSSSKASPEKREEEGKSDLDSDS

SEQ ID NO: 6372 - protein, 217 aa, Homo sapiens
MAYPGYGGGFGNFSIQVPGMQMGQPVPETGPAILLDGYSGPAYSDTYSSAGDSVYTYFSAVAGQDGEVDAEELQRCLTQSGINGTYSPFSLETCRIMIAMLDRDHTGKMGFNAFKELWAALNAWKENFMTVDQDGSGTVEHHELRQAIGLMGYRLSPQTLTTIVKRYSKNGRIFFDDYVACCVKLRALTDFFRKRDHLQQGSANFIYDDFLQGTMAI

SEQ ID NO: 6373 - protein, 145 aa, Homo sapiens
MATWALLLLAAMLLGNPGLVFSRLSPEYYDLARAHLRDEEKSCPCLAQEGPQGDLLTKTQELGRDYRTCLTIVQKLKKMVDKPTQRSVSNAATRVCRTGRSRWRDVCRNFMRRYQSRVTQGLVAGETAQQICEDLRLCIPSTGPL

SEQ ID NO: 6374 - protein, 130 aa, Homo sapiens
MEGLVFSRLSPEYYDLARAHLRDEEKSCPCLAQEGPQGDLLTKTQELGRDYRTCLTIVQKLKKMVDKPTQRSVSNAATRVCRTGRSRWRDVCRNFMRRYQSRVTQGLVAGETAQQICEDLRLCIPSTGPL

SEQ ID NO: 6375 - protein, 184 aa, Homo sapiens
MSRTAYTVGALLLLLGTLLPAAEGKKKGSQGAIPPPDKAQHNDSEQTQSPQQPGSRNRGRGQGRGTAMPGEEVLESSQEALHVTERKYLKRDWCKTQPLKQTIHEEGCNSRTIINRFCYGQCNSFYIPRHIRKEEGSFQSCSFCKPKKFTTMMVTLNCPELQPPTKKKRVTRVKQCRCISIDLD

SEQ ID NO: 6376 - protein, 143 aa, Homo sapiens
MSRTAYTVGALLLLLGTLLPAAEGKKKGSQGAIPPPDKALHVTERKYLKRDWCKTQPLKQTIHEEGCNSRTIINRFCYGQCNSFYIPRHIRKEEGSFQSCSFCKPKKFTTMMVTLNCPELQPPTKKKRVTRVKQCRCISIDLD

SEQ ID NO: 6377 - protein, 143 aa, Homo sapiens; identical to SEQ ID NO: 6376

SEQ ID NO: 6378 - protein, 131 aa, Homo sapiens
MTLEEFSAGEQKTESDPDNVVLCLLAADEDDDRDVALQIHFTLIQAFCCENDINILRVSNPGRLAELLLLETDAGPAASEGAEQPPDLHCVLVTNPHSSQWKDPALSQLICFCRESRYMDQWVPVINLPER

SEQ ID NO: 6379 - protein, 165 aa, Homo sapiens
MTLEEFSAGEQKTERMDKVGDALEEVLSKALSQRTITVGVYEAAKLLNVDPDNVVLCLLAADEDDDRDVALQIHFTLIQAFCCENDINILRVSNPGRLAELLLLETDAGPAASEGAEQPPDLHCVLVTNPHSSQWKDPALSQLICFCRESRYMDQWVPVINLPER

SEQ ID NO: 6380 - protein, 160 aa, Homo sapiens
MTLEELVACDNAAQKMQTVTAAVEELLVAAQRQDRLTVGVYESAKLMNVDPDSVVLCLLAIDEEEEDDIALQIHFTLIQSFCCDNDINIVRVSGMQRLAQLLGEPAETQGTTEARDLHCLLVTNPHTDAWKSHGLVEVASYCEESRGNNQWVPYISLQER

SEQ ID NO: 6381 - protein, 159 aa, Homo sapiens
MTLEEVRGQDTVPESTARMQGAGKALHELLLSAQRQGCLTAGVYESAKVLNVDPDNVTFCVLAAGEEDEGDIALQIHFTLIQAFCCENDIDIVRVGDVQRLAAIVGAGEEAGAPGDLHCILISNPNEDAWKDPALEKLSLFCEESRSVNDWVPSITLPE

SEQ ID NO: 6382 - protein, 141 aa, Homo sapiens
MQGAGKALHELLLSAQRQGCLTAGVYESAKVLNVDPDNVTFCVLAAGEEDEGDIALQIHFTLIQAFCCENDIDIVRVGDVQRLAAIVGAGEEAGAPGDLHCILISNPNEDAWKDPALEKLSLFCEESRSVNDWVPSITLPE

SEQ ID NO: 6383 - protein, 694 aa, Homo sapiens
MQPAIQVWFGEDLPLSPRSPLTPRHGPGLANVCQYDEWIAVRHEATLLPMQEDLSIWLSGLLGIKVKAEKLLEELDNGVLLCQLIDVLQNMVKTCNSEESGNFPMRKVPCKKDAASGSFFARDNTANFLHWCRDIGVDETYLFESEGLVLHKDPRQVYLCLLEIGRIVSRYGVEPPVLVKLEKEIELEETLLNTSGPEDSISIPKSCCRHEELHEAVKHIAEDPPCSCSHRFSIEYLSEGRYRLGDKILFIRMLHGKHVMVRVGGGWDTLQGFLLKYDPCRILQFATLEQKILAFQKGVSNESVPDSPARTPQPPEMNPLSAVNMFQKQNSKPSVPVSIPKSKEKQGRPPGALVPASSLKGGNLGSMSVRSKLPNSPAASSHPKLKSSKGITKKPQAPSNNASSSLASLNPVGKNTSSPALPRTAPCISESPRKCISSPNTPKAKVIPAQNSADLPESTLLPNKCSGKTQPKYLKHNHISSRDNAVSHLAAHSNSSSKCPKLPKANIPVRPKPSFQSSAKMTKTSSKTIATGLGTQSQPSDGAPQAKPVPAQKLKSALNLNQPVSVSSVSPVKATQKSKDKNIVSATKKQPQNKSAFQKTGPSSLKSPGRTPLSIVSLPQSSTKTQTAPKSAQTVAKSQHSTKGPPRSGKTPASIRKPPSSVKDADSGDKKPTAKKKEDDDHYFVMTGSKKPRK

SEQ ID NO: 6384 - protein, 694 aa, Homo sapiens; identical to SEQ ID NO: 6383

SEQ ID NO: 6385 - protein, 694 aa, Homo sapiens; identical to SEQ ID NO: 6383

SEQ ID NO: 6386 - protein, 49 aa, Homo sapiens
MQPAIQVWFGEDLPLSPRSPLTPRHGPGLANVCQYDEWIAVRHEATLLP

SEQ ID NO: 6387 - protein, 536 aa, Homo sapiens
MNASLESLYSACSMQSDTVPLLQNGQHARSQPRASGPPRSIQPQVSPRQRVQRSQPVHILAVRRLQEEDQQFRTSSLPAIPNPFPELCGPGSPPVLTPGSLPPSQAAAKQDVKVFSEDGTSKVVEILADMTARDLCQLLVYKSHCVDDNSWTLVEHHPHLGLERCLEDHELVVQVESTMASESKFLFRKNYAKYEFFKNPMNFFPEQMVTWCQQSNGSQTQLLQNFLNSSSCPEIQGFLHVKELGKKSWKKLYVCLRRSGLYCSTKGTSKEPRHLQLLADLEDSNIFSLIAGRKQYNAPTDHGLCIKPNKVRNETKELRLLCAEDEQTRTCWMTAFRLLKYGMLLYQNYRIPQQRKALLSPFSTPVRSVSENSLVAMDFSGQTGRVIENPAEAQSAALEEGHAWRKRSTRMNILGSQSPLHPSTLSTVIHRTQHWFHGRISREESHRIIKQQGLVDGLFLLRDSQSNPKAFVLTLCHHQKIKNFQILPCEDDGQTFFSLDDGNTKFSDLIQLVDFYQLNKGVLPCKLKHHCIRVAL

SEQ ID NO: 6388 - protein, 548 aa, Homo sapiens
MALAGCPDSFLHHPYYQDKVEQTPRSQQDPAGPGLPAQSDRLANHQEDDVDLEALVNDMNASLESLYSACSMQSDTVPLLQNGQHARSQPRASGPPRSIQPQVSPRQRVQRSQPVHILAVRRLQEEDQQFRTSSLPAIPNPFPELCGPGSPPVLTPGSLPPSQAAAKQDVKVFSEDGTSKVVEILADMTARDLCQLLVYKSHCVDDNSWTLVEHHPHLGLERCLEDHELVVQVESTMASESKFLFRKNYAKYEFFKNPMNFFPEQMVTWCQQSNGSQTQLLQEPRHLQLLADLEDSNIFSLIAGRKQYNAPTDHGLCIKPNKVRNETKELRLLCAEDEQTRTCWMTAFRLLKYGMLLYQNYRIPQQRKALLSPFSTPVRSVSENSLVAMDFSGQTGRVIENPAEAQSAALEEGHAWRKRSTRMNILGSQSPLHPSTLSTVIHRTQHWFHGRISREESHRIIKQQGLVDGLFLLRDSQSNPKAFVLTLCHHQKIKNFQILPCEDDGQTFFSLDDGNTKFSDLIQLVDFYQLNKGVLPCKLKHHCIRVAL

SEQ ID NO: 6389 - protein, 126 aa, Homo sapiens
MNILGSQSPLHPSTLSTVIHRTQHWFHGRISREESHRIIKQQGLVDGLFLLRDSQSNPKAFVLTLCHHQKIKNFQILPCEDDGQTFFSLDDGNTKFSDLIQLVDFYQLNKGVLPCKLKHHCIRVAL

SEQ ID NO: 6390 - protein, 536 aa, Homo sapiens; identical to SEQ ID NO: 6387

SEQ ID NO: 6391 - protein, 594 aa, Homo sapiens
MALAGCPDSFLHHPYYQDKVEQTPRSQQDPAGPGLPAQSDRLANHQEDDVDLEALVNDMNASLESLYSACSMQSDTVPLLQNGQHARSQPRASGPPRSIQPQVSPRQRVQRSQPVHILAVRRLQEEDQQFRTSSLPAIPNPFPELCGPGSPPVLTPGSLPPSQAAAKQDVKVFSEDGTSKVVEILADMTARDLCQLLVYKSHCVDDNSWTLVEHHPHLGLERCLEDHELVVQVESTMASESKFLFRKNYAKYEFFKNPMNFFPEQMVTWCQQSNGSQTQLLQNFLNSSSCPEIQGFLHVKELGKKSWKKLYVCLRRSGLYCSTKGTSKEPRHLQLLADLEDSNIFSLIAGRKQYNAPTDHGLCIKPNKVRNETKELRLLCAEDEQTRTCWMTAFRLLKYGMLLYQNYRIPQQRKALLSPFSTPVRSVSENSLVAMDFSGQTGRVIENPAEAQSAALEEGHAWRKRSTRMNILGSQSPLHPSTLSTVIHRTQHWFHGRISREESHRIIKQQGLVDGLFLLRDSQSNPKAFVLTLCHHQKIKNFQILPCEDDGQTFFSLDDGNTKFSDLIQLVDFYQLNKGVLPCKLKHHCIRVAL

SEQ ID NO: 6392 - protein, 594 aa, Homo sapiens; identical to SEQ ID NO: 6391

SEQ ID NO: 6393 - protein, 536 aa, Homo sapiens; identical to SEQ ID NO: 6387

SEQ ID NO: 6394 - protein, 536 aa, Homo sapiens; identical to SEQ ID NO: 6387

SEQ ID NO: 6395 - protein, 588 aa, Homo sapiens
MQAAGPLFRSKDKVEQTPRSQQDPAGPGLPAQSDRLANHQEDDVDLEALVNDMNASLESLYSACSMQSDTVPLLQNGQHARSQPRASGPPRSIQPQVSPRQRVQRSQPVHILAVRRLQEEDQQFRTSSLPAIPNPFPELCGPGSPPVLTPGSLPPSQAAAKQDVKVFSEDGTSKVVEILADMTARDLCQLLVYKSHCVDDNSWTLVEHHPHLGLERCLEDHELVVQVESTMASESKFLFRKNYAKYEFFKNPMNFFPEQMVTWCQQSNGSQTQLLQNFLNSSSCPEIQGFLHVKELGKKSWKKLYVCLRRSGLYCSTKGTSKEPRHLQLLADLEDSNIFSLIAGRKQYNAPTDHGLCIKPNKVRNETKELRLLCAEDEQTRTCWMTAFRLLKYGMLLYQNYRIPQQRKALLSPFSTPVRSVSENSLVAMDFSGQTGRVIENPAEAQSAALEEGHAWRKRSTRMNILGSQSPLHPSTLSTVIHRTQHWFHGRISREESHRIIKQQGLVDGLFLLRDSQSNPKAFVLTLCHHQKIKNFQILPCEDDGQTFFSLDDGNTKFSDLIQLVDFYQLNKGVLPCKLKHHCIRVAL

SEQ ID NO: 6396 - protein, 536 aa, Homo sapiens; identical to SEQ ID NO: 6387

SEQ ID NO: 6397 - protein, 536 aa, Homo sapiens; identical to SEQ ID NO: 6387

SEQ ID NO: 6398 - protein, 114 aa, Homo sapiens
MQAAGPLFRSKDKVEQTPRSQQDPAGPGLPAQSDRLANHQEDDVDLEALVNDMNASLESLYSACSMQSDTVPLLQNGQHARSQPRASGPPRSIQPQVSPRQRVQRSQPVHILAV

SEQ ID NO: 6399 - protein, 588 aa, Homo sapiens; identical to SEQ ID NO: 6395

SEQ ID NO: 6400 - protein, 176 aa, Homo sapiens
MEAIAKYDFKATADDELSFKRGDILKVLNEECDQNWYKAELNGKDGFIPKNYIEMKPHPFGNDVQHFKVLRDGAGKYFLWVVKFNSLNELVDYHRSTSVSRNQQIFLRDIEQVPQQPTYVQALFDFDPQEDGELGFRRGDFIHVMDNSDPNWWKGACHGQTGMFPRNYVTPVNRNV

SEQ ID NO: 6401 - protein, 217 aa, Homo sapiens [sequence omitted]

SEQ ID NO: 6402 - protein, 217 aa, Homo sapiens [sequence omitted]

SEQ ID NO: 6403 - protein, 217 aa, Homo sapiens [sequence omitted]

SEQ ID NO: 6404 - protein, 73 aa, Homo sapiens
MPALHIEDLPEKEKLKMEVEQLRKEVKLQRQQVSKCSEEIKNYIEERSGEDPLVKGIPEDKNPFKEKGSCVIS

SEQ ID NO: 6405 - protein, 143 aa, Homo sapiens
MSGRGKTGGKARAKAKSRSSRAGLQFPVGRVHRLLRKGHYAERVGAGAPVYLAAVLEYLTAEILELAGNAARDNKKTRIIPRHLQLAIRNDEELNKLLGGVTIAQGGVLPNIQAVLLPKKTSATVGPKAPSGGKKATQASQEY

SEQ ID NO: 6406 - protein, 143 aa, Homo sapiens; identical to SEQ ID NO: 6405

SEQ ID NO: 6407 - protein, 91 aa, Homo sapiens
MCPCPLHRGRGPPAVCACSAGRLGLRSSAAQLTAARLKALGDELHQRTMWRRRARSRRAPAPGALPTYWPWLCAAAQVAALAAWLLGRRNL

SEQ ID NO: 6408 - protein, 205 aa, Homo sapiens
MTERRVPFSLLRGPSWDPFRDWYPHSRLFDQAFGLPRLPEEWSQWLGGSSWPGYVRPLPPAAIESPAVAAPAYSRALSRQLSSGVSEIRHTADRWRVSLDVNHFAPDELTVKTKDGVVEITGKHEERQDEHGYISRCFTRKYTLPPGVDPTQVSSSLSPEGTLTVEAPMPKLATQSNEITIPVTFESRAQLGGPEAAKSDETAAK

SEQ ID NO: 6409 - protein, 170 aa, Homo sapiens
MTERRVPFSLLRGPSWPGYVRPLPPAAIESPAVAAPAYSRALSRQLSSGVSEIRHTADRWRVSLDVNHFAPDELTVKTKDGVVEITGKHEERQDEHGYISRCFTRKYTLPPGVDPTQVSSSLSPEGTLTVEAPMPKLATQSNEITIPVTFESRAQLGGPEAAKSDETAAK

SEQ ID NO: 6410 - protein, 641 aa, Homo sapiens
MATAKGIAIGIDLGTTYSCVGVFQHGKVEIIANDQGNRTTPSYVAFTDTERLIGDAAKNQVAMNPQNTVFDAKRLIGRKFNDPVVQADMKLWPFQVINEGGKPKVLVSYKGENKAFYPEEISSMVLTKLKETAEAFLGHPVTNAVITVPAYFNDSQRQATKDAGVIAGLNVLRIINEPTAAAIAYGLDKGGQGERHVLIFDLGGGTFDVSILTIDDGIFEVKATAGDTHLGGEDFDNRLVSHFVEEFKRKHKKDISQNKRAVRRLRTACERAKRTLSSSTQANLEIDSLYEGIDFYTSITRARFEELCADLFRGTLEPVEKALRDAKMDKAKIHDIVLVGGSTRIPKVQRLLQDYFNGRDLNKSINPDEAVAYGAAVQAAILMGDKSEKVQDLLLLDVAPLSLGLETAGGVMTALIKRNSTIPTKQTQIFTTYSDNQPGVLIQVYEGERAMTKDNNLLGRFDLTGIPPAPRGVPQIEVTFDIDANGILNVTAMDKSTGKVNKITITNDKGRLSKEEIERMVLDAEKYKAEDEVQREKIAAKNALESYAFNMKSVVSDEGLKGKISESDKNKILDKCNELLSWLEVNQLAEKDEFDHKRKELKQMCNPIITKLYQGGCTGPACGTGYVPGRPATGPTIEEVD

SEQ ID NO: 6411 - protein, 532 aa, Homo sapiens [sequence omitted]

SEQ ID NO: 6412 - protein, 641 aa, Homo sapiens; identical to SEQ ID NO: 6410

SEQ ID NO: 6413 - protein, 232 aa, Homo sapiens
AKGIAIGIDLGTTYSCVGVFQHGKVEIIANDQGNRTTPSYVAFTDTERLIGDAGVIAGLNVLRIINEPTAAAIAYGLDKGGQGERHVLIFDLGGGTFDVSILTIDDGIFEVKATAGDTHLGGEDFDNRLVSHFVEEFKRKHKKDISQNKRAVRRLRTACERAKRTLSSSTQANLEIDSLYEGIDFYTSITRARFEELCADLFRGTLEPVEKGAPPASPRCSGCFRTTSMDVI

SEQ ID NO: 6414 - protein, 732 aa, Homo sapiens
MPEETQTQDQPMEEEEVETFAFQAEIAQLMSLIINTFYSNKEIFLRELISNSSDALDKIRYESLTDPSKLDSGKELHINLIPNKQDRTLTIVDTGIGMTKADLINNLGTIAKSGTKAFMEALQAGADISMIGQFGVGFYSAYLVAEKVTVITKHNDDEQYAWESSAGGSFTVRTDTGEPMGRGTKVILHLKEDQTEYLEERRIKEIVKKHSQFIGYPITLFVEKERDKEVSDDEAEEKEDKEEEKEKEEKESEDKPEIEDVGSDEEEEKKDGDKKKKKKIKEKYIDQEELNKTKPIWTRNPDDITNEEYGEFYKSLTNDWEDHLAVKHFSVEGQLEFRALLFVPRRAPFDLFENRKKKNNIKLYVRRVFIMDNCEELIPEYLNFIRGVVDSEDLPLNISREMLQQSKILKVIRKNLVKKCLELFTELAEDKENYKKFYEQFSKNIKLGIHEDSQNRKKLSELLRYYTSASGDEMVSLKDYCTRMKENQKHIYYITGETKDQVANSAFVERLRKHGLEVIYMIEPIDEYCVQQLKEFEGKTLVSVTKEGLELPEDEEEKKKQEEKKTKFENLCKIMKDILEKKVEKVVVSNRLVTSPCCIVTSTYGWTANMERIMKAQALRDNSTMGYMAAKKHLEINPDHSIIETLRQKAEADKNDKSVKDLVILLYETALLSSGFSLEDPQTHANRIYRMIKLGLGIDEDDPTADDTSAAVTEEMPPLEGDDDTSRMEEVD

SEQ ID NO: 6415 - protein, 854 aa, Homo sapiens
MPPCSGGDGSTPPGPSLRDRDCPAQSAEYPRDRLDPRPGSPSEASSPPFLRSRAPVNWYQEKAQVFLWHLMVSGSTTLLCLWKQPFHVSAFPVTASLAFRQSQGAGQHLYKDLQPFILLRLLMPEETQTQDQPMEEEEVETFAFQAEIAQLMSLIINTFYSNKEIFLRELISNSSDALDKIRYESLTDPSKLDSGKELHINLIPNKQDRTLTIVDTGIGMTKADLINNLGTIAKSGTKAFMEALQAGADISMIGQFGVGFYSAYLVAEKVTVITKHNDDEQYAWESSAGGSFTVRTDTGEPMGRGTKVILHLKEDQTEYLEERRIKEIVKKHSQFIGYPITLFVEKERDKEVSDDEAEEKEDKEEEKEKEEKESEDKPEIEDVGSDEEEEKKDGDKKKKKKIKEKYIDQEELNKTKPIWTRNPDDITNEEYGEFYKSLTNDWEDHLAVKHFSVEGQLEFRALLFVPRRAPFDLFENRKKKNNIKLYVRRVFIMDNCEELIPEYLNFIRGVVDSEDLPLNISREMLQQSKILKVIRKNLVKKCLELFTELAEDKENYKKFYEQFSKNIKLGIHEDSQNRKKLSELLRYYTSASGDEMVSLKDYCTRMKENQKHIYYITGETKDQVANSAFVERLRKHGLEVIYMIEPIDEYCVQQLKEFEGKTLVSVTKEGLELPEDEEEKKKQEEKKTKFENLCKIMKDILEKKVEKVVVSNRLVTSPCCIVTSTYGWTANMERIMKAQALRDNSTMGYMAAKKHLEINPDHSIIETLRQKAEADKNDKSVKDLVILLYETALLSSGFSLEDPQTHANRIYRMIKLGLGIDEDDPTADDTSAAVTEEMPPLEGDDDTSRMEEVD

SEQ ID NO: 6416 - protein, 413 aa, Homo sapiens
MGRGTKVILHLKEDQTEYLEERRIKEIVKKHSQFIGYPITLFVEKERDKEVSDDEAEEKEDKEEEKEKEEKESEDKPEIEDVGSDEEEEKKDGDKKKKKKIKEKYIDQEELNKTKPIWTRNPDDITNEEYGEFYKSLTNDWEDHLAVKHFSVEGQLEFRALLFVPRRAPFDLFENRKKKNNIKLYVRRVFIMDNCEELIPEYLNFIRGVVDSEDLPLNISREMLQQSKILKVIRKNLVKKCLELFTELAEDKENYKKFYEQFSKNIKLGIHEDSQNRKKLSELLRYYTSASGDEMVSLKDYCTRMKENQKHIYYITGETKDQVANSAFVERLRKHGLEVIYMIEPIDEYCVQQLKEFEGKTLVSVTKEGLELPEDEEEKKKQEEKKTKFENLCKIMKDILEKKVEKVCEYSIS

SEQ ID NO: 6417 - protein, 803 aa, Homo sapiens
MRALWVLGLCCVLLTFGSVRADDEVDVDGTVEEDLGKSREGSRTDDEVVQREEEAIQLDGLNASQIRELREKSEKFAFQAEVNRMMKLIINSLYKNKEIFLRELISNASDALDKIRLISLTDENALSGNEELTVKIKCDKEKNLLHVTDTGVGMTREELVKNLGTIAKSGTSEFLNKMTEAQEDGQSTSELIGQFGVGFYSAFLVADKVIVTSKHNNDTQHIWESDSNEFSVIADPRGNTLGRGTTITLVLKEEASDYLELDTIKNLVKKYSQFINFPIYVWSSKTETVEEPMEEEEAAKEEKEESDDEAAVEEEEEEKKPKTKKVEKTVWDWELMNDIKPIWQRPSKEVEEDEYKAFYKSFSKESDDPMAYIHFTAEGEVTFKSILFVPTSAPRGLFDEYGSKKSDYIKLYVRRVFITDDFHDMMPKYLNFVKGVVDSDDLPLNVSRETLQQHKLLKVIRKKLVRKTLDMIKKIADDKYNDTFWKEFGTNIKLGVIEDHSNRTRLAKLLRFQSSHHPTDITSLDQYVERMKEKQDKIYFMAGSSRKEAESSPFVERLLKKGYEVIYLTEPVDEYCIQALPEFDGKRFQNVAKEGVKFDESEKTKESREAVEKEFEPLLNWMKDKALKDKIEKAVVSQRLTESPCALVASQYGWSGNMERIMKAQAYQTGKDISTNYYASQKKTFEINPRHPLIRDMLRRIKEDEDDKTVLDLAVVLFETATLRSGYLLPDTKAYGDRIERMLRLSLNIDPDAKVEEEPEEEPEETAEDTTEDTEQDEDEEMDVGTDEEEETAKESTAEKDEL

SEQ ID NO: 6418 - protein, 553 aa, Homo sapiens
MRALWVLGLCCVLLTFGSVRADDEVDVDGTVEEDLGKSREGSRTDDEAAKEEKEESDDEAAVEEEEEEKKPKTKKVEKTVWDWELMNDIKPIWQRPSKEVEEDEYKAFYKSFSKESDDPMAYIHFTAEGEVTFKSILFVPTSAPRGLFDEYGSKKSDYIKLYVRRVFITDDFHDMMPKYLNFVKGVVDSDDLPLNVSRETLQQHKLLKVIRKKLVRKTLDMIKKIADDKYNDTFWKEFGTNIKLGVIEDHSNRTRLAKLLRFQSSHHPTDITSLDQYVERMKEKQDKIYFMAGSSRKEAESSPFVERLLKKGYEVIYLTEPVDEYCIQALPEFDGKRFQNVAKEGVKFDESEKTKESREAVEKEFEPLLNWMKDKALKDKIEKAVVSQRLTESPCALVASQYGWSGNMERIMKAQAYQTGKDISTNYYASQKKTFEINPRHPLIRDMLRRIKEDEDDKTVLDLAVVLFETATLRSGYLLPDTKAYGDRIERMLRLSLNIDPDAKVEEEPEEEPEETAEDTTEDTEQDEDEEMDVGTDEEEETAKESTAEKDEL

SEQ ID NO: 6419 - protein, 315 aa, Homo sapiens [sequence omitted]

SEQ ID NO: 6420 - protein, 288 aa, Homo sapiens
MERPQPDSMPQDLSEALKEATKEVHTQAENAEFMRNFQKGQVTRDGFKLVMASLYHIYVALEEEIERNKESPVFAPVYFPEELHRKAALEQDLAFWYGPRWQEVIPYTPAMQRYVKRLHEVGRTEPELLVAHAYTRYLGDLSGGQVLKKIAQKALDLPSSGEGLAFFTFPNIASATKFKQLYRSRMNSLEMTPAVRQRVIEEAKTAFLLNIQLFEELQELLTHDTKDQSPSRAPGLRQRASNKVQDSAPVETPRGKPPLNTRSQAPLLRWVLTLSFLVATVAVGLYAM

SEQ ID NO: 6421 - protein, 187 aa, Homo sapiens
MERPQPDSMPQDLSEALKEATKEVHTQAENAEFMRNFQKGQVTRDGFKLVMASLYHIYVALEEEIERNKESPVFAPVYFPEELHRKAALEQDLAFWYGPRWQEVIPYTPAMQRYVKRLHEVGRTEPELLVAHAYTRYLGDLSGGQVLKKIAQKALDLPSSGEGLAFFTFPNIASATKFKQLYRSRMN

SEQ ID NO: 6422 - protein, 526 aa, Homo sapiens
LGGRSSCEDPGCPRDEERAPRMGCMKSKFLQVGGNTFSKTETSASPHCPVYVPDPTSTIKPGPNSHNSNTPGIREAGSEDIIVVALYDYEAIHHEDLSFQKGDQMVVLEESGEWWKARSLATRKEGYIPSNYVARVDSLETEEWFFKGISRKDAERQLLAPGNMLGSFMIRDSETTKGSYSLSVRDYDPRQGDTVKHYKIRTLDNGGFYISPRSTFSTLQELVDHYKKGNDGLCQKLSVPCMSSKPQKPWEKDAWEIPRESLKLEKKLGAGQFGEVWMATYNKHTKVAVKTMKPGSMSVEAFLAEANVMKTLQHDKLVKLHAVVTKEPIYIITEFMAKGSLLDFLKSDEGSKQPLPKLIDFSAQIAEGMAFIEQRNYIHRDLRAANILVSASLVCKIADFGLARVIEDNEYTAREGAKFPIKWTAPEAINFGSFTIKSDVWSFGILLMEIVTYGRIPYPGMSNPEVIRALERGYRMPRPENCPEELYNIMMRCWKNRPEERPTFEYIQSVLDDFYTATESQYQQQP

SEQ ID NO: 6423 - protein, 525 aa, Homo sapiens
LGGRSSCEDPGCPRDEERAPRMGCMKSKFLQVGGNTFSKTETSASPHCPVYVPDPTSTIKPGPNSHNSNTPGIREGSEDIIVVALYDYEAIHHEDLSFQKGDQMVVLEESGEWWKARSLATRKEGYIPSNYVARVDSLETEEWFFKGISRKDAERQLLAPGNMLGSFMIRDSETTKGSYSLSVRDYDPRQGDTVKHYKIRTLDNGGFYISPRSTFSTLQELVDHYKKGNDGLCQKLSVPCMSSKPQKPWEKDAWEIPRESLKLEKKLGAGQFGEVWMATYNKHTKVAVKTMKPGSMSVEAFLAEANVMKTLQHDKLVKLHAVVTKEPIYIITEFMAKGSLLDFLKSDEGSKQPLPKLIDFSAQIAEGMAFIEQRNYIHRDLRAANILVSASLVCKIADFGLARVIEDNEYTAREGAKFPIKWTAPEAINFGSFTIKSDVWSFGILLMEIVTYGRIPYPGMSNPEVIRALERGYRMPRPENCPEELYNIMMRCWKNRPEERPTFEYIQSVLDDFYTATESQYQQQP

SEQ ID NO: 6424 - protein, 504 aa, Homo sapiens
MGCMKSKFLQVGGNTFSKTETSASPHCPVYVPDPTSTIKPGPNSHNSNTPGIREGSEDIIVVALYDYEAIHHEDLSFQKGDQMVVLEESGEWWKARSLATRKEGYIPSNYVARVDSLETEEWFFKGISRKDAERQLLAPGNMLGSFMIRDSETTKGSYSLSVRDYDPRQGDTVKHYKIRTLDNGGFYISPRSTFSTLQELVDHYKKGNDGLCQKLSVPCMSSKPQKPWEKDAWEIPRESLKLEKKLGAGQFGEVWMATYNKHTKVAVKTMKPGSMSVEAFLAEANVMKTLQHDKLVKLHAVVTKEPIYIITEFMAKGSLLDFLKSDEGSKQPLPKLIDFSAQIAEGMAFIEQRNYIHRDLRAANILVSASLVCKIADFGLARVIEDNEYTAREGAKFPIKWTAPEAINFGSFTIKSDVWSFGILLMEIVTYGRIPYPGMSNPEVIRALERGYRMPRPENCPEELYNIMMRCWKNRPEERPTFEYIQSVLDDFYTATESQYQQQP

SEQ ID NO: 6425 - protein, 505 aa, Homo sapiens
MGCMKSKFLQVGGNTFSKTETSASPHCPVYVPDPTSTIKPGPNSHNSNTPGIREAGSEDIIVVALYDYEAIHHEDLSFQKGDQMVVLEESGEWWKARSLATRKEGYIPSNYVARVDSLETEEWFFKGISRKDAERQLLAPGNMLGSFMIRDSETTKGSYSLSVRDYDPRQGDTVKHYKIRTLDNGGFYISPRSTFSTLQELVDHYKKGNDGLCQKLSVPCMSSKPQKPWEKDAWEIPRESLKLEKKLGAGQFGEVWMATYNKHTKVAVKTMKPGSMSVEAFLAEANVMKTLQHDKLVKLHAVVTKEPIYIITEFMAKGSLLDFLKSDEGSKQPLPKLIDFSAQIAEGMAFIEQRNYIHRDLRAANILVSASLVCKIADFGLARVIEDNEYTAREGAKFPIKWTAPEAINFGSFTIKSDVWSFGILLMEIVTYGRIPYPGMSNPEVIRALERGYRMPRPENCPEELYNIMMRCWKNRPEERPTFEYIQSVLDDFYTATESQYQQQP

SEQ ID NO: 6426 - protein, 506 aa, Homo sapiens
MMGCMKSKFLQVGGNTFSKTETSASPHCPVYVPDPTSTIKPGPNSHNSNTPGIREAGSEDIIVVALYDYEAIHHEDLSFQKGDQMVVLEESGEWWKARSLATRKEGYIPSNYVARVDSLETEEWFFKGISRKDAERQLLAPGNMLGSFMIRDSETTKGSYSLSVRDYDPRQGDTVKHYKIRTLDNGGFYISPRSTFSTLQELVDHYKKGNDGLCQKLSVPCMSSKPQKPWEKDAWEIPRESLKLEKKLGAGQFGEVWMATYNKHTKVAVKTMKPGSMSVEAFLAEANVMKTLQHDKLVKLHAVVTKEPIYIITEFMAKGSLLDFLKSDEGSKQPLPKLIDFSAQIAEGMAFIEQRNYIHRDLRAANILVSASLVCKIADFGLARVIEDNEYTAREGAKFPIKWTAPEAINFGSFTIKSDVWSFGILLMEIVTYGRIPYPGMSNPEVIRALERGYRMPRPENCPEELYNIMMRCWKNRPEERPTFEYIQSVLDDFYTATESQYQQQP

SEQ ID NO: 6427 - protein, 505 aa, Homo sapiens; identical to SEQ ID NO: 6425

SEQ ID NO: 6428 - protein, 543 aa, Homo sapiens
MLLRSKPALPPPLMLLLLGPLGPLSPGALPRPAQAQDVVDLDFFTQEPLHLVSPSFLSVTIDANLATDPRFLILLGSPKLRTLARGLSPAYLRFGGTKTDFLIFDPKKESTFEERSYWQSQVNQDICKYGSIPPDVEEKLRLEWPYQEQLLLREHYQKKFKNSTYSRSSVDVLYTFANCSGLDLIFGLNALLRTADLQWNSSNAQLLLDYCSSKGYNISWELGNEPNSFLKKADIFINGSQLGEDFIQLHKLLRKSTFKNAKLYGPDVGQPRRKTAKMLKSFLKAGGEVIDSVTWHHYYLNGRTATKEDFLNPDVLDIFISSVQKVFQVVESTRPGKKVWLGETSSAYGGGAPLLSDTFAAGFMWLDKLGLSARMGIEVVMRQVFFGAGNYHLVDENFDPLPDYWLSLLFKKLVGTKVLMASVQGSKRRKLRVYLHCTNTDNPRYKEGDLTLYAINLHNVTKYLRLPYPFSNKQVDKYLLRPLGPHGLLSKSVQLNGLTLKMVDDQTLPPLMEKPLRPGSSLGLPAFSYSFFVIRNAKVAACI

SEQ ID NO: 6429 - protein, 543 aa, Homo sapiens; identical to SEQ ID NO: 6428

SEQ ID NO: 6430 - protein, 97 aa, Homo sapiens
MLLLLGPLGPLSPGALPRPAQAQDVVDLDFFTQEPLHLVSPSFLSVTRPGKKVWLGETSSAYGGGAPLLSDTFAAGFMWLDKLGLSARMGIEVVMRQ

SEQ ID NO: 6431 - protein, 469 aa, Homo sapiens
MLLRSKPALPPPLMLLLLGPLGPLSPGALPRPAQAQDVVDLDFFTQEPLHLVSPSFLSVTIDANLATDPRFLILLGSPKLRTLARGLSPAYLRFGGTKTDFLIFDPKKESTFEERSYWQSQVNQDICKYGSIPPDVEEKLRLEWPYQEQLLLREHYQKKFKNSTYSRSSVDVLYTFANCSGLDLIFGLNALLRTADLQWNSSNAQLLLDYCSSKGYNISWELGNEPNSFLKKADIFINGSQLGEDFIQLHKLLRKSTFKNAKLYGPDVGQPRRKTAKMLKSFLKAGGEVIDSVTWHHYYLNGRTATKEDFLNPDVLDIFISSVQKVFQDYWLSLLFKKLVGTKVLMASVQGSKRRKLRVYLHCTNTDNPRYKEGDLTLYAINLHNVTKYLRLPYPFSNKQVDKYLLRPLGPHGLLSKSVQLNGLTLKMVDDQTLPPLMEKPLRPGSSLGLPAFSYSFFVIRNAKVAACI

SEQ ID NO: 6432 - protein, 485 aa, Homo sapiens
MLLRSKPALPPPLMLLLLGPLGPLSPGALPRPAQAQDVVDLDFFTQEPLHLVSPSFLSVTIDANLATDPRFLILLGSPKLRTLARGLSPAYLRFGGTKTDFLIFDPKKESTFEERSYWQSQVNQDICKYGSIPPDVEEKLRLEWPYQEQLLLREHYQKKFKNSTYSKPNSFLKKADIFINGSQLGEDFIQLHKLLRKSTFKNAKLYGPDVGQPRRKTAKMLKSFLKAGGEVIDSVTWHHYYLNGRTATKEDFLNPDVLDIFISSVQKVFQVVESTRPGKKVWLGETSSAYGGGAPLLSDTFAAGFMWLDKLGLSARMGIEVVMRQVFFGAGNYHLVDENFDPLPDYWLSLLFKKLVGTKVLMASVQGSKRRKLRVYLHCTNTDNPRYKEGDLTLYAINLHNVTKYLRLPYPFSNKQVDKYLLRPLGPHGLLSKSVQLNGLTLKMVDDQTLPPLMEKPLRPGSSLGLPAFSYSFFVIRNAKVAACI

SEQ ID NO: 6433 - protein, 353 aa, Homo sapiens
MEKTLETVPLERKKREKEQFRKLFIGGLSFETTEESLRNYYEQWGKLTDCVVMRDPASKRSRGFGFVTFSSMAEVDAAMAARPHSIDGRVVEPKRAVAREESGKPGAHVTVKKLFVGGIKEDTEEHHLRDYFEEYGKIDTIEIITDRQSGKKRGFGFVTFDDHDPVDKIVLQKYHTINGHNAEVRKALSRQEMQEVQSSRSGRGGNFGFGDSRGGGGNFGPGPGSNFRGGSDGYGSGRGFGDGYNGYGGGPGGGNFGGSPGYGGGRGGYGGGGPGYGNQGGGYGGGYDNYGGGNYGSGNYNDFGNYNQQPSNYGPMKSGNFGGSRNMGGPYGGGNYGPGGSGGSGGYGGRSRY

SEQ ID NO: 6434 - protein, 341 aa, Homo sapiens
MEREKEQFRKLFIGGLSFETTEESLRNYYEQWGKLTDCVVMRDPASKRSRGFGFVTFSSMAEVDAAMAARPHSIDGRVVEPKRAVAREESGKPGAHVTVKKLFVGGIKEDTEEHHLRDYFEEYGKIDTIEIITDRQSGKKRGFGFVTFDDHDPVDKIVLQKYHTINGHNAEVRKALSRQEMQEVQSSRSGRGGNFGFGDSRGGGGNFGPGPGSNFRGGSDGYGSGRGFGDGYNGYGGGPGGGNFGGSPGYGGGRGGYGGGGPGYGNQGGGYGGGYDNYGGGNYGSGNYNDFGNYNQQPSNYGPMKSGNFGGSRNMGGPYGGGNYGPGGSGGSGGYGGRSRY

SEQ ID NO: 6435 - protein, 353 aa, Homo sapiens; identical to SEQ ID NO: 6433

SEQ ID NO: 6436 - protein, 249 aa, Homo sapiens [sequence omitted]

SEQ ID NO: 6437 - protein, 281 aa, Homo sapiens
MSEEQFGGDGAAGNGGGRRAGEQEGAMVAATQGAAAREAEPGPGAEPRLEAPKGAESEGAKIDASKNEEDEGKMFIGGLSWDTTKKDLKDYFSKFGEVVDCTLKLDPITGRSRGFGFVLFKESESVDKVMDQKEHKLNGKVIDPKRAKAMKTKEPVKKIFVGGLSPDTPEEKIREYFGGFGEVESIELPMDNKTNKRRGFCFITFKEEEPVKKIMEKKYHNVGLSKCEIKVAMSKEQYQQQQQWGSRGGFAGRARGRGGDQQSGYGKVSRRGGHQNSYKPY

SEQ ID NO: 6438 - protein, 355 aa, Homo sapiens
MSEEQFGGDGAAAAATAAVGGSAGEQEGAMVAATQGAAAAAGSGAGTGGGTASGGTEGGSAESEGAKIDASKNEEDEGHSNSSPRHSEAATAQREEWKMFIGGLSWDTTKKDLKDYFSKFGEVVDCTLKLDPITGRSRGFGFVLFKESESVDKVMDQKEHKLNGKVIDPKRAKAMKTKEPVKKIFVGGLSPDTPEEKIREYFGGFGEVESIELPMDNKTNKRRGFCFITFKEEEPVKKIMEKKYHNVGLSKCEIKVAMSKEQYQQQQQWGSRGGFAGRARGRGGGPSQNWNQGYSNYWNQGYGNYGYNSQGYGGYGGYDYTGYNNYYGYGDYSNQQSGYGKVSRRGGHQNSYKPY

SEQ ID NO: 6439 - protein, 336 aa, Homo sapiens
MSEEQFGGDGAAAAATAAVGGSAGEQEGAMVAATQGAAAAAGSGAGTGGGTASGGTEGGSAESEGAKIDASKNEEDEGKMFIGGLSWDTTKKDLKDYFSKFGEVVDCTLKLDPITGRSRGFGFVLFKESESVDKVMDQKEHKLNGKVIDPKRAKAMKTKEPVKKIFVGGLSPDTPEEKIREYFGGFGEVESIELPMDNKTNKRRGFCFITFKEEEPVKKIMEKKYHNVGLSKCEIKVAMSKEQYQQQQQWGSRGGFAGRARGRGGGPSQNWNQGYSNYWNQGYGNYGYNSQGYGGYGGYDYTGYNNYYGYGDYSNQQSGYGKVSRRGGHQNSYKPY

SEQ ID NO: 6440 - protein, 306 aa, Homo sapiens
MSEEQFGGDGAAAAATAAVGGSAGEQEGAMVAATQGAAAAAGSGAGTGGGTASGGTEGGSAESEGAKIDASKNEEDEGHSNSSPRHSEAATAQREEWKMFIGGLSWDTTKKDLKDYFSKFGEVVDCTLKLDPITGRSRGFGFVLFKESESVDKVMDQKEHKLNGKVIDPKRAKAMKTKEPVKKIFVGGLSPDTPEEKIREYFGGFGEVESIELPMDNKTNKRRGFCFITFKEEEPVKKIMEKKYHNVGLSKCEIKVAMSKEQYQQQQQWGSRGGFAGRARGRGGDQQSGYGKVSRRGGHQNSYKPY

SEQ ID NO: 6441 - protein, 155 aa, Homo sapiens
MSEEQFGGDGAAAAATAAVGGSAGEQEGAMVAATQGAAAAAGSGAGTGGGTASGGTEGGSAESEGAKIDASKNEEDEGKMFIGGLSWDTTKKDLKDYFSKFGEVVDCTLKLDPITGRSRGFGFVLFKESESVDKVMDQKEHKLNGKVIDPKRAKA

SEQ ID NO: 6442 - protein, 221 aa, Homo sapiens
MSEEQFGGDGAAAAATAAVGGSAGEQEGAMVAATQGAAAAAGSGAGTGGGTASGGTEGGSAESEGAKIDASKNEEDEGHSNSSPRHSEAATAQREEWKMFIGGLSWDTTKKDLKDYFSKFGEVVDCTLKLDPITGRSRGFGFVLFKESESVDKVMDQKEHKLNGKVIDPKRAKAMKTKEPVKKIFVGGLSPDTPEEKIREYFGGFGEVESIELPMDNKTNK

SEQ ID NO: 6443 - protein, 210 aa, Homo sapiens
  VARIANT 1: note = MOD_RES - Any amino acid
XKMFIGGLSWDTTKKDLKDYFSKFGEVVDCTLKLDPITGRSRGFGFVLFKESESVDKVMDQKEHKLNGKVIDPKRAKAMKTKEPVKKIFVGGLSPDTPEEKIREYFGGFGEVESIELPMDNKTNKRRGFCFITFKEEEPVKKIMEKKYHNVGLSKCEIKVAMSKEQYQQQQQWGSRGGFAGRARGRGGDQQSGYGKVSRRGGHQNSYKPY

SEQ ID NO: 6444 - protein, 201 aa, Homo sapiens
MDQKEHKLNGKVIDPKRAKAMKTKEPVKKIFVGGLSPDTPEEKIREYFGGFGEVESIELPMDNKTNKRRGFCFITFKEEEPVKKIMEKKYHNVGLSKCEIKVAMSKEQYQQQQQWGSRGGFAGRARGRGGGPSQNWNQGYSNYWNQGYGNYGYNSQGYGGYGGYDYTGYNNYYGYGDYSNQQSGYGKVSRRGGHQNSYKPY

SEQ ID NO: 6445 - protein, 303 aa, Homo sapiens
MSEEQFGGDGAAAAATAAASGGTEGGSAESEGAKIDASKNEEDEGKMFIGGLSWDTTKKDLKDYFSKFGEVVDCTLKLDPITGRSRGFGFVLFKESESVDKVMDQKEHKLNGKVIDPKRAKAMKTKEPVKKIFVGGLSPDTPEEKIREYFGGFGEVESIELPMDNKTNKRRGFCFITFKEEEPVKKIMEKKYHNVGLSKCEIKVAMSKEQYQQQQQWGSRGGFAGRARGRGGGPSQNWNQGYSNYWNQGYGNYGYNSQGYGGYGGYDYTGYNNYYGYGDYSNQQSGYGKVSRRGGHQNSYKPY

SEQ ID NO: 6446 - protein, 657 aa, Homo sapiens
MPRYTVHVRGEWLAVPCQDAQLTVGWLGREAVRRYIKNKPDNGGFTSVDDAHFLVRRCKGLGLLDNEDRLEVALENNEFVEVVIEGDAMSPDFIPSQPEGVYLYSKYREPEKYIELDGDRLTTEDLVNLGKGRYKIKLTPTAEKRVQKSREVIDSIIKEKTVVYGITTGFGKFARTVIPINKLQELQVNLVRSHSSGVGKPLSPERCRMLLALRINVLAKGYSGISLETLKQVIEMFNASCLPYVPEKGTVGASGDLAPLSHLALGLVGEGKMWSPKSGWADAKYVLEAHGLKPVILKPKEGLALINGTQMITSLGCEAVERASAIARQADIVAALTLEVLKGTTKAFDTDIHALRPHRGQIEVAFRFRSLLDSDHHPSEIAESHRFCDRVQDAYTLRCCPQVHGVVNDTIAFVKNIITTELNSATDNPMVFANRGETVSGGNFHGEYPAKALDYLAIGIHELAAISERRIERLCNPSLSELPAFLVAEGGLNSGFMIAHCTAAALVSENKALCHPSSVDSLSTSAATEDHVSMGGWAARKALRVIEHVEQVLAIELLAACQGIEFLRPLKTTTPLEKVYDLVRSVVRPWIKDRFMAPDIEAAHRLLLEQKVWEVAAPYIEKYRMEHIPESRPLSPTAFSLQFLHKKSTKIPESEDL

SEQ ID NO: 6447 - protein, 591 aa, Homo sapiens
MPRYTVHVRGEWLAVPCQDAQLTVGWLGREAVRRYIKNKPDNGGFTSVDDAHFLVRRCKGLGLLDNEDRLEVALENNEFVEVVIEGDAMSPDFIPSQPEGVYLYSKYREPEKYIELDGDRLTTEDLVNLGKGRYKIKLTPTAEKRVQKSREVIDSIIKEKTVVYGITTGFGKFARTVIPINKLQELQVNLVRSHSSGVGKPLSPERCRMLLALRINVLAKGYSGISLETLKQVIEMFNASCLPYVPEKGTVGASGDLAPLSHLALGLVGEGKMWSPKSGWADAKYVLEAHGLKPVILKPKEGLALINGTQMITSLGCEAVERASAIARQADIVAALTLEVLKGTTKAFDTDIHALRPHRGQIEVAFRFRSLLDSDHHPSEIAESHRFCDRVQDAYTLRCCPQVHGVVNDTIAFVKNIITTELNSATDNPMVFANRGETVSGGNFHGEYPAKALDYLAIGIHELAAISERRIERLCNPSLSELPAFLVAEGGLNSGFMIAHCTAAALVSENKALCHPSSVDSLSTSAATEDHVSMGGWAARKALRVIEHVEQVLAIELLAACQGIEFLRPLKTTTPLEKVYDLVRSVVRFGK

SEQ ID NO: 6448 - protein, 449 aa, Homo sapiens
MLLALRINVLAKGYSGISLETLKQVIEMFNASCLPYVPEKGTVGASGDLAPLSHLALGLVGEGKMWSPKSGWADAKYVLEAHGLKPVILKPKEGLALINGTQMITSLGCEAVERASAIARQADIVAALTLEVLKGTTKAFDTDIHALRPHRGQIEVAFRFRSLLDSDHHPSEIAESHRFCDRVQDAYTLRCCPQVHGVVNDTIAFVKNIITTELNSATDNPMVFANRGETVSGGNFHGEYPAKALDYLAIGIHELAAISERRIERLCNPSLSELPAFLVAEGGLNSGFMIAHCTAAALVSENKALCHPSSVDSLSTSAATEDHVSMGGWAARKALRVIEHVEQVLAIELLAACQGIEFLRPLKTTTPLEKVYDLVRSVVRPWIKDRFMAPDIEAAHRLLLEQKVWEVAAPYIEKYRMEHIPESRPLSPTAFSLQFLHKKSTKIPESEDL

SEQ ID NO: 6449 - protein, 419 aa, Homo sapiens
MAGFGAMEKFLVEYKSAVEKKLAEYKCNTNTAIELKLVRFPEDLENDIRTFFPEYTHQLFGDDETAFGYKGLKILLYYIAGSLSTMFRVEYASKVDENFDCVEADDVEGKIRQIIPPGFCTNTNDFLSLLEKEVDFKPFGTLLHTYSVLSPTGGENFTFQIYKADMTCRGFREYHERLQTFLMWFIETASFIDVDDERWHYFLVFEKYNKDGATLFATVGYMTVYNYYVYPDKTRPRVSQMLILTPFQGQGHGAQLLETVHRYYTEFPTVLDITAEDPSKSYVKLRDFVLVKLCQDLPCFSREKLMQGFNEDMAIEAQQKFKINKQHARRVYEILRLLVTDMSDAEQYRSYRLDIKRRLISPYKKKQRDLAKMRKCLRPEELTNQMNQIEISMQHEQLEESFQELVEDYRRVIERLAQE

SEQ ID NO: 6450 - protein, 334 aa, Homo sapiens
MFRVEYASKVDENFDCVEADDVEGKIRQIIPPGFCTNTNDFLSLLEKEVDFKPFGTLLHTYSVLSPTGGENFTFQIYKADMTCRGFREYHERLQTFLMWFIETASFIDVDDERWHYFLVFEKYNKDGATLFATVGYMTVYNYYVYPDKTRPRVSQMLILTPFQGQGHGAQLLETVHRYYTEFPTVLDITAEDPSKSYVKLRDFVLVKLCQDLPCFSREKLMQGFNEDMAIEAQQKFKINKQHARRVYEILRLLVTDMSDAEQYRSYRLDIKRRLISPYKKKQRDLAKMRKCLRPEELTNQMNQIEISMQHEQLEESFQELVEDYRRVIERLAQE

SEQ ID NO: 6451 - protein, 289 aa, Homo sapiens
MTVSFHKYGEYFPGTGDLRDIGAGKGKYYAVNYPLRDGIDDESYEAIFKPVMSKVMEMFQPSAVVLQCGSDSLSGDRLGCFNLTIKGHAKCVEFVKSFNLPMLMLGGGGYTIRNVARCWTYETAVALDTEIPNELPYNDYFEYFGPDFKLHISPSNMTNQNTNEYLEKIKQRLFENLRMLPHAPGVQMQAIPEDAIPEESGDEDEDDPDKRISICSSDKRIACEEEFSDSEEEGEGGRKNSSNFKKAKRVKTEDEKEKDPEEKKEVTEEEKTKEEKPEAKGVKEEVKLA

SEQ ID NO: 6452 - protein, 482 aa, Homo sapiens
MAQTQGTRRKVCYYYDGDVGNYYYGQGHPMKPHRIRMTHNLLLNYGLYRKMEIYRPHKANAEEMTKYHSDDYIKFLRSIRPDNMSEYSKQMQRFNVGEDCPVFDGLFEFCQLSTGGSVASAVKLNKQQTDIAVNWAGGLHHAKKSEASGFCYVNDIVLAILELLKYHQRVLYIDIDIHHGDGVEEAFYTTDRVMTVSFHKYGEYFPGTGDLRDIGAGKGKYYAVNYPLRDGIDDESYEAIFKPVMSKVMEMFQPSAVVLQCGSDSLSGDRLGCFNLTIKGHAKCVEFVKSFNLPMLMLGGGGYTIRNVARCWTYETAVALDTEIPNELPYNDYFEYFGPDFKLHISPSNMTNQNTNEYLEKIKQRLFENLRMLPHAPGVQMQAIPEDAIPEESGDEDEDDPDKRISICSSDKRIACEEEFSDSEEEGEGGRKNSSNFKKAKRVKTEDEKEKDPEEKKEVTEEEKTKEEKPEAKGVKEEVKLA

SEQ ID NO: 6453 - protein, 211 aa, Homo sapiens
MAQTQGTRRKVCYYYDGDVGNYYYGQGHPMKPHRIRMTHNLLLNYGLYRKMEIYRPHKANAEEMTKYHSDDYIKFLRSIRPDNMSEYSKQMQRSSAVKLNKQQTDIAVNWAGGLHHAKKSEASGFCYVNDIVLAILELLKYHQRVLYIDIDIHHGDGVEEAFYTTDRVMTVSFHKYGEYFPGTGDLRDIGAGKGKYYAVNYPLRDGIDDES

SEQ ID NO: 6454 - protein, 347 aa, Homo sapiens
MLHTTQLYQHVPETRWPIVYSPRYNITFMGLEKLHPFDAGKWGKVINFLKEEKLLSDSMLVEAREASEEDLLVVHTRRYLNELKWSFAVATITEIPPVIFLPNFLVQRKVLRPLRTQTGGTIMAGKLAVERGWAINVGGGFHHCSSDRGGGFCAYADITLAIKFLFERVEGISRATIIDLDAHQGNGHERDFMDDKRVYIMDVYNRHIYPGDRFAKQAIRRKVELEWGTEDDEYLDKVERNIKKSLQEHLPDVVVYNAGTDILEGDRLGGLSISPAGIVKRDELVFRMVRGRRVPILMVTSGGYQKRTARIIADSILNLFGLGLIGPESPSVSAQNSDTPLLPPAVP

SEQ ID NO: 6455 - protein, 236 aa, Homo sapiens
MGLEKLHPFDAGKWGKVINFLKEEKLLSDSMLVEAREASEEDLLVVHTRRYLNELKWSFAVATITEIPPVIFLPNFLVQRKVLRPLRTQTGGTIMGVASTTAPATVAGASVPMRTSRSPSSFCLSVWRASPGLPSLILMPIRAMGMSETSWTTSVCTSWMSTTATSTQGTALPSRPSGGRWSWSGAQRMMSTWIRWRGTSRNPSRSTCPTWWYTMQAPTSSRGTALGGCPSAQRAS

SEQ ID NO: 6456 - protein, 319 aa, Homo sapiens
MGLEKLHPFDAGKWGKVINFLKEEKLLSDSMLVEAREASEEDLLVVHTRRYLNELKWSFAVATITEIPPVIFLPNFLVQRKVLRPLRTQTGGTIMAGKLAVERGWAINVGGGFHHCSSDRGGGFCAYADITLAIKFLFERVEGISRATIIDLDAHQGNGHERDFMDDKRVYIMDVYNRHIYPGDRFAKQAIRRKVELEWGTEDDEYLDKVERNIKKSLQEHLPDVVVYNAGTDILEGDRLGGLSISPAGIVKRDELVFRMVRGRRVPILMVTSGGYQKRTARIIADSILNLFGLGLIGPESPSVSAQNSDTPLLPPAVP

SEQ ID NO: 6457 - protein, 155 aa, Homo sapiens [sequence omitted]

SEQ ID NO: 6458 - protein, 296 aa, Homo sapiens
MGLEKLHPFDAGKWGKVINFLKEEKLLSDSMLVEAREASEEDLLVVHTRRYLNELKRKVLRPLRTQTGGTIMAGKLAVERGWAINVGGGFHHCSSDRGGGFCAYADITLAIKFLFERVEGISRATIIDLDAHQGNGHERDFMDDKRVYIMDVYNRHIYPGDRFAKQAIRRKVELEWGTEDDEYLDKVERNIKKSLQEHLPDVVVYNAGTDILEGDRLGGLSISPAGIVKRDELVFRMVRGRRVPILMVTSGGYQKRTARIIADSILNLFGLGLIGPESPSVSAQNSDTPLLPPAVP

SEQ ID NO: 6459 - protein, 458 aa, Homo sapiens
MKPHRIRMTHNLLLNYGLYRKMEIYRPHKATAEEMTKYHSDEYIKFLRSIRPDNMSEYSKQMQRFNVGEDCPVFDGLFEFCQLSTGGSVAGAVKLNRQQTDMAVNWAGGLHHAKKSEASGFCYVNDIVLAILELLKYHQRVLYIDIDIHHGDGVEEAFYTTDRVMTVSFHKYGEYFPGTGDLRDIGAGKGKYYAVNFPMRDGIDDESYGQIFKPIISKVMEMYQPSAVVLQCGADSLSGDRLGCFNLTVKGHAKCVEVVKTFNLPLLMLGGGGYTIRNVARCWTYETAVALDCEIPNELPYNDYFEYFGPDFKLHISPSNMTNQNTPEYMEKIKQRLFENLRMLPHAPGVQMQAIPEDAVHEDSGDEDGEDPDKRISIRASDKRIACDEEFSDSEDEGEGGRRNVADHKKGAKKARIEEDKKETEDKKTDVKEEDKSKDNSGEKTDTKGTKSEQLSNP

SEQ ID NO: 6460 - protein, 582 aa, Homo sapiens
MRSPPCGLLRWFGGPLLASWCRCHLRFRAFGTSAGWYRAFPAPPPLLPPACPSPRDYRPHVSLSPFLSRPSRGGSSSSSSSRRRSPVAAVAGEPMAYSQGGGKKKVCYYYDGDIGNYYYGQGHPMKPHRIRMTHNLLLNYGLYRKMEIYRPHKATAEEMTKYHSDEYIKFLRSIRPDNMSEYSKQMQRFNVGEDCPVFDGLFEFCQLSTGGSVAGAVKLNRQQTDMAVNWAGGLHHAKKSEASGFCYVNDIVLAILELLKYHQRVLYIDIDIHHGDGVEEAFYTTDRVMTVSFHKYGEYFPGTGDLRDIGAGKGKYYAVNFPMRDGIDDESYGQIFKPIISKVMEMYQPSAVVLQCGADSLSGDRLGCFNLTVKGHAKCVEVVKTFNLPLLMLGGGGYTIRNVARCWTYETAVALDCEIPNELPYNDYFEYFGPDFKLHISPSNMTNQNTPEYMEKIKQRLFENLRMLPHAPGVQMQAIPEDAVHEDSGDEDGEDPDKRISIRASDKRIACDEEFSDSEDEGEGGRRNVADHKKGAKKARIEEDKKETEDKKTDVKEEDKSKDNSGEKTDTKGTKSEQLSNP

SEQ ID NO: 6461 - protein, 488 aa, Homo sapiens
MAYSQGGGKKKVCYYYDGDIGNYYYGQGHPMKPHRIRMTHNLLLNYGLYRKMEIYRPHKATAEEMTKYHSDEYIKFLRSIRPDNMSEYSKQMQRFNVGEDCPVFDGLFEFCQLSTGGSVAGAVKLNRQQTDMAVNWAGGLHHAKKSEASGFCYVNDIVLAILELLKYHQRVLYIDIDIHHGDGVEEAFYTTDRVMTVSFHKYGEYFPGTGDLRDIGAGKGKYYAVNFPMRDGIDDESYGQIFKPIISKVMEMYQPSAVVLQCGADSLSGDRLGCFNLTVKGHAKCVEVVKTFNLPLLMLGGGGYTIRNVARCWTYETAVALDCEIPNELPYNDYFEYFGPDFKLHISPSNMTNQNTPEYMEKIKQRLFENLRMLPHAPGVQMQAIPEDAVHEDSGDEDGEDPDKRISIRASDKRIACDEEFSDSEDEGEGGRRNVADHKKGAKKARIEEDKKETEDKKTDVKEEDKSKDNSGEKTDTKGTKSEQLSNP

SEQ ID NO: 6462 - protein, 458 aa, Homo sapiens; identical to SEQ ID NO: 6459

SEQ ID NO: 6463 - protein, 428 aa, Homo sapiens
MAKTVAYFYDPDVGNFHYGAGHPMKPHRLALTHSLVLHYGLYKKMIVFKPYQASQHDMCRFHSEDYIDFLQRVSPTNMQGFTKSLNAFNVGDDCPVFPGLFEFCSRYTGASLQGATQLNNKICDIAINWAGGLHHAKKFEASGFCYVNDIVIGILELLKYHPRVLYIDIDIHHGDGVQEAFYLTDRVMTVSFHKYGNYFFPGTGDMYEVGAESGRYYCLNVPLRDGIDDQSYKHLFQPVINQVVDFYQPTCIVLQCGADSLGCDRLGCFNLSIRGHGECVEYVKSFNIPLLVLGGGGYTVRNVARCWTYETSLLVEEAISEELPYSEYFEYFAPDFTLHPDVSTRIENQNSRQYLDQIRQTIFENLKMLNHAPSVQIHDVPADLLTYDRTDEADAEERGPEENYSRPEAPNEFYDGDHDNDKESDVEI

SEQ ID NO: 6464 - protein, 1084 aa, Homo sapiens
MSSQSHPDGLSGRDQPVELLNPARVNHMPSTVDVATALPLQVAPSAVPMDLRLDHQFSLPVAEPALREQQLQQELLALKQKQQIQRQILIAEFQRQHEQLSRQHEAQLHEHIKQQQEMLAMKHQQELLEHQRKLERHRQEQELEKQHREQKLQQLKNKEKGKESAVASTEVKMKLQEFVLNKKKALAHRNLNHCISSDPRYWYGKTQHSSLDQSSPPQSGVSTSYNHPVLGMYDAKDDFPLRKTASEPNLKLRSRLKQKVAERRSSPLLRRKDGPVVTALKKRPLDVTDSACSSAPGSGPSSPNNSSGSVSAENGIAPAVPSIPAETSLAHRLVAREGSAAPLPLYTSPSLPNITLGLPATGPSAGTAGQQDAERLTLPALQQRLSLFPGTHLTPYLSTSPLERDGGAAHSPLLQHMVLLEQPPAQAPLVTGLGALPLHAQSLVGADRVSPSIHKLRQHRPLGRTQSAPLPQNAQALQHLVIQQQHQQFLEKHKQQFQQQQLQMNKIIPKPSEPARQPESHPEETEEELREHQALLDEPYLDRLPGQKEAHAQAGVQVKQEPIESDEEEAEPPREVEPGQRQPSEQELLFRQQALLLEQQRIHQLRNYQASMEAAGIPVSFGGHRPLSRAQSSPASATFPVSVQEPPTKPRFTTGLVYDTLMLKHQCTCGSSSSHPEHAGRIQSIWSRLQETGLRGKCECIRGRKATLEELQTVHSEAHTLLYGTNPLNRQKLDSKKLLGSLASVFVRLPCGGVGVDSDTIWNEVHSAGAARLAVGCVVELVFKVATGELKNGFAVVRPPGHHAEESTPMGFCYFNSVAVAAKLLQQRLSVSKILIVDWDVHHGNGTQQAFYSDPSVLYMSLHRYDDGNFFPGSGAPDEVGTGPGVGFNVNMAFTGGLDPPMGDAEYLAAFRTVVMPIASEFAPDVVLVSSGFDAVEGHPTPLGGYNLSARCFGYLTKQLMGLAGGRIVLALEGGHDLTAICDASEACVSALLGNELDPLPEKVLQQRPNANAVRSMEKVMEIHSKYWRCLQRTTSTAGRSLIEAQTCENEEAETVTAMASLSVGVKPAEKRPDEEPMEEEPPL

SEQ ID NO: 6465 - protein, 646 aa, Homo sapiens
MLAMKHQQELLEHQRKLERHRQEQELEKQHREQKLQQLKNKEKGKESAVASTEVKMKLQEFVLNKKKALAHRNLNHCISSDPRYWYGKTQHSSLDQSSPPQSGVSTSYNHPVLGMYDAKDDFPLRKTASEPNLKLRSRLKQKVAERRSSPLLRRKDGPVVTALKKRPLDVTDSACSSAPGSGPSSPNNSSGSVSAENGIAPAVPSIPAETSLAHRLVAREGSAAPLPLYTSPSLPNITLGLPATGPSAGTAGQQDAERLTLPALQQRLSLFPGTHLTPYLSTSPLERDGGAAHSPLLQHMVLLEQPPAQAPLVTGLGALPLHAQSLVGADRVSPSIHKLRQHRPLGRTQSAPLPQNAQALQHLVIQQQHQQFLEKHKQQFQQQQLQMNKIIPKPSEPARQPESHPEETEEELREHQALLDEPYLDRLPGQKEAHAQAGVQVKQEPIESDEEEAEPPREVEPGQRQPSEQELLFRQQALLLEQQRIHQLRNYQASMEAAGIPVSFGGHRPLSRAQSSPASATFPVSVQEPPTKPRFTTGLVYDTLMLKHQCTCGSSSSHPEHAGRIQSIWSRLQETGLRGKCECIRGRKATLEELQTVHSEAHTLLYGTNPLNRQKLDSKKLLGSLASVFVRLPCGGVGVSVPLMCK

SEQ ID NO: 6466 - protein, 972 aa, Homo sapiens
MLAMKHQQELLEHQRKLERHRQEQELEKQHREQKLQQLKNKEKGKESAVASTEVKMKLQEFVLNKKKALAHRNLNHCISSDPRYWYGKTQHSSLDQSSPPQSGVSTSYNHPVLGMYDAKDDFPLRKTASEPNLKLRSRLKQKVAERRSSPLLRRKDGPVVTALKKRPLDVTDSACSSAPGSGPSSPNNSSGSVSAENGIAPAVPSIPAETSLAHRLVAREGSAAPLPLYTSPSLPNITLGLPATGPSAGTAGQQDAERLTLPALQQRLSLFPGTHLTPYLSTSPLERDGGAAHSPLLQHMVLLEQPPAQAPLVTDWYLSGLGALPLHAQSLVGADRVSPSIHKLRQHRPLGRTQSAPLPQNAQALQHLVIQQQHQQFLEKHKQQFQQQQLQMNKIIPKPSEPARQPESHPEETEEELREHQALLDEPYLDRLPGQKEAHAQAGVQVKQEPIESDEEEAEPPREVEPGQRQPSEQELLFRQQALLLEQQRIHQLRNYQASMEAAGIPVSFGGHRPLSRAQSSPASATFPVSVQEPPTKPRFTTGLVYDTLMLKHQCTCGSSSSHPEHAGRIQSIWSRLQETGLRGKCECIRGRKATLEELQTVHSEAHTLLYGTNPLNRQKLDSKKLLGSLASVFVRLPCGGVGVDSDTIWNEVHSAGAARLAVGCVVELVFKVATGELKNGFAVVRPPGHHAEESTPMGFCYFNSVAVAAKLLQQRLSVSKILIVDWDVHHGNGTQQAFYSDPSVLYMSLHRYDDGNFFPGSGAPDEVGTGPGVGFNVNMAFTGGLDPPMGDAEYLAAFRTVVMPIASEFAPDVVLVSSGFDAVEGHPTPLGGYNLSARCFGYLTKQLMGLAGGRIVLALEGGHDLTAICDASEACVSALLGNELDPLPEKVLQQRPNANAVRSMEKVMEIHSKYWRCLQRTTSTAGRSLIEAQTCENEEAETVTAMASLSVGVKPAEKRPDEEPMEEEPPL

SEQ ID NO: 6467 - protein, 737 aa, Homo sapiens
MDVATALPLQVAPSAVPMDLRLDHQFSLPVAEPALREQQLQQELLALKQKQQIQRQILIAEFQRQHEQLSRQHEAQLHEHIKQQQEMLAMKHQQELLEHQRKLERHRQEQELEKQHREQKLQQLKNKEKGKESAVASTEVKMKLQEFVLNKKKALAHRNLNHCISSDPRYWYGKTQHSSLDQSSPPQSGVSTSYNHPVLGMYDAKDDFPLRKTASEPNLKLRSRLKQKVAERRSSPLLRRKDGPVVTALKKRPLDVTDSACSSAPGSGPSSPNNSSGSVSAENGIAPAVPSIPAETSLAHRLVAREGSAAPLPLYTSPSLPNITLGLPATGPSAGTAGQQDAERLTLPALQQRLSLFPGTHLTPYLSTSPLERDGGAAHSPLLQHMVLLEQPPAQAPLVTDWYLSGLGALPLHAQSLVGADRVSPSIHKLRQHRPLGRTQSAPLPQNAQALQHLVIQQQHQQFLEKHKQQFQQQQLQMNKIIPKPSEPARQPESHPEETEEELREHQALLDEPYLDRLPGQKEAHAQAGVQVKQEPIESDEEEAEPPREVEPGQRQPSEQELLFRQQALLLEQQRIHQLRNYQASMEAAGIPVSFGGHRPLSRAQSSPASATFPVSVQEPPTKPRFTTGLVYDTLMLKHQCTCGSSSSHPEHAGRIQSIWSRLQETGLRGKCECIRGRKATLEELQTVHSEAHTLLYGTNPLNRQKLDSKKLLGSLASVFVRLPCGGVGVSVPLMCK

SEQ ID NO: 6468 - protein, 668 aa, Homo sapiens
MVLLEQPPAQAPLVTGLGALPLHAQSLVGADRVSPSIHKLRQHRPLGRTQSAPLPQNAQALQHLVIQQQHQQFLEKHKQQFQQQQLQMNKIIPKPSEPARQPESHPEETEEELREHQALLDEPYLDRLPGQKEAHAQAGVQVKQEPIESDEEEAEPPREVEPGQRQPSEQELLFRQQALLLEQQRIHQLRNYQASMEAAGIPVSFGGHRPLSRAQSSPASATFPVSVQEPPTKPRFTTGLVYDTLMLKHQCTCGSSSSHPEHAGRIQSIWSRLQETGLRGKCECIRGRKATLEELQTVHSEAHTLLYGTNPLNRQKLDSKKLLGSLASVFVRLPCGGVGVDSDTIWNEVHSAGAARLAVGCVVELVFKVATGELKNGFAVVRPPGHHAEESTPMGFCYFNSVAVAAKLLQQRLSVSKILIVDWDVHHGNGTQQAFYSDPSVLYMSLHRYDDGNFFPGSGAPDEVGTGPGVGFNVNMAFTGGLDPPMGDAEYLAAFRTVVMPIASEFAPDVVLVSSGFDAVEGHPTPLGGYNLSARCFGYLTKQLMGLAGGRIVLALEGGHDLTAICDASEACVSALLGNELDPLPEKVLQQRPNANAVRSMEKVMEIHSKYWRCLQRTTSTAGRSLIEAQTCENEEAETVTAMASLSVGVKPAEKRPDEEPMEEEPPL

SEQ ID NO: 6469 - protein, 29 aa, Homo sapiens
MSSQSHPDGLSGRDQPVELLNPARVNHMP

SEQ ID NO: 6470 - protein, 1215 aa, Homo sapiens
MTSTGQDSTTTRQRRSRQNPQSPPQDSSVTSKRNIKKGAVPRSIPNLAEVKKKGKMKKLGQAMEEDLIVGLQGMDLNLEAEALAGTGLVLDEQLNEFHCLWDDSFPEGPERLHAIKEQLIQEGLLDRCVSFQARFAEKEELMLVHSLEYIDLMETTQYMNEGELRVLADTYDSVYLHPNSYSCACLASGSVLRLVDAVLGAEIRNGMAIIRPPGHHAQHSLMDGYCMFNHVAVAARYAQQKHRIRRVLIVDWDVHHGQGTQFTFDQDPSVLYFSIHRYEQGRFWPHLKASNWSTTGFGQGQGYTINVPWNQVGMRDADYIAAFLHVLLPVALEFQPQLVLVAAGFDALQGDPKGEMAATPAGFAQLTHLLMGLAGGKLILSLEGGYNLRALAEGVSASLHTLLGDPCPMLESPGAPCRSAQASVSCALEALEPFWEVLVRSTETVERDNMEEDNVEESEEEGPWEPPVLPILTWPVLQSRTGLVYDQNMMNHCNLWDSHHPEVPQRILRIMCRLEELGLAGRCLTLTPRPATEAELLTCHSAEYVGHLRATEKMKTRELHRESSNFDSIYICPSTFACAQLATGAACRLVEAVLSGEVLNGAAVVRPPGHHAEQDAACGFCFFNSVAVAARHAQTISGHALRILIVDWDVHHGNGTQHMFEDDPSVLYVSLHRYDHGTFFPMGDEGASSQIGRAAGTGFTVNVAWNGPRMGDADYLAAWHRLVLPIAYEFNPELVLVSAGFDAARGDPLGGCQVSPEGYAHLTHLLMGLASGRIILILEGGYNLTSISESMAACTRSLLGDPPPLLTLPRPPLSGALASITETIQVHRRYWRSLRVMKVEDREGPSSSKLVTKKAPQPAKPRLAERMTTREKKVLEAGMGKVTSASFGEESTPGQTNSETAVVALTQDQPSEAATGGATLAQTISEAAIGGAMLGQTTSEEAVGGATPDQTTSEETVGGAILDQTTSEDAVGGATLGQTTSEEAVGGATLAQTTSEAAMEGATLDQTTSEEAPGGTELIQTPLASSTDHQTPPTSPVQGTTPQISPSTLIGSLRTLELGSESQGASESQAPGEENLLGEAAGGQDMADSMLMQGSRGLTDQAIFYAVTPLPWCPHLVAVCPIPAAGLDVTQPCGDCGTIQENWVCLSCYQVYCGRYINGHMLQHHGNSGHPLVLSYIDLSAWCYYCQAYVHHQALLDVKNIAHQNKFGEDMPHPH

SEQ ID NO: 6471 - protein, 210 aa, Homo sapiens
MTSTGQDSTTTRQRRSRQNPQSPPQDSSVTSKRNIKKGAVPRSIPNLAEVKKKGKMKKLGQAMEEDLIVGLQGMDLNLEAEALAGTGLVLDEQLNEFHCLWDDSFPEGPERLHAIKEQLIQEGLLDRCVSFQARFAEKEELMLVHSLEYIDLMETTQYMNEGELRVLADTYDSVYLHPNSYSCACLASGSVLRLVDAVLGAEIRNGMAII

SEQ ID NO: 6472 - protein, 1215 aa, Homo sapiens; identical to SEQ ID NO: 6470

SEQ ID NO: 6473 - protein, 210 aa, Homo sapiens; identical to SEQ ID NO: 6471

SEQ ID NO: 6474 - protein, 296 aa, Homo sapiens [sequence omitted]

SEQ ID NO: 6475 - protein, 142 aa, Homo sapiens
MTSTGQDSTTTRQRRSRQNPQSPPQDSSVTSKRNIKKGAVPRSIPNLAEVKKKGKMKKLGQAMEEDLIVGLQGMDLNLEAEALAGTGLVLDEQLNEFHCLWDDSFPEGPERLHAIKEQLIQEGLLDRCVSFQARFAEKEELM

SEQ ID NO: 6476 - protein, 269 aa, Homo sapiens
MTSTGQDSTTTRQRRSRQNPQSPPQDSSVTSKRNIKKGAVPRSIPNLAEVKKKGKMKKLGQAMEEDLIVGLQGMDLNLEAEALAGTGLVLDEQLNEFHCLWDDSFPEGPERLHAIKEQLIQEGLLDRCVSFQARFAEKEELMLVHSLEYIDLMETTQYMNEGELRVLADTYDSVYLHPNSYSCACLASGSVLRLVDAVLGAEIRNGMAIIRPPGHHAQHSLMDGYCMFNHVAVAARYAQQKHRIRRVLIVDWDVHHGQGTQFTFDQDPR

SEQ ID NO: 6477 - protein, 817 aa, Homo sapiens
MTSTGQDSTTTRQRRSRQNPQSPPQDSSVTSKRNIKKGAVPRSIPNLAEVKKKGKMKKLGQAMEEDLIVGLQGMDLNLEAEALAGTGLVLDEQLNEFHCLWDDSFPEGPERLHAIKEQLIQEGLLDRCVSFQARFAEKEELMLVHSLEYIDLMETTQYMNEGELRVLADTYDSVYLHPNSYSCACLASGSVLRLVDAVLGAEIRNGMAIIRPPGHHAQHSLMDGYCMFNHVAVAARYAQQKHRIRRVLIVDWDVHHGQGTQFTFDQDPSVLYFSIHRYEQGRFWPHLKASNWSTTGFGQGQGYTINVPWNQVGMRDADYIAAFLHVLLPVALEFQPQLVLVAAGFDALQGDPKGEMAATPAGFAQLTHLLMGLAGGKLILSLEGGYNLRALAEGVSASLHTLLGDPCPMLESPGAPCRSAQASVSCALEALEPFWEVLVRSTETVERDNMEEDNVEESEEEGPWEPPVLPILTWPVLQSRTGLVYDQNMMNHCNLWDSHHPEVPQRILRIMCRLEELGLAGRCLTLTPRPATEAELLTCHSAEYVGHLRATEKMKTRELHRESSNFDSIYICPSTFACAQLATGAACRLVEAVLSGEVLNGAAVVRPPGHHAEQDAACGFCFFNSVAVAARHAQTISGHALRILIVDWDVHHGNGTQHMFEDDPSVLYVSLHRYDHGTFFPMGDEGASSQIGRAAGTGFTVNVAWNGPRMGDADYLAAWHRLVLPIAYEFNPELVLVSAGFDAARGDPLGGCQVSPEGYAHLTLPIACLRGTTTPAQKERGAAQWPQEGADIMRITLAGGELTGRHGKVAYVIKYKL

SEQ ID NO: 6478 - protein, 51 aa, Homo sapiens
MTSTGQDSTTTRQRRSRQNPQSPPQDSSVTSKRNIKKGAVPRSIPNLAEVK

SEQ ID NO: 6479 - protein, 171 aa, Homo sapiens
MTSTGQDSTTTRQRRSRQNPQSPPQDSSVTSKRNIKKGAVPRSIPNLAEVKKKGKMKKLGQAMEEDLIVGLQGMDLNLEAEALAGTGLVLDEQLNEFHCLWDDSFPEGPERLHAIKEQLIQEGLLDRCVSFQARFAEKEELMLVHSLEYIDLMETTQYMNEGELRVLADTY

SEQ ID NO: 6480 - protein, 161 aa, Homo sapiens
MTSTGQDSTTTRQRRSRQNPQSPPQDSSVTSKRNIKKGAVPRSIPNLAEVKKKGKMKKLGQAMEEDLIVGLQGMDLNLEAEALAGTGLVLDEQLNEFHCLWDDSFPEGPERLHAIKEQLIQEGLLDRCVSFQARFAEKEELMLVHSLEYIDLMETTQYMNE

SEQ ID NO: 6481 - protein, 167 aa, Homo sapiens
MTSTGQDSTTTRQRRSRQNPQSPPQDSSVTSKRNIKKGAVPRSIPNLAEVKKKGKMKKLGQAMEEDLIVGLQGMDLNLEAEALAGTGLVLDEQLNEFHCLWDDSFPEGPERLHAIKEQLIQEGLLDRCVSFQARFAEKEELMLVHSLEYIDLMETTQYMNEGELRVL

SEQ ID NO: 6482 - protein, 1229 aa, Homo sapiens
MSGANRGRGQASSTMTSTGQDSTTTRQRRSRQNPQSPPQDSSVTSKRNIKKGAVPRSIPNLAEVKKKGKMKKLGQAMEEDLIVGLQGMDLNLEAEALAGTGLVLDEQLNEFHCLWDDSFPEGPERLHAIKEQLIQEGLLDRCVSFQARFAEKEELMLVHSLEYIDLMETTQYMNEGELRVLADTYDSVYLHPNSYSCACLASGSVLRLVDAVLGAEIRNGMAIIRPPGHHAQHSLMDGYCMFNHVAVAARYAQQKHRIRRVLIVDWDVHHGQGTQFTFDQDPSVLYFSIHRYEQGRFWPHLKASNWSTTGFGQGQGYTINVPWNQVGMRDADYIAAFLHVLLPVALEFQPQLVLVAAGFDALQGDPKGEMAATPAGFAQLTHLLMGLAGGKLILSLEGGYNLRALAEGVSASLHTLLGDPCPMLESPGAPCRSAQASVSCALEALEPFWEVLVRSTETVERDNMEEDNVEESEEEGPWEPPVLPILTWPVLQSRTGLVYDQNMMNHCNLWDSHHPEVPQRILRIMCRLEELGLAGRCLTLTPRPATEAELLTCHSAEYVGHLRATEKMKTRELHRESSNFDSIYICPSTFACAQLATGAACRLVEAVLSGEVLNGAAVVRPPGHHAEQDAACGFCFFNSVAVAARHAQTISGHALRILIVDWDVHHGNGTQHMFEDDPSVLYVSLHRYDHGTFFPMGDEGASSQIGRAAGTGFTVNVAWNGPRMGDADYLAAWHRLVLPIAYEFNPELVLVSAGFDAARGDPLGGCQVSPEGYAHLTHLLMGLASGRIILILEGGYNLTSISESMAACTRSLLGDPPPLLTLPRPPLSGALASITETIQVHRRYWRSLRVMKVEDREGPSSSKLVTKKAPQPAKPRLAERMTTREKKVLEAGMGKVTSASFGEESTPGQTNSETAVVALTQDQPSEAATGGATLAQTISEAAIGGAMLGQTTSEEAVGGATPDQTTSEETVGGAILDQTTSEDAVGGATLGQTTSEEAVGGATLAQTTSEAAMEGATLDQTTSEEAPGGTELIQTPLASSTDHQTPPTSPVQGTTPQISPSTLIGSLRTLELGSESQGASESQAPGEENLLGEAAGGQDMADSMLMQGSRGLTDQAIFYAVTPLPWCPHLVAVCPIPAAGLDVTQPCGDCGTIQENWVCLSCYQVYCGRYINGHMLQHHGNSGHPLVLSYIDLSAWCYYCQAYVHHQALLDVKNIAHQNKFGEDMPHPH

SEQ ID NO: 6483 - protein, 991 aa, Homo sapiens
MHSPGADGTQVSPGAHYCSPTGAGCPRPCADTPGPQPQPMDLRVGQRPPVEPPPEPTLLALQRPQRLHHHLFLAGLQQQRSVEPMRLSMDTPMPELQVGPQEQELRQLLHKDKSKRSAVASSVVKQKLAEVILKKQQAALERTVHPNSPGIPYRTLEPLETEGATRSMLSSFLPPVPSLPSDPPEHFPLRKTVSEPNLKLRYKPKKSLERRKNPLLRKESAPPSLRRRPAETLGDSSPSSSSTPASGCSSPNDSEHGPNPILGSEALLGQRLRLQETSVAPFALPTVSLLPAITLGLPAPARADSDRRTHPTLGPRGPILGSPHTPLFLPHGLEPEAGGTLPSRLQPILLLDPSGSHAPLLTVPGLGPLPFHFAQSLMTTERLSGSGLHWPLSRTRSEPLPPSATAPPPPGPMQPRLEQLKTHVQVIKRSAKPSEKPRLRQIPSAEDLETDGGGPGQVVDDGLEHRELGHGQPEARGPAPLQQHPQVLLWEQQRLAGRLPRGSTGDTVLLPLAQGGHRPLSRAQSSPAAPASLSAPEPASQARVLSSSETPARTLPFTTGLIYDSVMLKHQCSCGDNSRHPEHAGRIQSIWSRLQERGLRSQCECLRGRKASLEELQSVHSERHVLLYGTNPLSRLKLDNGKLAGLLAQRMFVMLPCGGVGVDTDTIWNELHSSNAARWAAGSVTDLAFKVASRELKNGFAVVRPPGHHADHSTAMGFCFFNSVAIACRQLQQQSKASKILIVDWDVHHGNGTQQTFYQDPSVLYISLHRHDDGNFFPGSGAVDEVGAGSGEGFNVNVAWAGGLDPPMGDPEYLAAFRIVVMPIAREFSPDLVLVSAGFDAAEGHPAPLGGYHVSAKCFGYMTQQLMNLAGGAVVLALEGGHDLTAICDASEACVAALLGNRVDPLSEEGWKQKPNLNAIRSLEAVIRVHSKYWGCMQRLASCPDSWVPRVPGADKEEVEAVTALASLSVGILAEDRPSEQLVEEEEPMNL

SEQ ID NO: 6484 - protein, 954 aa, Homo sapiens
MHSPGADGTQVSPGAHYCSPTGAGCPRPCADTPGPQPQPMDLRVGQRPPVEPPPEPTLLALQRPQRLHHHLFLAGLQQQRSVEPMRLSMDTPMPELQVGPQEQELRQLLHKDKSKRSAVASSVVKQKLAEVILKKQQAALERTVHPNSPGIPYRTLEPLETEGATRSMLSSFLPPVPSLPSDPPEHFPLRKTVSEPNLKLRYKPKKSLERRKNPLLRKESAPPSLRRRPAETLGDSSPSSSSTPASGCSSPNDSEHGPNPILGSEADSDRRTHPTLGPRGPILGSPHTPLFLPHGLEPEAGGTLPSRLQPILLLDPSGSHAPLLTVPGLGPLPFHFAQSLMTTERLSGSGLHWPLSRTRSEPLPPSATAPPPPGPMQPRLEQLKTHVQVIKRSAKPSEKPRLRQIPSAEDLETDGGGPGQVVDDGLEHRELGHGQPEARGPAPLQQHPQVLLWEQQRLAGRLPRGSTGDTVLLPLAQGGHRPLSRAQSSPAAPASLSAPEPASQARVLSSSETPARTLPFTTGLIYDSVMLKHQCSCGDNSRHPEHAGRIQSIWSRLQERGLRSQCECLRGRKASLEELQSVHSERHVLLYGTNPLSRLKLDNGKLAGLLAQRMFVMLPCGGVGVDTDTIWNELHSSNAARWAAGSVTDLAFKVASRELKNGFAVVRPPGHHADHSTAMGFCFFNSVAIACRQLQQQSKASKILIVDWDVHHGNGTQQTFYQDPSVLYISLHRHDDGNFFPGSGAVDEVGAGSGEGFNVNVAWAGGLDPPMGDPEYLAAFRIVVMPIAREFSPDLVLVSAGFDAAEGHPAPLGGYHVSAKCFGYMTQQLMNLAGGAVVLALEGGHDLTAICDASEACVAALLGNRVDPLSEEGWKQKPNLNAIRSLEAVIRVHSKYWGCMQRLASCPDSWVPRVPGADKEEVEAVTALASLSVGILAEDRPSEQLVEEEEPMNL

SEQ ID NO: 6485 - protein, 1014 aa, Homo sapiens
MSDLRKRELGALFTSRGTGGVEWDGTQVSPGAHYCSPTGAGCPRPCADTPGPQPQPMDLRVGQRPPVEPPPEPTLLALQRPQRLHHHLFLAGLQQQRSVEPMRLSMDTPMPELQVGPQEQELRQLLHKDKSKRSAVASSVVKQKLAEVILKKQQAALERTVHPNSPGIPYRTLEPLETEGATRSMLSSFLPPVPSLPSDPPEHFPLRKTVSEPNLKLRYKPKKSLERRKNPLLRKESAPPSLRRRPAETLGDSSPSSSSTPASGCSSPNDSEHGPNPILGSEALLGQRLRLQETSVAPFALPTVSLLPAITLGLPAPARADSDRRTHPTLGPRGPILGSPHTPLFLPHGLEPEAGGTLPSRLQPILLLDPSGSHAPLLTVPGLGPLPFHFAQSLMTTERLSGSGLHWPLSRTRSEPLPPSATAPPPPGPMQPRLEQLKTHVQVIKRSAKPSEKPRLRQIPSAEDLETDGGGPGQVVDDGLEHRELGHGQPEARGPAPLQQHPQVLLWEQQRLAGRLPRGSTGDTVLLPLAQGGHRPLSRAQSSPAAPASLSAPEPASQARVLSSSETPARTLPFTTGLIYDSVMLKHQCSCGDNSRHPEHAGRIQSIWSRLQERGLRSQCECLRGRKASLEELQSVHSERHVLLYGTNPLSRLKLDNGKLAGLLAQRMFVMLPCGGVGVDTDTIWNELHSSNAARWAAGSVTDLAFKVASRELKNGFAVVRPPGHHADHSTAMGFCFFNSVAIACRQLQQQSKASKILIVDWDVHHGNGTQQTFYQDPSVLYISLHRHDDGNFFPGSGAVDEVGAGSGEGFNVNVAWAGGLDPPMGDPEYLAAFRIVVMPIAREFSPDLVLVSAGFDAAEGHPAPLGGYHVSAKCFGYMTQQLMNLAGGAVVLALEGGHDLTAICDASEACVAALLGNRVDPLSEEGWKQKPNLNAIRSLEAVIRVHMGALTLSQIPGHGSSQQQAGGAFSWPGHPCRAAVVMVNTGAACSAWPPVQTPGCLECQGLTKKKWRQ

SEQ ID NO: 6486 - protein, 133 aa, Homo sapiens
MHSPGAGCPRPCADTPGPQPQPMDLRVGQRPPVEPPPEPTLLALQRPQRLHHHLFLAGLQQQRSVEPMRLSMDTPMPELQVGPQEQELRQLLHKDKSKRSAVASSVVKQKLAEVILKKQQAALERTVHPNSPG

SEQ ID NO: 6487 - protein, 952 aa, Homo sapiens
MDLRVGQRPPVEPPPEPTLLALQRPQRLHHHLFLAGLQQQRSVEPMRLSMDTPMPELQVGPQEQELRQLLHKDKSKRSAVASSVVKQKLAEVILKKQQAALERTVHPNSPGIPYRTLEPLETEGATRSMLSSFLPPVPSLPSDPPEHFPLRKTVSEPNLKLRYKPKKSLERRKNPLLRKESAPPSLRRRPAETLGDSSPSSSSTPASGCSSPNDSEHGPNPILGSEALLGQRLRLQETSVAPFALPTVSLLPAITLGLPAPARADSDRRTHPTLGPRGPILGSPHTPLFLPHGLEPEAGGTLPSRLQPILLLDPSGSHAPLLTVPGLGPLPFHFAQSLMTTERLSGSGLHWPLSRTRSEPLPPSATAPPPPGPMQPRLEQLKTHVQVIKRSAKPSEKPRLRQIPSAEDLETDGGGPGQVVDDGLEHRELGHGQPEARGPAPLQQHPQVLLWEQQRLAGRLPRGSTGDTVLLPLAQGGHRPLSRAQSSPAAPASLSAPEPASQARVLSSSETPARTLPFTTGLIYDSVMLKHQCSCGDNSRHPEHAGRIQSIWSRLQERGLRSQCECLRGRKASLEELQSVHSERHVLLYGTNPLSRLKLDNGKLAGLLAQRMFVMLPCGGVGVDTDTIWNELHSSNAARWAAGSVTDLAFKVASRELKNGFAVVRPPGHHADHSTAMGFCFFNSVAIACRQLQQQSKASKILIVDWDVHHGNGTQQTFYQDPSVLYISLHRHDDGNFFPGSGAVDEVGAGSGEGFNVNVAWAGGLDPPMGDPEYLAAFRIVVMPIAREFSPDLVLVSAGFDAAEGHPAPLGGYHVSAKCFGYMTQQLMNLAGGAVVLALEGGHDLTAICDASEACVAALLGNRVDPLSEEGWKQKPNLNAIRSLEAVIRVHSKYWGCMQRLASCPDSWVPRVPGADKEEVEAVTALASLSVGILAEDRPSEQLVEEEEPMNL

SEQ ID NO: 6488 - protein, 974 aa, Homo sapiens
MHSPGAGCPRPCADTPGPQPQPMDLRVGQRPPVEPPPEPTLLALQRPQRLHHHLFLAGLQQQRSVEPMRLSMDTPMPELQVGPQEQELRQLLHKDKSKRSAVASSVVKQKLAEVILKKQQAALERTVHPNSPGIPYRTLEPLETEGATRSMLSSFLPPVPSLPSDPPEHFPLRKTVSEPNLKLRYKPKKSLERRKNPLLRKESAPPSLRRRPAETLGDSSPSSSSTPASGCSSPNDSEHGPNPILGSEALLGQRLRLQETSVAPFALPTVSLLPAITLGLPAPARADSDRRTHPTLGPRGPILGSPHTPLFLPHGLEPEAGGTLPSRLQPILLLDPSGSHAPLLTVPGLGPLPFHFAQSLMTTERLSGSGLHWPLSRTRSEPLPPSATAPPPPGPMQPRLEQLKTHVQVIKRSAKPSEKPRLRQIPSAEDLETDGGGPGQVVDDGLEHRELGHGQPEARGPAPLQQHPQVLLWEQQRLAGRLPRGSTGDTVLLPLAQGGHRPLSRAQSSPAAPASLSAPEPASQARVLSSSETPARTLPFTTGLIYDSVMLKHQCSCGDNSRHPEHAGRIQSIWSRLQERGLRSQCECLRGRKASLEELQSVHSERHVLLYGTNPLSRLKLDNGKLAGLLAQRMFVMLPCGGVGVDTDTIWNELHSSNAARWAAGSVTDLAFKVASRELKNGFAVVRPPGHHADHSTAMGFCFFNSVAIACRQLQQQSKASKILIVDWDVHHGNGTQQTFYQDPSVLYISLHRHDDGNFFPGSGAVDEVGAGSGEGFNVNVAWAGGLDPPMGDPEYLAAFRIVVMPIAREFSPDLVLVSAGFDAAEGHPAPLGGYHVSAKCFGYMTQQLMNLAGGAVVLALEGGHDLTAICDASEACVAALLGNRVDPLSEEGWKQKPNLNAIRSLEAVIRVHSKYWGCMQRLASCPDSWVPRVPGADKEEVEAVTALASLSVGILAEDRPSEQLVEEEEPMNL

SEQ ID NO: 6489 - protein, 272 aa, Homo sapiens
MEEPEEPADSGQSLVPVYIYSPEYVSMCDSLAKIPKRASMVHSLIEAYALHKQMRIVKPKVASMEEMATFHTDAYLQHLQKVSQEGDDDHPDSIEYGLGYDCPATEGIFDYAAAIGGATITAAQCLIDGMCKVAINWSGGWHHAKKDEASGFCYLNDAVLGILRLRRKFERILYVDLDLHHGDGVEDAFSFTSKVMTVSLHKFSPGFFPGKSDVSDVGLGKGRYYSVNVPIQDGIQDEKYYQICESVRTSCPKSRPVEAAAAACLPHLHSLV

SEQ ID NO: 6490 - protein, 377 aa, Homo sapiens
MEEPEEPADSGQSLVPVYIYSPEYVSMCDSLAKIPKRASMVHSLIEAYALHKQMRIVKPKVASMEEMATFHTDAYLQHLQKVSQEGDDDHPDSIEYGLGYDCPATEGIFDYAAAIGGATITAAQCLIDGMCKVAINWSGGWHHAKKDEASGFCYLNDAVLGILRLRRKFERILYVDLDLHHGDGVEDAFSFTSKVMTVSLHKFSPGFFPGTGDVSDVGLGKGRYYSVNVPIQDGIQDEKYYQICESVLKEVYQAFNPKAVVLQLGADTIAGDPMCSFNMTPVGIGKCLKYILQWQLATLILGGGGYNLANTARCWTYLTGVILGKTLSSEIPDHEFFTAYGPDYVLEITPSCRPDRNEPHRIQQILNYIKGNLKHVV

SEQ ID NO: 6491 - protein, 286 aa, Homo sapiens
MEEPEEPADSGQSLVPVYIYSPEYVSMCDSLAKIPKRASMVHSLIEAYALHKQMRDEASGFCYLNDAVLGILRLRRKFERILYVDLDLHHGDGVEDAFSFTSKVMTVSLHKFSPGFFPGTGDVSDVGLGKGRYYSVNVPIQDGIQDEKYYQICESVLKEVYQAFNPKAVVLQLGADTIAGDPMCSFNMTPVGIGKCLKYILQWQLATLILGGGGYNLANTARCWTYLTGVILGKTLSSEIPDHEFFTAYGPDYVLEITPSCRPDRNEPHRIQQILNYIKGNLKHVV

SEQ ID NO: 6492 - protein, 182 aa, Homo sapiens
MTVSLHKFSPGFFPGTGDVSDVGLGKGRYYSVNVPIQDGIQDEKYYQICESVLKEVYQAFNPKAVVLQLGADTIAGDPMCSFNMTPVGIGKCLKYILQWQLATLILGGGGYNLANTARCWTYLTGVILGKTLSSEIPDHEFFTAYGPDYVLEITPSCRPDRNEPHRIQQILNYIKGNLKHVV

SEQ ID NO: 6493 - protein, 146 aa, Homo sapiens
MEEPEEPADSGQSLVPVYIYSPEYVSMCDSLAKIPKRASMVHSLIEAYALHKQMRIVKPKVASMEEMATFHTDAYLQHLQKVSQEGDDDHPDSIEYGLGYDCPATEGIFDYAAAIGGATITAAQCLIDGMCKVAINWSGGWHHAKK

SEQ ID NO: 6494 - protein, 158 aa, Homo sapiens
MEEPEEPADSGQSLVPVYIYSPEYVSMCDSLAKIPKRASMVHSLIEAYALHKQMRIVKPKVASMEEMATFHTDAYLQHLQKVSQEGDDDHPDSIEYGLGYDCPATEGIFDYAAAIGGATITAAQCLIDGMCKVAINWSGGWHHAKKETCVYVALYKAF

SEQ ID NO: 6495 - protein, 139 aa, Homo sapiens
MEEPEEPADSGQSLVPVYIYSPEYVSMCDSLAKIPKRASMVHSLIEAYALHKQMRDEASGFCYLNDAVLGILRLRRKFERILYVDLDLHHGDGTGDVSDVGLGKGRYYSVNVPIQDGIQDEKYYQICERYEPPAPNPGL

SEQ ID NO: 6496 - protein, 256 aa, Homo sapiens
MEEPEEPADSGQSLVPVYIYSPEYVSMCDSLAKIPKRASMVHSLIEAYALHKQMRIVKPKVASMEEMATFHTDAYLQHLQKVSQEGDDDHPDSIEYGLGYDCPATEGIFDYAAAIGGATITAAQCLIDGMCKVAINWSGGWHHAKKDEASGFCYLNDAVLGILRLRRKFERILYVDLDLHHGDGVEDAFSFTSKVMTVSLHKFSPGFFPGTGDVSDVGLGKGRYYSVNVPIQDGIQDEKYYQICERYEPPAPNPGL

SEQ ID NO: 6497 - protein, 276 aa, Homo sapiens
MAGPAALSAAAAAALAAALLLLRREDPGPGAGPSMAETEALSKLREDFRMQNKSVFILGASGETGRVLLKEILEQGLFSKVTLIGRRKLTFDEEAYKNVNQEVVDFEKLDDYASAFQGHDVGFCCLGTTRGKAGAEGFVRVDRDYVLKSAELAKAGGCKHFNLLSSKGADKSSNFLYLQVKGEVEAKVEELKFDRYSVFRPGVLLCDRQESRPGEWLVRKFFGSLPDSWASGHSVPVVTVVRAMLNNVVRPRDKQMELLENKAIHDLGKAHGSLKP

SEQ ID NO: 6498 - protein, 242 aa, Homo sapiens
MAETEALSKLREDFRMQNKSVFILGASGETGRVLLKEILEQGLFSKVTLIGRRKLTFDEEAYKNVNQEVVDFEKLDDYASAFQGHDVGFCCLGTTRGKAGAEGFVRVDRDYVLKSAELAKAGGCKHFNLLSSKGADKSSNFLYLQVKGEVEAKVEELKFDRYSVFRPGVLLCDRQESRPGEWLVRKFFGSLPDSWASGHSVPVVTVVRAMLNNVVRPRDKQMELLENKAIHDLGKAHGSLKP

SEQ ID NO: 6499 - protein, 242 aa, Homo sapiens; identical to SEQ ID NO: 6498

SEQ ID NO: 6500 - protein, 242 aa, Homo sapiens; identical to SEQ ID NO: 6498

SEQ ID NO: 6501 - protein, 133 aa, Homo sapiens
MAETEALSKLREDFRMQNKSVFILGASGETGRVLLKEILEQGLFSKVTLIGRRKLTFDEEAYKNVNQEVVDFEKLDDYASAFQGHDVGFCCLGTTRGKAGAVRKAYALFPFCWPVISRILFLLTLFLCACCNA

SEQ ID NO: 6502 - protein, 133 aa, Homo sapiens; identical to SEQ ID NO: 6501

SEQ ID NO: 6503 - protein, 133 aa, Homo sapiens; identical to SEQ ID NO: 6501

SEQ ID NO: 6504 - protein, 557 aa, Homo sapiens
MVSKLTSLQQELLSALLSSGVTKEVLVQALEELLPSPNFGVKLETLPLSPGSGAEPDTKPVFHTLTNGHAKGRLSGDEGSEDGDDYDTPPILKELQALNTEEAAEQRAEVDRMLSEDPWRAAKMIKGYMQQHNIPQREVVDVTGLNQSHLSQHLNKGTPMKTQKRAALYTWYVRKQREILRQFNQTVQSSGNMTDKSSQDQLLFLFPEFSQQSHGPGQSDDACSEPTNKKMRRNRFKWGPASQQILYQAYDRQKNPSKEEREALVEECNRAECLQRGVSPSKAHGLGSNLVTEVRVYNWFANRRKEEAFRQKLAMDAYSSNQTHSLNPLLSHGSPHHQPSSSPPNKLSGVRYSQQGNNEITSSSTISHHGNSAMVTSQSVLQQVSPASLDPGHNLLSPDGKMISVSGGGLPPVSTLTNIHSLSHHNPQQSQNLIMTPLSGVMAIAQSLNTSQAQSVPVINSVAGSLAALQPVQFSQQLHSPHQQPLMQQSPGSHMAQQPFMAAVTQLQNSHMYAHKQEPPQYSHTSRFPSAMVVTDTSSISTLTNMSSSKQCPLQAW

SEQ ID NO: 6505 - protein, 457 aa, Homo sapiens
MVSKLTSLQQELLSALLSSGVTKEVLVQALEELLPSPNFGVKLETLPLSPGSGAEPDTKPVFHTLTNGHAKGRLSGDEGSEDGDDYDTPPILKELQALNTEEAAEQRAEVDRMLSEDPWRAAKMIKGYMQQHNIPQREVVDVTGLNQSHLSQHLNKGTPMKTQKRAALYTWYVRKQREILRQFSQQSHGPGQSDDACSEPTNKKMRRNRFKWGPASQQILYQAYDRQKNPSKEEREALVEECNRAECLQRGVSPSKAHGLGSNLVTEVRVYNWFANRRKEEAFRQKLAMDAYSSNQTHSLNPLLSHGSPHHQPSSSPPNKLSGVRYSQQGNNEITSSSTISHHGNSAMVTSQSVLQQVSPASLDPGHNLLSPDGKMISVSGGGLPPVSTLTNIHSLSHHNPQQSQNLIMTPLSGVMAIAQMSSTSLVMPTHHLLRAQQQGPCFPHHHPLGSCHGKAQ

SEQ ID NO: 6506 - protein, 445 aa, Homo sapiens [sequence omitted]

SEQ ID NO: 6507 - protein, 425 aa, Homo sapiens
MVSKLTSLQQELLSALLSSGVTKEVLVQALEELLPSPNFGVKLETLPLSPGSGAEPDTKPVFHTLTNGHAKGRLSGDEGSEDGDDYDTPPILKELQALNTEEAAEQRAEVDRMLSEDPWRAAKMIKGYMQQHNIPQREVVDVTGLNQSHLSQHLNKGTPMKTQKRAALYTWYVRKQREILRQFNQTVQSSGNMTDKSSQDQLLFLFPEFSQQSHGPGQSDDACSEPTNKKMRRNRFKWGPASQQILYQAYDRQKNPSKEEREALVEECNRAECLQRGVSPSKAHGLGSNLVTEVRVYNWFANRRKEEAFRQKLAMDAYSSNQTHSLNPLLSHGSPHHQPSSSPPNKLSGVRYSQQGNNEITSSSTISHHGNSAMVTSQSVLQQVSPASLDPGHNLLSPDGKMDLSLRRRFAPSQHLDEYPQPLPP

SEQ ID NO: 6508 - protein, 531 aa, Homo sapiens
MVSKLTSLQQELLSALLSSGVTKEVLVQALEELLPSPNFGVKLETLPLSPGSGAEPDTKPVFHTLTNGHAKGRLSGDEGSEDGDDYDTPPILKELQALNTEEAAEQRAEVDRMLSEDPWRAAKMIKGYMQQHNIPQREVVDVTGLNQSHLSQHLNKGTPMKTQKRAALYTWYVRKQREILRQFSQQSHGPGQSDDACSEPTNKKMRRNRFKWGPASQQILYQAYDRQKNPSKEEREALVEECNRAECLQRGVSPSKAHGLGSNLVTEVRVYNWFANRRKEEAFRQKLAMDAYSSNQTHSLNPLLSHGSPHHQPSSSPPNKLSGVRYSQQGNNEITSSSTISHHGNSAMVTSQSVLQQVSPASLDPGHNLLSPDGKMISVSGGGLPPVSTLTNIHSLSHHNPQQSQNLIMTPLSGVMAIAQSLNTSQAQSVPVINSVAGSLAALQPVQFSQQLHSPHQQPLMQQSPGSHMAQQPFMAAVTQLQNSHMYAHKQEPPQYSHTSRFPSAMVVTDTSSISTLTNMSSSKQCPLQAW

SEQ ID NO: 6509 - protein, 280 aa, Homo sapiens
MKFRAKIVDGACLNHFTRISNMIAKLAKTCTLRISPDKLNFILCDKLANGGVSMWCELEQENFFNEFQMEGVSAENNEIYLELTSENLSRALKTAQNARALKIKLTNKHFPCLTVSVELLSMSSSSRIVTHDIPIKVIPRKLWKDLQEPVVPDPDVSIYLPVLKTMKSVVEKMKNISNHLVIEANLDGELNLKIETELVCVTTHFKDLGNPPLASESTHEDRNVEHMAEVHIDIRKLLQFLAGQQVNPTKALCNIVNNKMVHFDLLHEDVSLQYFIPALS

SEQ ID NO: 6510 - protein, 259 aa, Homo sapiens
MIAKLAKTCTLRISPDKLNFILCDKLANGGVSMWCELEQENFFNEFQMEGVSAENNEIYLELTSENLSRALKTAQNARALKIKLTNKHFPCLTVSVELLSMSSSSRIVTHDIPIKVIPRKLWKDLQEPVVPDPDVSIYLPVLKTMKSVVEKMKNISNHLVIEANLDGELNLKIETELVCVTTHFKDLGNPPLASESTHEDRNVEHMAEVHIDIRKLLQFLAGQQVNPTKALCNIVNNKMVHFDLLHEDVSLQYFIPALS

SEQ ID NO: 6511 - protein, 280 aa, Homo sapiens; identical to SEQ ID NO: 6509

SEQ ID NO: 6512 - protein, 259 aa, Homo sapiens; identical to SEQ ID NO: 6510

SEQ ID NO: 6513 - protein, 709 aa, Homo sapiens
MSFPKAPLKRFNDPSGCAPSPGAYDVKTLEVLKGPVSFQKSQRFKQQKESKQNLNVDKDTTLPASARKVKSSESKIRVLLQERGAQDRRIQDLETELEKMEARLNAALREKTSLSANNATLEKQLIELTRTNELLKSKFSENGNQKNLRILSLELMKLRNKRETKMRGMMAKQEGMEMKLQVTQRSLEESQGKIAQLEGKLVSIEKEKIDEKSETEKLLEYIEEISCASDQVEKYKLDIAQLEENLKEKNDEILSLKQSLEENIVILSKQVEDLNVKCQLLEKEKEDHVNRNREHNENLNAEMQNLKQKFILEQQEREKLQQKELQIDSLLQQEKELSSSLHQKLCSFQEEMVKEKNLFEEELKQTLDELDKLQQKEEQAERLVKQLEEEAKSRAEELKLLEEKLKGKEAELEKSSAAHTQATLLLQEKYDSMVQSLEDVTAQFESYKALTASEIEDLKLENSSLQEKAAKAGKNAEDVQHQILATESSNQEYVRMLLDLQTKSALKETEIKEITVSFLQKITDLQNQLKQQEEDFRKQLEDEEGRKAEKENTTAELTEEINKWRLLYEELYNKTKPFQLQLDAFEVEKQALLNEHGAAQEQLNKIRDSYAKLLGHQNLKQKIKHVVKLKDENSQLKSEVSKLRCQLAKKKQSETKLQEELNKVLGIKHFDPSKAFHHESKENFALKTPLKEGNTNCYRAPMECQESWK

SEQ ID NO: 6514 - protein, 724 aa, Homo sapiens
MSFPKAPLKRFNDPSGCAPSPGAYDVKTLEVLKGPVSFQKSQRFKQQKESKQNLNVDKDTTLPASARKVKSSESKESQKNDKDLKILEKEIRVLLQERGAQDRRIQDLETELEKMEARLNAALREKTSLSANNATLEKQLIELTRTNELLKSKFSENGNQKNLRILSLELMKLRNKRETKMRGMMAKQEGMEMKLQVTQRSLEESQGKIAQLEGKLVSIEKEKIDEKSETEKLLEYIEEISCASDQVEKYKLDIAQLEENLKEKNDEILSLKQSLEENIVILSKQVEDLNVKCQLLEKEKEDHVNRNREHNENLNAEMQNLKQKFILEQQEREKLQQKELQIDSLLQQEKELSSSLHQKLCSFQEEMVKEKNLFEEELKQTLDELDKLQQKEEQAERLVKQLEEEAKSRAEELKLLEEKLKGKEAELEKSSAAHTQATLLLQEKYDSMVQSLEDVTAQFESYKALTASEIEDLKLENSSLQEKAAKAGKNAEDVQHQILATESSNQEYVRMLLDLQTKSALKETEIKEITVSFLQKITDLQNQLKQQEEDFRKQLEDEEGRKAEKENTTAELTEEINKWRLLYEELYNKTKPFQLQLDAFEVEKQALLNEHGAAQEQLNKIRDSYAKLLGHQNLKQKIKHVVKLKDENSQLKSEVSKLRCQLAKKKQSETKLQEELNKVLGIKHFDPSKAFHHESKENFALKTPLKEGNTNCYRAPMECQESWK

SEQ ID NO: 6515 - protein, 725 aa, Homo sapiens
MSFPKAPLKRFNDPSGCAPSPGAYDVKTLEVLKGPVSFQKSQRFKQQKESKQNLNVDKDTTLPASARKVKSSESKKESQKNDKDLKILEKEIRVLLQERGAQDRRIQDLETELEKMEARLNAALREKTSLSANNATLEKQLIELTRTNELLKSKFSENGNQKNLRILSLELMKLRNKRETKMRGMMAKQEGMEMKLQVTQRSLEESQGKIAQLEGKLVSIEKEKIDEKSETEKLLEYIEEISCASDQVEKYKLDIAQLEENLKEKNDEILSLKQSLEENIVILSKQVEDLNVKCQLLEKEKEDHVNRNREHNENLNAEMQNLKQKFILEQQEREKLQQKELQIDSLLQQEKELSSSLHQKLCSFQEEMVKEKNLFEEELKQTLDELDKLQQKEEQAERLVKQLEEEAKSRAEELKLLEEKLKGKEAELEKSSAAHTQATLLLQEKYDSMVQSLEDVTAQFESYKALTASEIEDLKLENSSLQEKAAKAGKNAEDVQHQILATESSNQEYVRMLLDLQTKSALKETEIKEITVSFLQKITDLQNQLKQQEEDFRKQLEDEEGRKAEKENTTAELTEEINKWRLLYEELYNKTKPFQLQLDAFEVEKQALLNEHGAAQEQLNKIRDSYAKLLGHQNLKQKIKHVVKLKDENSQLKSEVSKLRCQLAKKKQSETKLQEELNKVLGIKHFDPSKAFHHESKENFALKTPLKEGNTNCYRAPMECQESWK

SEQ ID NO: 6516 - protein, 701 aa, Homo sapiens
MSFPKAPLKRFNDPSGCAPSPGAYDVKTLEVLKGPVSFQKSQRFKQQKESKQNLNVDKDTTLPASARKVKSSESKKESQKNDKDLKILEKEIRVLLQERGAQDRRIQDLETELEKQLIELTRTNELLKSKFSENGNQKNLRILSLELMKLRNKRETKMRGMMAKQEGMEMKLQVTQRSLEESQGKIAQLEGKLVSIEKEKIDEKSETEKLLEYIEEISCASDQVEKYKLDIAQLEENLKEKNDEILSLKQSLEENIVILSKQVEDLNVKCQLLEKEKEDHVNRNREHNENLNAEMQNLKQKFILEQQEREKLQQKELQIDSLLQQEKELSSSLHQKLCSFQEEMVKEKNLFEEELKQTLDELDKLQQKEEQAERLVKQLEEEAKSRAEELKLLEEKLKGKEAELEKSSAAHTQATLLLQEKYDSMVQSLEDVTAQFESYKALTASEIEDLKLENSSLQEKAAKAGKNAEDVQHQILATESSNQEYVRMLLDLQTKSALKETEIKEITVSFLQKITDLQNQLKQQEEDFRKQLEDEEGRKAEKENTTAELTEEINKWRLLYEELYNKTKPFQLQLDAFEVEKQALLNEHGAAQEQLNKIRDSYAKLLGHQNLKQKIKHVVKLKDENSQLKSEVSKLRCQLAKKKQSETKLQEELNKVLGIKHFDPSKAFHHESKENFALKTPLKEGNTNCYRAPMECQESWK

SEQ ID NO: 6517 - protein, 638 aa, Homo sapiens
MTLLIRVLLQERGAQDRRIQDLETELEKMEARLNAALREKTSLSANNATLEKQLIELTRTNELLKSKFSENGNQKNLRILSLELMKLRNKRETKMRGMMAKQEGMEMKLQVTQRSLEESQGKIAQLEGKLVSIEKEKIDEKSETEKLLEYIEEISCASDQVEKYKLDIAQLEENLKEKNDEILSLKQSLEENIVILSKQVEDLNVKCQLLEKEKEDHVNRNREHNENLNAEMQNLKQKFILEQQEREKLQQKELQIDSLLQQEKELSSSLHQKLCSFQEEMVKEKNLFEEELKQTLDELDKLQQKEEQAERLVKQLEEEAKSRAEELKLLEEKLKGKEAELEKSSAAHTQATLLLQEKYDSMVQSLEDVTAQFESYKALTASEIEDLKLENSSLQEKAAKAGKNAEDVQHQILATESSNQEYVRMLLDLQTKSALKETEIKEITVSFLQKITDLQNQLKQQEEDFRKQLEDEEGRKAEKENTTAELTEEINKWRLLYEELYNKTKPFQLQLDAFEVEKQALLNEHGAAQEQLNKIRDSYAKLLGHQNLKQKIKHVVKLKDENSQLKSEVSKLRCQLAKKKQSETKLQEELNKVLGIKHFDPSKAFHHESKENFALKTPLKEGNTNCYRAPMECQESWK

SEQ ID NO: 6518 - protein, 331 aa, Homo sapiens
MSFPKAPLKRFNDPSGCAPSPGAYDVKTLEVLKGPVSFQKSQRFKQQKESKQNLNVDKDTTLPASARKVKSSESKIRVLLQERGAQDRRIQDLETELEKMEARLNAALREKTSLSANNATLEKQLIELTRTNELLKSKFSENGNQKNLRILSLELMKLRNKRETKMRGMMAKQEGMEMKLQVTQRSLEESQGKIAQLEGKLVSIEKEKIDEKSETEKLLEYIEEISCASDQVEKYKLDIAQLEENLKEKNDEILSLKQSLEENIVILSKQVEDLNVKCQLLEKEKEDHVNRNREHNENLNAEMQNLKQKFILEQQEREKLQQKKKQMRRKK

SEQ ID NO: 6519 - protein, 178 aa, Homo sapiens
MHVNGKVALVTGAAQGIGRAFAEALLLKGAKVALVDWNLEAGVQCKAALDEQFEPQKTLFIQCDVADQQQLRDTFRKVVDHFGRLDILVNNAGVNNEKNWEKTLQINLVSVISGTYLGLDYMSKQNGGEGGIIINMSSLAGLMPVAQQPVYCASKHGIVGFTRSAAPTIDCQWIDNTH

SEQ ID NO: 6520 - protein, 266 aa, Homo sapiens [sequence omitted]

SEQ ID NO: 6521 - protein, 145 aa, Homo sapiens
MSKQNGGEGGIIINMSSLAGLMPVAQQPVYCASKHGIVGFTRSAALAANLMNSGVRLNAICPGFVNTAILESIEKEENMGQYIEYKDHIKDMIKYYGILDPPLIANGLITLIEDDALNGAIMKITTSKGIHFQDYDTTPFQAKTQ

SEQ ID NO: 6522 - protein, 145 aa, Homo sapiens; identical to SEQ ID NO: 6521

SEQ ID NO: 6523 - protein, 143 aa, Homo sapiens
MHVNGKVALVTGAAQGIGRAFAEALLLKGAKVALVDWNLEAGVQCKAALDEQFEPQKTLFIQCDVADQQQLRDTFRKVVDHFGRLDILVNNAGVNNEKNWEKTLQINLVSVISGTYLGLDYMSKQNGGEGGIIINMSSLAAHH

SEQ ID NO: 6524 - protein, 733 aa, Homo sapiens
MTFPEADILLKSGECAGQTMLDTMEAPGHSRQLLLQLNNQRTKGFLCDVIIVVQNALFRAHKNVLAASSAYLKSLVVHDNLLNLDHDMVSPAVFRLVLDFIYTGRLADGAEAAAAAAVAPGAEPSLGAVLAAASYLQIPDLVALCKKRLKRHGKYCHLRGGGGGGGGYAPYGRPGRGLRAATPVIQACYPSPVGPPPPPAAEPPSGPEAAVNTHCAELYASGPGPAAALCASERRCSPLCGLDLSKKSPPGSAAPERPLAERELPPRPDSPPSAGPAAYKEPPLALPSLPPLPFQKLEEAAPPSDPFRGGSGSPGPEPPGRPDGPSLLYRWMKHEPGLGSYGDELGRERGSPSERCEERGGDAAVSPGGPPLGLAPPPRYPGSLDGPGAGGDGDDYKSSSEETGSSEDPSPPGGHLEGYPCPHLAYGEPESFGDNLYVCIPCGKGFPSSEQLNAHVEAHVEEEEALYGRAEAAEVAAGAAGLGPPFGGGGDKVAGAPGGLGELLRPYRCASCDKSYKDPATLRQHEKTHWLTRPYPCTICGKKFTQRGTMTRHMRSHLGLKPFACDACGMRFTRQYRLTEHMRIHSGEKPYECQVCGGKFAQQRNLISHMKMHAVGGAAGAAGALAGLGGLPGVPGPDGKGKLDFPEGVFAVARLTAEQLSLKQQDKAAAAELLAQTTHFLHDPKVALESLYPLAKFTAELGLSPDKAAEVLSQGAHLAAGPDGRTIDRFSPT

SEQ ID NO: 6525 - protein, 714 aa, Homo sapiens
MLDTMEAPGHSRQLLLQLNNQRTKGFLCDVIIVVQNALFRAHKNVLAASSAYLKSLVVHDNLLNLDHDMVSPAVFRLVLDFIYTGRLADGAEAAAAAAVAPGAEPSLGAVLAAASYLQIPDLVALCKKRLKRHGKYCHLRGGGGGGGGYAPYGRPGRGLRAATPVIQACYPSPVGPPPPPAAEPPSGPEAAVNTHCAELYASGPGPAAALCASERRCSPLCGLDLSKKSPPGSAAPERPLAERELPPRPDSPPSAGPAAYKEPPLALPSLPPLPFQKLEEAAPPSDPFRGGSGSPGPEPPGRPDGPSLLYRWMKHEPGLGSYGDELGRERGSPSERCEERGGDAAVSPGGPPLGLAPPPRYPGSLDGPGAGGDGDDYKSSSEETGSSEDPSPPGGHLEGYPCPHLAYGEPESFGDNLYVCIPCGKGFPSSEQLNAHVEAHVEEEEALYGRAEAAEVAAGAAGLGPPFGGGGDKVAGAPGGLGELLRPYRCASCDKSYKDPATLRQHEKTHWLTRPYPCTICGKKFTQRGTMTRHMRSHLGLKPFACDACGMRFTRQYRLTEHMRIHSGEKPYECQVCGGKFAQQRNLISHMKMHAVGGAAGAAGALAGLGGLPGVPGPDGKGKLDFPEGVFAVARLTAEQLSLKQQDKAAAAELLAQTTHFLHDPKVALESLYPLAKFTAELGLSPDKAAEVLSQGAHLAAGPDGRTIDRFSPT

SEQ ID NO: 6526 - protein, 735 aa, Homo sapiens
MEGAGGANDKKKISSERRKEKSRDAARSRRSKESEVFYELAHQLPLPHNVSSHLDKASVMRLTISYLRVRKLLDAGDLDIEDDMKAQMNCFYLKALDGFVMVLTDDGDMIYISDNVNKYMGLTQFELTGHSVFDFTHPCDHEEMREMLTHRNGLVKKGKEQNTQRSFFLRMKCTLTSRGRTMNIKSATWKVLHCTGHIHVYDTNSNQPQCGYKKPPMTCLVLICEPIPHPSNIEIPLDSKTFLSRHSLDMKFSYCDERITELMGYEPEELLGRSIYEYYHALDSDHLTKTHHDMFTKGQVTTGQYRMLAKRGGYVWVETQATVIYNTKNSQPQCIVCVNYVVSGIIQHDLIFSLQQTECVLKPVESSDMKMTQLFTKVESEDTSSLFDKLKKEPDALTLLAPAAGDTIISLDFGSNDTETDDQQLEEVPLYNDVMLPSPNEKLQNINLAMSPLPTAETPKPLRSSADPALNQEVALKLEPNPESLELSFTMPQIQDQTPSPSDGSTRQSSPEPNSPSEYCFYVDSDMVNEFKLELVEKLFAEDTEAKNPFSTQDTDLDLEMLAPYIPMDDDFQLRSFDQLSPLESSSASPESASPQSTVTVFQQTQIQEPTANATTTTATTDELKTVTKDRMEDIKILIASPSPTHIHKETTSATSSPYRDTQSRTASPNRAGKGVIEQTEKSHPRSPNVLSVALSQRTTVPEEELNPKILALQNAQRKRKMEHDGSLFQAVGII

SEQ ID NO: 6527 - protein, 826 aa, Homo sapiens
MEGAGGANDKKKISSERRKEKSRDAARSRRSKESEVFYELAHQLPLPHNVSSHLDKASVMRLTISYLRVRKLLDAGDLDIEDDMKAQMNCFYLKALDGFVMVLTDDGDMIYISDNVNKYMGLTQFELTGHSVFDFTHPCDHEEMREMLTHRNGLVKKGKEQNTQRSFFLRMKCTLTSRGRTMNIKSATWKVLHCTGHIHVYDTNSNQPQCGYKKPPMTCLVLICEPIPHPSNIEIPLDSKTFLSRHSLDMKFSYCDERITELMGYEPEELLGRSIYEYYHALDSDHLTKTHHDMFTKGQVTTGQYRMLAKRGGYVWVETQATVIYNTKNSQPQCIVCVNYVVSGIIQHDLIFSLQQTECVLKPVESSDMKMTQLFTKVESEDTSSLFDKLKKEPDALTLLAPAAGDTIISLDFGSNDTETDDQQLEEVPLYNDVMLPSPNEKLQNINLAMSPLPTAETPKPLRSSADPALNQEVALKLEPNPESLELSFTMPQIQDQTPSPSDGSTRQSSPEPNSPSEYCFYVDSDMVNEFKLELVEKLFAEDTEAKNPFSTQDTDLDLEMLAPYIPMDDDFQLRSFDQLSPLESSSASPESASPQSTVTVFQQTQIQEPTANATTTTATTDELKTVTKDRMEDIKILIASPSPTHIHKETTSATSSPYRDTQSRTASPNRAGKGVIEQTEKSHPRSPNVLSVALSQRTTVPEEELNPKILALQNAQRKRKMEHDGSLFQAVGIGTLLQQPDDHAATTSLSWKRVKGCKSSEQNGMEQKTIILIPSDLACRLLGQSMDESGLPQLTSYDCEVNAPIQGSRNLLQGEELLRALDQVN

SEQ ID NO: 6528 - protein, 767 aa, Homo sapiens [sequence omitted]

SEQ ID NO: 6529 - protein, 827 aa, Homo sapiens
MEGAGGANDKKNRISSERRKEKSRDAARSRRSKESEVFYELAHQLPLPHNVSSHLDKASVMRLTISYLRVRKLLDAGDLDIEDDMKAQMNCFYLKALDGFVMVLTDDGDMIYISDNVNKYMGLTQFELTGHSVFDFTHPCDHEEMREMLTHRNGLVKKGKEQNTQRSFFLRMKCTLTSRGRTMNIKSATWKVLHCTGHIHVYDTNSNQPQCGYKKPPMTCLVLICEPIPHPSNIEIPLDSKTFLSRHSLDMKFSYCDERITELMGYEPEELLGRSIYEYYHALDSDHLTKTHHDMFTKGQVTTGQYRMLAKRGGYVWVETQATVIYNTKNSQPQCIVCVNYVVSGIIQHDLIFSLQQTECVLKPVESSDMKMTQLFTKVESEDTSSLFDKLKKEPDALTLLAPAAGDTIISLDFGSNDTETDDQQLEEVPLYNDVMLPSPNEKLQNINLAMSPLPTAETPKPLRSSADPALNQEVALKLEPNPESLELSFTMPQIQDQTPSPSDGSTRQSSPEPNSPSEYCFYVDSDMVNEFKLELVEKLFAEDTEAKNPFSTQDTDLDLEMLAPYIPMDDDFQLRSFDQLSPLESSSASPESASPQSTVTVFQQTQIQEPTANATTTTATTDELKTVTKDRMEDIKILIASPSPTHIHKETTSATSSPYRDTQSRTASPNRAGKGVIEQTEKSHPRSPNVLSVALSQRTTVPEEELNPKILALQNAQRKRKMEHDGSLFQAVGIGTLLQQPDDHAATTSLSWKRVKGCKSSEQNGMEQKTIILIPSDLACRLLGQSMDESGLPQLTSYDCEVNAPIQGSRNLLQGEELLRALDQVN

SEQ ID NO: 6530 - protein, 850 aa, Homo sapiens
MSSQCRSLENKFVFLKEGLGNSKPEELEEIRIENGRISSERRKEKSRDAARSRRSKESEVFYELAHQLPLPHNVSSHLDKASVMRLTISYLRVRKLLDAGDLDIEDDMKAQMNCFYLKALDGFVMVLTDDGDMIYISDNVNKYMGLTQFELTGHSVFDFTHPCDHEEMREMLTHRNGLVKKGKEQNTQRSFFLRMKCTLTSRGRTMNIKSATWKVLHCTGHIHVYDTNSNQPQCGYKKPPMTCLVLICEPIPHPSNIEIPLDSKTFLSRHSLDMKFSYCDERITELMGYEPEELLGRSIYEYYHALDSDHLTKTHHDMFTKGQVTTGQYRMLAKRGGYVWVETQATVIYNTKNSQPQCIVCVNYVVSGIIQHDLIFSLQQTECVLKPVESSDMKMTQLFTKVESEDTSSLFDKLKKEPDALTLLAPAAGDTIISLDFGSNDTETDDQQLEEVPLYNDVMLPSPNEKLQNINLAMSPLPTAETPKPLRSSADPALNQEVALKLEPNPESLELSFTMPQIQDQTPSPSDGSTRQSSPEPNSPSEYCFYVDSDMVNEFKLELVEKLFAEDTEAKNPFSTQDTDLDLEMLAPYIPMDDDFQLRSFDQLSPLESSSASPESASPQSTVTVFQQTQIQEPTANATTTTATTDELKTVTKDRMEDIKILIASPSPTHIHKETTSATSSPYRDTQSRTASPNRAGKGVIEQTEKSHPRSPNVLSVALSQRTTVPEEELNPKILALQNAQRKRKMEHDGSLFQAVGIGTLLQQPDDHAATTSLSWKRVKGCKSSEQNGMEQKTIILIPSDLACRLLGQSMDESGLPQLTSYDCEVNAPIQGSRNLLQGEELLRALDQVN

SEQ ID NO: 6531 - protein, 577 aa, Homo sapiens
MKFSYCDERITELMGYEPEELLGRSIYEYYHALDSDHLTKTHHDMFTKGQVTTGQYRMLAKRGGYVWVETQATVIYNTKNSQPQCIVCVNYVVSGIIQHDLIFSLQQTECVLKPVESSDMKMTQLFTKVESEDTSSLFDKLKKEPDALTLLAPAAGDTIISLDFGSNDTETDDQQLEEVPLYNDVMLPSPNEKLQNINLAMSPLPTAETPKPLRSSADPALNQEVALKLEPNPESLELSFTMPQIQDQTPSPSDGSTRQSSPEPNSPSEYCFYVDSDMVNEFKLELVEKLFAEDTEAKNPFSTQDTDLDLEMLAPYIPMDDDFQLRSFDQLSPLESSSASPESASPQSTVTVFQQTQIQEPTANATTTTATTDELKTVTKDRMEDIKILIASPSPTHIHKETTSATSSPYRDTQSRTASPNRAGKGVIEQTEKSHPRSPNVLSVALSQRTTVPEEELNPKILALQNAQRKRKMEHDGSLFQAVGIGTLLQQPDDHAATTSLSWKRVKGCKSSEQNGMEQKTIILIPSDLACRLLGQSMDESGLPQLTSYDCEVNAPIQGSRNLLQGEELLRALDQVN

SEQ ID NO: 6532 - protein, 767 aa, Homo sapiens [sequence omitted]

SEQ ID NO: 6533 - protein, 431 aa, Homo sapiens
MEDIQTNAELKSTQEQSVPAESAAVLNDYSLTKSHEMENVDSGEGPANEDEDIGDDSMKVKDEYSERDENVLKSEPMGNAEEPEIPYSYSREYNEYENIKLERHVVSFDSSRPTSGKMNCDVCGLSCISFNVLMVHKRSHTGERPFQCNQCGASFTQKGNLLRHIKLHTGEKPFKCHLCNYACQRRDALTGHLRTHSGEKRHCFDVNYNSSYMYEKESELIQTRMMDQAINNAISYLGAEALRPLVQTPPAPTSEMVPVISSMYPIALTRAEMSNGAPQELEKKSIHLPEKSVPSERGLSPNNSGHDSTDTDSNHEERQNHIYQQNHMVLSRARNGMPLLKEVPRSYELLKPPPICPRDSVKVINKEGEVMDVYRCDHCRVLFLDYVMFTIHMGCHGFRDPFECNMCGYRSHDRYEFSSHIARGEHRALLK

SEQ ID NO: 6534 - protein, 414 aa, Homo sapiens
MEDIQTNAELKSTQEQSVPAESAAVLNDYSLTKSHEMENVDSGEGPANEDEDIGDDSMKVKDEYSERDENVLKSEPMGNAEEPEIPYSYSREYNEYENIKLERHVVSFDSSRPTSGKMNCDVCGLSCISFNVLMVHKRSHTASAEARHIKAEMGSERALVLDRLASNVAKRKSSMPQKFIGEKRHCFDVNYNSSYMYEKESELIQTRMMDQAINNAISYLGAEALRPLVQTPPAPTSEMVPVISSMYPIALTRAEMSNGAPQELEKKSIHLPEKSVPSERGLSPNNSGHDSTDTDSNHEERQNHIYQQNHMVLSRARNGMPLLKEVPRSYELLKPPPICPRDSVKVINKEGEVMDVYRCDHCRVLFLDYVMFTIHMGCHGFRDPFECNMCGYRSHDRYEFSSHIARGEHRALLK

SEQ ID NO: 6535 - protein, 470 aa, Homo sapiens
MEDIQTNAELKSTQEQSVPAESAAVLNDYSLTKSHEMENVDSGEGPANEDEDIGDDSMKVKDEYSERDENVLKSEPMGNAEEPEIPYSYSREYNEYENIKLERHVVSFDSSRPTSGKMNCDVCGLSCISFNVLMVHKRSHTGERPFQCNQCGASFTQKGNLLRHIKLHTGEKPFKCHLCNYACQRRDALTGHLRTHSVEKPYKCEFCGRSYKQRSSLEEHKERCRTFLQSTDPGDTGEKRHCFDVNYNSSYMYEKESELIQTRMMDQAINNAISYLGAEALRPLVQTPPAPTSEMVPVISSMYPIALTRAEMSNGAPQELEKKSIHLPEKSVPSERGLSPNNSGHDSTDTDSNHEERQNHIYQQNHMVLSRARNGMPLLKEVPRSYELLKPPPICPRDSVKVINKEGEVMDVYRCDHCRVLFLDYVMFTIHMGCHGFRDPFECNMCGYRSHDRYEFSSHIARGEHRALLK

SEQ ID NO: 6536 - protein, 470 aa, Homo sapiens
MEDIQTNAELKSTQEQSVPAESAAVLNDYSLTKSHEMENVDSGEGPANEDEDIGDDSMKVKDEYSERDENVLKSEPMGNAEEPEIPYSYSREYNEYENIKLERHVVSFDSSRPTSGKMNCDVCGLSCISFNVLMVHKRSHTGERPFQCNQCGASFTQKGNLLRHIKLHTGEKPFKCHLCNYACQRRDALTGHLRTHSASAEARHIKAEMGSERALVLDRLASNVAKRKSSMPQKFIGEKRHCFDVNYNSSYMYEKESELIQTRMMDQAINNAISYLGAEALRPLVQTPPAPTSEMVPVISSMYPIALTRAEMSNGAPQELEKKSIHLPEKSVPSERGLSPNNSGHDSTDTDSNHEERQNHIYQQNHMVLSRARNGMPLLKEVPRSYELLKPPPICPRDSVKVINKEGEVMDVYRCDHCRVLFLDYVMFTIHMGCHGFRDPFECNMCGYRSHDRYEFSSHIARGEHRALLK

SEQ ID NO: 6537 - protein, 366 aa, Homo sapiens
MEDIQTNAELKSTQEQSVPAESAAVLNDYSLTKSHEMENVDSGEGPANEDEDIGVEKPYKCEFCGRSYKQRSSLEEHKERCRTFLQSTDPGDTASAEARHIKAEMGSERALVLDRLASNVAKRKSSMPQKFIGEKRHCFDVNYNSSYMYEKESELIQTRMMDQAINNAISYLGAEALRPLVQTPPAPTSEMVPVISSMYPIALTRAEMSNGAPQELEKKSIHLPEKSVPSERGLSPNNSGHDSTDTDSNHEERQNHIYQQNHMVLSRARNGMPLLKEVPRSYELLKPPPICPRDSVKVINKEGEVMDVYRCDHCRVLFLDYVMFTIHMGCHGFRDPFECNMCGYRSHDRYEFSSHIARGEHRALLK

SEQ ID NO: 6538 - protein, 375 aa, Homo sapiens
MEDIQTNAELKSTQEQSVPAESAAVLNDYSLTKSHEMENVDSGEGPANEDEDIGDDSMKVKDEYSERDENVLKSEPMGNAEEPEIPYSYSREYNEYENIKLERHVVSFDSSRPTSGKMNCDVCGLSCISFNVLMVHKRSHTGEKRHCFDVNYNSSYMYEKESELIQTRMMDQAINNAISYLGAEALRPLVQTPPAPTSEMVPVISSMYPIALTRAEMSNGAPQELEKKSIHLPEKSVPSERGLSPNNSGHDSTDTDSNHEERQNHIYQQNHMVLSRARNGMPLLKEVPRSYELLKPPPICPRDSVKVINKEGEVMDVYRCDHCRVLFLDYVMFTIHMGCHGFRDPFECNMCGYRSHDRYEFSSHIARGEHRALLK

SEQ ID NO: 6539 - protein, 288 aa, Homo sapiens
MEDIQTNAELKSTQEQSVPAESAAVLNDYSLTKSHEMENVDSGEGPANEDEDIGGEKRHCFDVNYNSSYMYEKESELIQTRMMDQAINNAISYLGAEALRPLVQTPPAPTSEMVPVISSMYPIALTRAEMSNGAPQELEKKSIHLPEKSVPSERGLSPNNSGHDSTDTDSNHEERQNHIYQQNHMVLSRARNGMPLLKEVPRSYELLKPPPICPRDSVKVINKEGEVMDVYRCDHCRVLFLDYVMFTIHMGCHGFRDPFECNMCGYRSHDRYEFSSHIARGEHRALLK

SEQ ID NO: 6540 - protein, 422 aa, Homo sapiens
MEDIQTNAELKSTQEQSVPAESAAVLNDYSLTKSHEMENVDSGEGPANEDEDIGGERPFQCNQCGASFTQKGNLLRHIKLHTGEKPFKCHLCNYACQRRDALTGHLRTHSVEKPYKCEFCGRSYKQRSSLEEHKERCRTFLQSTDPGDTASAEARHIKAEMGSERALVLDRLASNVAKRKSSMPQKFIGEKRHCFDVNYNSSYMYEKESELIQTRMMDQAINNAISYLGAEALRPLVQTPPAPTSEMVPVISSMYPIALTRAEMSNGAPQELEKKSIHLPEKSVPSERGLSPNNSGHDSTDTDSNHEERQNHIYQQNHMVLSRARNGMPLLKEVPRSYELLKPPPICPRDSVKVINKEGEVMDVYRCDHCRVLFLDYVMFTIHMGCHGFRDPFECNMCGYRSHDRYEFSSHIARGEHRALLK

SEQ ID NO: 6541 - protein, 327 aa, Homo sapiens
MEDIQTNAELKSTQEQSVPAESAAVLNDYSLTKSHEMENVDSGEGPANEDEDIGASAEARHIKAEMGSERALVLDRLASNVAKRKSSMPQKFIGEKRHCFDVNYNSSYMYEKESELIQTRMMDQAINNAISYLGAEALRPLVQTPPAPTSEMVPVISSMYPIALTRAEMSNGAPQELEKKSIHLPEKSVPSERGLSPNNSGHDSTDTDSNHEERQNHIYQQNHMVLSRARNGMPLLKEVPRSYELLKPPPICPRDSVKVINKEGEVMDVYRCDHCRVLFLDYVMFTIHMGCHGFRDPFECNMCGYRSHDRYEFSSHIARGEHRALLK

SEQ ID NO: 6542 - protein, 463 aa, Homo sapiens
  VARIANT 1: note = MOD_RES - Any amino acid
XQEQSVPADDSMKVKDEYSERDENVLKSEPMGNAEEPEIPYSYSREYNEYENIKLERHVVSFDSSRPTSGKMNCDVCGLSCISFNVLMVHKRSHTGERPFQCNQCGASFTQKGNLLRHIKLHTGEKPFKCHLCNYACQRRDALTGHLRTHSVEKPYKCEFCGRSYKQRSSLEEHKERCRTFLQSTDPGDTASAEARHIKAEMGSERALVLDRLASNVAKRKSSMPQKFIGEKRHCFDVNYNSSYMYEKESELIQTRMMDQAINNAISYLGAEALRPLVQTPPAPTSEMVPVISSMYPIALTRAEMSNGAPQELEKKSIHLPEKSVPSERGLSPNNSGHDSTDTDSNHEERQNHIYQQNHMVLSRARNGMPLLKEVPRSYELLKPPPICPRDSVKVINKEGEVMDVYRCDHCRVLFLDYVMFTIHMGCHGFRDPFECNMCGYRSHDRYEFSSHIARGEHRALLK

SEQ ID NO: 6543 - protein, 424 aa, Homo sapiens
  VARIANT 1: note = MOD_RES - Any amino acid
XQEQSVPADDSMKVKDEYSERDENVLKSEPMGNAEEPEIPYSYSREYNEYENIKLERHVVSFDSSRPTSGKMNCDVCGLSCISFNVLMVHKRSHTGERPFQCNQCGASFTQKGNLLRHIKLHTGEKPFKCHLCNYACQRRDALTGHLRTHSASAEARHIKAEMGSERALVLDRLASNVAKRKSSMPQKFIGEKRHCFDVNYNSSYMYEKESELIQTRMMDQAINNAISYLGAEALRPLVQTPPAPTSEMVPVISSMYPIALTRAEMSNGAPQELEKKSIHLPEKSVPSERGLSPNNSGHDSTDTDSNHEERQNHIYQQNHMVLSRARNGMPLLKEVPRSYELLKPPPICPRDSVKVINKEGEVMDVYRCDHCRVLFLDYVMFTIHMGCHGFRDPFECNMCGYRSHDRYEFSSHIARGEHRALLK

SEQ ID NO: 6544 - protein, 453 aa, Homo sapiens
MEDIQTNAELKSTQEQSVPAESAAVLNDYSLTKSHEMENVDSGEGPANEDEDIGDDSMKVKDEYSERDENVLKSEPMGNAEEPEIPYSYSREYNEYENIKLERHVVSFDSSRPTSGKMNCDVCGLSCISFNVLMVHKRSHTVEKPYKCEFCGRSYKQRSSLEEHKERCRTFLQSTDPGDTASAEARHIKAEMGSERALVLDRLASNVAKRKSSMPQKFIGEKRHCFDVNYNSSYMYEKESELIQTRMMDQAINNAISYLGAEALRPLVQTPPAPTSEMVPVISSMYPIALTRAEMSNGAPQELEKKSIHLPEKSVPSERGLSPNNSGHDSTDTDSNHEERQNHIYQQNHMVLSRARNGMPLLKEVPRSYELLKPPPICPRDSVKVINKEGEVMDVYRCDHCRVLFLDYVMFTIHMGCHGFRDPFECNMCGYRSHDRYEFSSHIARGEHRALLK

SEQ ID NO: 6545 - protein, 509 aa, Homo sapiens
MEDIQTNAELKSTQEQSVPAESAAVLNDYSLTKSHEMENVDSGEGPANEDEDIGDDSMKVKDEYSERDENVLKSEPMGNAEEPEIPYSYSREYNEYENIKLERHVVSFDSSRPTSGKMNCDVCGLSCISFNVLMVHKRSHTGERPFQCNQCGASFTQKGNLLRHIKLHTGEKPFKCHLCNYACQRRDALTGHLRTHSVEKPYKCEFCGRSYKQRSSLEEHKERCRTFLQSTDPGDTASAEARHIKAEMGSERALVLDRLASNVAKRKSSMPQKFIGEKRHCFDVNYNSSYMYEKESELIQTRMMDQAINNAISYLGAEALRPLVQTPPAPTSEMVPVISSMYPIALTRAEMSNGAPQELEKKSIHLPEKSVPSERGLSPNNSGHDSTDTDSNHEERQNHIYQQNHMVLSRARNGMPLLKEVPRSYELLKPPPICPRDSVKVINKEGEVMDVYRCDHCRVLFLDYVMFTIHMGCHGFRDPFECNMCGYRSHDRYEFSSHIARGEHRALLK

SEQ ID NO: 6546 - protein, 475 aa, Homo sapiens
MEDIQTNAELKSTQEQSVPADDSMKVKDEYSERDENVLKSEPMGNAEEPEIPYSYSREYNEYENIKLERHVVSFDSSRPTSGKMNCDVCGLSCISFNVLMVHKRSHTGERPFQCNQCGASFTQKGNLLRHIKLHTGEKPFKCHLCNYACQRRDALTGHLRTHSVEKPYKCEFCGRSYKQRSSLEEHKERCRTFLQSTDPGDTASAEARHIKAEMGSERALVLDRLASNVAKRKSSMPQKFIGEKRHCFDVNYNSSYMYEKESELIQTRMMDQAINNAISYLGAEALRPLVQTPPAPTSEMVPVISSMYPIALTRAEMSNGAPQELEKKSIHLPEKSVPSERGLSPNNSGHDSTDTDSNHEERQNHIYQQNHMVLSRARNGMPLLKEVPRSYELLKPPPICPRDSVKVINKEGEVMDVYRCDHCRVLFLDYVMFTIHMGCHGFRDPFECNMCGYRSHDRYEFSSHIARGEHRALLK

SEQ ID NO: 6547 - protein, 149 aa, Homo sapiens
MKVASGSTATAAAGPSCALKAGKTASGAGEVVRCLSEQSVAISRCAGGAGARLPALLDEQQVNVLLYDMNGCYSRLKELVPTLPQNRKVSKVEILQHVIDYIRDLQLELNSESEVGTPGGRGLPVRAPLSTLNGEISALTAEVRSRSDH

SEQ ID NO: 6548 - protein, 155 aa, Homo sapiens
MKVASGSTATAAAGPSCALKAGKTASGAGEVVRCLSEQSVAISRCAGGAGARLPALLDEQQVNVLLYDMNGCYSRLKELVPTLPQNRKVSKVEILQHVIDYIRDLQLELNSESEVGTPGGRGLPVRAPLSTLNGEISALTAEAACVPADDRILCR

SEQ ID NO: 6549 - protein, 245 aa, Homo sapiens
MAAGMYLEHYLDSIENLPFELQRNFQLMRDLDQRTEDLKAEIDKLATEYMSSARSLSSEEKLALLKQIQEAYGKCKEFGDDKVQLAMQTYEMVDKHIRRLDTDLARFEADLKEKQIESSDYDSSSSKGRTQKEKKAARARSKGKNSDEEAPKTAQKKLKLVRTSPEYGMPSVTFGSVHPSDVLDMPVDPNEPTYCLCHQVSYGEMIGCDNPDCSIEWFHFACVGLTTKPRGKWFCPRCSQERKKK

SEQ ID NO: 6550 - protein, 279 aa, Homo sapiens
MLSPANGEQLHLVNYVEDYLDSIESLPFDLQRNVSLMREIDAKYQEILKELDECYERFSRETDGAQKRRMLHCVQRALIRSQELGDEKIQIVSQMVELVENRTRQVDSHVELFEAQQELGDTAGNSGKAGADRPKGEAAAQADKPNSKRSRRQRNNENRENASSNHDHDDGASGTPKEKKAKTSKKKKRSKAKAEREASPADLPIDPNEPTYCLCNQVSYGEMIGCDNDECPIEWFHFSCVGLNHKPKGKWYCPKCRGENEKTMDKALEKSKKERAYNR

SEQ ID NO: 6551 - protein, 235 aa, Homo sapiens
MEILKELDECYERFSRETDGAQKRRMLHCVQRALIRSQELGDEKIQIVSQMVELVENRTRQVDSHVELFEAQQELGDTAGNSGKAGADRPKGEAAAQADKPNSKRSRRQRNNENRENASSNHDHDDGASGTPKEKKAKTSKKKKRSKAKAEREASPADLPIDPNEPTYCLCNQVSYGEMIGCDNDECPIEWFHFSCVGLNHKPKGKWYCPKCRGENEKTMDKALEKSKKERAYNR

SEQ ID NO: 6552 - protein, 422 aa, Homo sapiens
MSFVECPYHSPAERLVAEADEGGPSAITGMGLCFRCLLFSFSGRSGVEGGRVDLNVFGSLGLQPWIGSSRCWGGPCSSALRCGWFSSWPPPSKSAIPIGGGSRGAGRVSRWPPPHWLEAWRVSPLPLSPLSPATFGRGFIAVAVIPGLWARGRGCSSDRLPRPAGPARRQFQAASLLTRGWGRAWPWKQILKELDECYERFSRETDGAQKRRMLHCVQRALIRSQELGDEKIQIVSQMVELVENRTRQVDSHVELFEAQQELGDTAGNSGKAGADRPKGEAAAQADKPNSKRSRRQRNNENRENASSNHDHDDGASGTPKEKKAKTSKKKKRSKAKAEREASPADLPIDPNEPTYCLCNQVSYGEMIGCDNDECPIEWFHFSCVGLNHKPKGKWYCPKCRGENEKTMDKALEKSKKERAYNR

SEQ ID NO: 6553 - protein, 210 aa, Homo sapiens
MLHCVQRALIRSQELGDEKIQIVSQMVELVENRTRQVDSHVELFEAQQELGDTAGNSGKAGADRPKGEAAAQADKPNSKRSRRQRNNENRENASSNHDHDDGASGTPKEKKAKTSKKKKRSKAKAEREASPADLPIDPNEPTYCLCNQVSYGEMIGCDNDECPIEWFHFSCVGLNHKPKGKWYCPKCRGENEKTMDKALEKSKKERAYNR

SEQ ID NO: 6554 - protein, 248 aa, Homo sapiens
MAAGMYLEHYLDSIENLPFELQRNFQLMRDLDQRTEDLKAEIDKLATEYMSSARSLSSEEKLALLKQIQEAYGKCKEFGDDKVQLAMQTYEMVDKHIRRLDTDLARFEADLKEKQIESSDYDSSSSKGKKSRTQKEKKAARARSKGKNSDEEAPKTAQKKLKLVRTSPEYGMPSVTFGSVHPSDVLDMPVDPNEPTYCLCHQVSYGEMIGCDNPDCSIEWFHFACVGLTTKPRGKWFCPRCSQERKKK

SEQ ID NO: 6555 - protein, 249 aa, Homo sapiens
MAAGMYLEHYLDSIENLPFELQRNFQLMRDLDQRTEDLKAEIDKLATEYMSSARSLSSEEKLALLKQIQEAYGKCKEFGDDKVQLAMQTYEMVDKHIRRLDTDLARFEADLKEKQIESSDYDSSSSKGKKKGRTQKEKKAARARSKGKNSDEEAPKTAQKKLKLVRTSPEYGMPSVTFGSVHPSDVLDMPVDPNEPTYCLCHQVSYGEMIGCDNPDCSIEWFHFACVGLTTKPRGKWFCPRCSQERKKK

SEQ ID NO: 6556 - protein, 246 aa, Homo sapiens
MAAGMYLEHYLDSIENLPFELQRNFQLMRDLDQRTEDLKAEIDKLATEYMSSARSLSSEEKLALLKQIQEAYGKCKEFGDDKVQLAMQTYEMVDKHIRRLDTDLARFEADLKEKQIESSDYDSSSSKEGRTQKEKKAARARSKGKNSDEEAPKTAQKKLKLVRTSPEYGMPSVTFGSVHPSDVLDMPVDPNEPTYCLCHQVSYGEMIGCDNPDCSIEWFHFACVGLTTKPRGKWFCPRCSQERKKK

SEQ ID NO: 6557 - protein, 179 aa, Homo sapiens
MAAGMYLEHYLDSIENLPFELQRNFQLMRDLDQRTEDLKAEIDKLATEYMSSARSLSSEEKLALLKQIQEAYGKCKEFGDDKVQLAMQTYEMVDKHIRRLDTDLARFEADLKEKQIESSDYDSSSSKGKKKGRTQKEKKAARARSKGKNSDEEAPKTAQKKLKLVRTVPLSGSILPVWG

SEQ ID NO: 6558 - protein, 225 aa, Homo sapiens
MAAGMYLEHYLDNLKAEIDKLATEYMSSARSLSSEEKLALLKQIQEAYGKCKEFGDDKVQLAMQTYEMVDKHIRRLDTDLARFEADLKEKQIESSDYDSSSSKGKKKGRTQKEKKAARARSKGKNSDEEAPKTAQKKLKLVRTSPEYGMPSVTFGSVHPSDVLDMPVDPNEPTYCLCHQVSYGEMIGCDNPDCSIEWFHFACVGLTTKPRGKWFCPRCSQERKKK

SEQ ID NO: 6559 - protein, 1242 aa, Homo sapiens
MASPPESDGFSDVRKVGYLRKPKSMHKRFFVLRAASEAGGPARLEYYENEKKWRHKSSAPKRSIPLESCFNINKRADSKNKHLVALYTRDEHFAIAADSEAEQDSWYQALLQLHNRAKGHHDGAAALGAGGGGGSCSGSSGLGEAGEDLSYGDVPPGPAFKEVWQVILKPKGLGQTKNLIGIYRLCLTSKTISFVKLNSEAAAVVLQLMNIRRCGHSENFFFIEVGRSAVTGPGEFWMQVDDSVVAQNMHETILEAMRAMSDEFRPRSKSQSSSNCSNPISVPLRRHHLNNPPPSQVGLTRRSRTESITATSPASMVGGKPGSFRVRASSDGEGTMSRPASVDGSPVSPSTNRTHAHRHRGSARLHPPLNHSRSIPMPASRCSPSATSPVSLSSSSTSGHGSTSDCLFPRRSSASVSGSPSDGGFISSDEYGSSPCDFRSSFRSVTPDSLGHTPPARGEEELSNYICMGGKGPSTLTAPNGHYILSRGGNGHRCTPGTGLGTSPALAGDEAASAADLDNRFRKRTHSAGTSPTITHQKTPSQSSVASIEEYTEMMPAYPPGGGSGGRLPGHRHSAFVPTRSYPEEGLEMHPLERRGGHHRPDSSTLHTDDGYMPMSPGVAPVPSGRKGSGDYMPMSPKSVSAPQQIINPIRRHPQRVDPNGYMMMSPSGGCSPDIGGGPSSSSSSSNAVPSGTSYGKLWTNGVGGHHSHVLPHPKPPVESSGGKLLPCTGDYMNMSPVGDSNTSSPSDCYYGPEDPQHKPVLSYYSLPRSFKHTQRPGEPEEGARHQHLRLSTSSGRLLYAATADDSSSSTSSDSLGGGYCGARLEPSLPHPHHQVLQPHLPRKVDTAAQTNSRLARPTRLSLGDPKASTLPRAREQQQQQQPLLHPPEPKSPGEYVNIEFGSDQSGYLSGPVAFHSSPSVRCPSQLQPAPREEETGTEEYMKMDLGPGRRAAWQESTGVEMGRLGPAPPGAASICRPTRAVPSSRGDYMTMQMSCPRQSYVDTSPAAPVSYADMRTGIAAEEVSLPRATMAAASSSSAASASPTGPQGAAELAAHSSLLGGPQGPGGMSAFTRVNLSPNRNQSAKVIRADPQGCRRRHSSETFSSTPSATRVGNTVPFGAGAAVGGGGGSSSSSEDVKRHSSASFENVWLRPGELGGAPKEPAKLCGAAGGLENGLNYIDLDLVKDFKQCPQECTPEPQPPPPPPPHQPLGSGESSSTRRSSEDLSAYASISFQKQPEDRQ

SEQ ID NO: 6560 - protein, 195 aa, Homo sapiens
MGKISSLPTQLFKCCFCDFLKVKMHTMSSSHLFYLALCLLTFTSSATAGPETLCGAELVDALQFVCGDRGFYFNKPTGYGSSSRRAPQTGIVDECCFRSCDLRRLEMYCAPLKPAKSARSVRAQRHTDMPKTQKYQPPSTNKNTKSQRRKGWPKTHPGGEQKEGTEASLQIRGKKKEQRREIGSRNAECRGKKGK

SEQ ID NO: 6561 - protein, 153 aa, Homo sapiens
MGKISSLPTQLFKCCFCDFLKVKMHTMSSSHLFYLALCLLTFTSSATAGPETLCGAELVDALQFVCGDRGFYFNKPTGYGSSSRRAPQTGIVDECCFRSCDLRRLEMYCAPLKPAKSARSVRAQRHTDMPKTQKEVHLKNASRGSAGNKNYRM

SEQ ID NO: 6562 - protein, 158 aa, Homo sapiens
MGKISSLPTQLFKCCFCDFLKVKMHTMSSSHLFYLALCLLTFTSSATAGPETLCGAELVDALQFVCGDRGFYFNKPTGYGSSSRRAPQTGIVDECCFRSCDLRRLEMYCAPLKPAKSARSVRAQRHTDMPKTQKYQPPSTNKNTKSQRRKGSTFEERK

SEQ ID NO: 6563 - protein, 139 aa, Homo sapiens
LKVKMHTMSSSHLFYLALCLLTFTSSATAGPETLCGAELVDALQFVCGDRGFYFNKPTGYGSSSRRAPQTGIVDECCFRSCDLRRLEMYCAPLKPAKSARSVRAQRHTDMPKTQKYQPPSTNKNTKSQRRKGSTFEERK

SEQ ID NO: 6564 - protein, 137 aa, Homo sapiens
MITPTVKMHTMSSSHLFYLALCLLTFTSSATAGPETLCGAELVDALQFVCGDRGFYFNKPTGYGSSSRRAPQTGIVDECCFRSCDLRRLEMYCAPLKPAKSARSVRAQRHTDMPKTQKEVHLKNASRGSAGNKNYRM

SEQ ID NO: 6565 - protein, 158 aa, Homo sapiens; identical to SEQ ID NO: 6562

SEQ ID NO: 6566 - protein, 1367 aa, Homo sapiens
MKSGSGGGSPTSLWGLLFLSAALSLWPTSGEICGPGIDIRNDYQQLKRLENCTVIEGYLHILLISKAEDYRSYRFPKLTVITEYLLLFRVAGLESLGDLFPNLTVIRGWKLFYNYALVIFEMTNLKDIGLYNLRNITRGAIRIEKNADLCYLSTVDWSLILDAVSNNYIVGNKPPKECGDLCPGTMEEKPMCEKTTINNEYNYRCWTTNRCQKMCPSTCGKRACTENNECCHPECLGSCSAPDNDTACVACRHYYYAGVCVPACPPNTYRFEGWRCVDRDFCANILSAESSDSEGFVIHDGECMQECPSGFIRNGSQSMYCIPCEGPCPKVCEEEKKTKTIDSVTSAQMLQGCTIFKGNLLINIRRGNNIASELENFMGLIEVVTGYVKIRHSHALVSLSFLKNLRLILGEEQLEGNYSFYVLDNQNLQQLWDWDHRNLTIKAGKMYFAFNPKLCVSEIYRMEEVTGTKGRQSKGDINTRNNGERASCESDVLHFTSTTTSKNRIIITWHRYRPPDYRDLISFTVYYKEAPFKNVTEYDGQDACGSNSWNMVDVDLPPNKDVEPGILLHGLKPWTQYAVYVKAVTLTMVENDHIRGAKSEILYIRTNASVPSIPLDVLSASNSSSQLIVKWNPPSLPNGNLSYYIVRWQRQPQDGYLYRHNYCSKDKIPIRKYADGTIDIEEVTENPKTEVCGGEKGPCCACPKTEAEKQAEKEEAEYRKVFENFLHNSIFVPRPERKRRDVMQVANTTMSSRSRNTTAADTYNITDPEELETEYPFFESRVDNKERTVISNLRPFTLYRIDIHSCNHEAEKLGCSASNFVFARTMPAEGADDIPGPVTWEPRPENSIFLKWPEPENPNGLILMYEIKYGSQVEDQRECVSRQEYRKYGGAKLNRLNPGNYTARIQATSLSGNGSWTDPVFFYVQAKTGYENFIHLIIALPVAVLLIVGGLVIMLYVFHRKRNNSRLGNGVLYASVNPEYFSAADVYVPDEWEVAREKITMSRELGQGSFGMVYEGVAKGVVKDEPETRVAIKTVNEAASMRERIEFLNEASVMKEFNCHHVVRLLGVVSQGQPTLVIMELMTRGDLKSYLRSLRPEMENNPVLAPPSLSKMIQMAGEIADGMAYLNANKFVHRDLAARNCMVAEDFTVKIGDFGMTRDIYETDYYRKGGKGLLPVRWMSPESLKDGVFTTYSDVWSFGVVLWEIATLAEQPYQGLSNEQVLRFVMEGGLLDKPDNCPDMLFELMRMCWQYNPKMRPSFLEIISSIKEEMEPGFREVSFYYSEENKLPEPEELDLEPENMESVPLDPSASSSSLPLPDRHSGHKAENGPGPGVLVLRASFDERQPYAHMNGGRKNERALPLPQSSTC

SEQ ID NO: 6567 - protein, 180 aa, Homo sapiens
MGIPMGKSMLVLLTFLAFASCCIAAYRPSETLCGGELVDTLQFVCGDRGFYFSRPASRVSRRSRGIVEECCFRSCDLALLETYCATPAKSERDVSTPPTVLPDNFPRYPVGKFFQYDTWKQSTQRLRRGLPALLRARRGHVLAKELEAFREAKRHRPLIALPTQDPAHGGAPPEMASNRK

SEQ ID NO: 6568 - protein, 180 aa, Homo sapiens; identical to SEQ ID NO: 6567

SEQ ID NO: 6569 - protein, 183 aa, Homo sapiens
MGIPMGKSMLVLLTFLAFASCCIAAYRPSETLCGGELVDTLQFVCGDRGFYFRLPGRPASRVSRRSRGIVEECCFRSCDLALLETYCATPAKSERDVSTPPTVLPDNFPRYPVGKFFQYDTWKQSTQRLRRGLPALLRARRGHVLAKELEAFREAKRHRPLIALPTQDPAHGGAPPEMASNRK

SEQ ID NO: 6570 - protein, 183 aa, Homo sapiens; identical to SEQ ID NO: 6569

SEQ ID NO: 6571 - protein, 180 aa, Homo sapiens; identical to SEQ ID NO: 6567

SEQ ID NO: 6572 - protein, 183 aa, Homo sapiens; identical to SEQ ID NO: 6569

SEQ ID NO: 6573 - protein, 180 aa, Homo sapiens; identical to SEQ ID NO: 6567

SEQ ID NO: 6574 - protein, 183 aa, Homo sapiens; identical to SEQ ID NO: 6569

SEQ ID NO: 6575 - protein, 180 aa, Homo sapiens; identical to SEQ ID NO: 6567

SEQ ID NO: 6576 - protein, 180 aa, Homo sapiens; identical to SEQ ID NO: 6567

SEQ ID NO: 6577 - protein, 236 aa, Homo sapiens
MVSPDPQIIVVAPETELASMQVQRTEDGVTIIQIFWVGRKGELLRRTPVSSAMQTPMGIPMGKSMLVLLTFLAFASCCIAAYRPSETLCGGELVDTLQFVCGDRGFYFSRPASRVSRRSRGIVEECCFRSCDLALLETYCATPAKSERDVSTPPTVLPDNFPRYPVGKFFQYDTWKQSTQRLRRGLPALLRARRGHVLAKELEAFREAKRHRPLIALPTQDPAHGGAPPEMASNRK

SEQ ID NO: 6578 - protein, 291 aa, Homo sapiens
MQRARPTLWAAALTLLVLLRGPPVARAGASSAGLGPVVRCEPCDARALAQCAPPPAVCAELVREPGCGCCLTCALSEGQPCGIYTERCGSGLRCQPSPDEARPLQALLDGRGLCVNASAVSRLRAYLLPAPPAPGNASESEEDRSAGSVESPSVSSTHRVSDPKFHPLHSKIIIIKKGHAKDSQRYKVDYESQSTDTQNFSSESKRETEYGPCRREMEDTLNHLKFLNVLSPRGVHIPNCDKKGFYKKKQCRPSKGRKRGFCWCVDKYGQPLPGYTTKGKEDVHCYSMQSK

SEQ ID NO: 6579 - protein, 297 aa, Homo sapiens
MQRARPTLWAAALTLLVLLRGPPVARAGASSAGLGPVVRCEPCDARALAQCAPPPAVCAELVREPGCGCCLTCALSEGQPCGIYTERCGSGLRCQPSPDEARPLQALLDGRGLCVNASAVSRLRAYLLPAPPAPGEPPAPGNASESEEDRSAGSVESPSVSSTHRVSDPKFHPLHSKIIIIKKGHAKDSQRYKVDYESQSTDTQNFSSESKRETEYGPCRREMEDTLNHLKFLNVLSPRGVHIPNCDKKGFYKKKQCRPSKGRKRGFCWCVDKYGQPLPGYTTKGKEDVHCYSMQSK

SEQ ID NO: 6580 - protein, 194 aa, Homo sapiens
MQRARPLQALLDGRGLCVNASAVSRLRAYLLPAPPAPGNASESEEDRSAGSVESPSVSSTHRVSDPKFHPLHSKIIIIKKGHAKDSQRYKVDYESQSTDTQNFSSESKRETEYGPCRREMEDTLNHLKFLNVLSPRGVHIPNCDKKGFYKKKQCRPSKGRKRGFCWCVDKYGQPLPGYTTKGKEDVHCYSMQSK

SEQ ID NO: 6581 - protein, 153 aa, Homo sapiens
  VARIANT 1: note = MOD_RES - Any amino acid
XSEEDRSAGSVESPSVSSTHRVSDPKFHPLHSKIIIIKKGHAKDSQRYKVDYESQSTDTQNFSSESKRETEYGPCRREMEDTLNHLKFLNVLSPRGVHIPNCDKKGFYKKKQCRPSKGRKRGFCWCVDKYGQPLPGYTTKGKEDVHCYSMQSK

SEQ ID NO: 6582 - protein, 143 aa, Homo sapiens
  VARIANT 1: note = MOD_RES - Any amino acid
XESPSVSSTHRVSDPKFHPLHSKIIIIKKGHAKDSQRYKVDYESQSTDTQNFSSESKRETEYGPCRREMEDTLNHLKFLNVLSPRGVHIPNCDKKGFYKKKQCRPSKGRKRGFCWCVDKYGQPLPGYTTKGKEDVHCYSMQSK

SEQ ID NO: 6583 - protein, 263 aa, Homo sapiens
MQRARPTLWAACEPCDARALAQCAPPPAVCAELVREPGCGCCLTCALSEGQPCGIYTERCGSGLRCQPSPDEARPLQALLDGRGLCVNASAVSRLRAYLLPAPPAPGNASESEEDRSAGSVESPSVSSTHRVSDPKFHPLHSKIIIIKKGHAKDSQRYKVDYESQSTDTQNFSSESKRETEYGPCRREMEDTLNHLKFLNVLSPRGVHIPNCDKKGFYKKKQCRPSKGRKRGFCWCVDKYGQPLPGYTTKGKEDVHCYSMQSK

SEQ ID NO: 6584 - protein, 277 aa, Homo sapiens [sequence omitted]

SEQ ID NO: 6585 - protein, 189 aa, Homo sapiens [sequence omitted]

SEQ ID NO: 6586 - protein, 268 aa, Homo sapiens
MQRARPTLWAAALTLLVLLRGPPVARAGASSAGLGPVVRREPGCGCCLTCALSEGQPCGIYTERCGSGLRCQPSPDEARPLQALLDGRGLCVNASAVSRLRAYLLPAPPAPGNASESEEDRSAGSVESPSVSSTHRVSDPKFHPLHSKIIIIKKGHAKDSQRYKVDYESQSTDTQNFSSESKRETEYGPCRREMEDTLNHLKFLNVLSPRGVHIPNCDKKGFYKKKQCRPSKGRKRGFCWCVDKYGQPLPGYTTKGKEDVHCYSMQSK

SEQ ID NO: 6587 - protein, 272 aa, Homo sapiens
MVLLTAVLLLLAAYAGPAQSLGSFVHCEPCDEKALSMCPPSPLGCELVKEPGCGCCMTCALAEGQSCGVYTERCAQGLRCLPRQDEEKPLHALLHGRGVCLNEKSYREQVKIERDSREHEEPTTSEMAEETYSPKIFRPKHTRISELKAEAVKKDRRKKLTQSKFVGGAENTAHPRIISAPEMRQESEQGPCRRHMEASLQELKASPRMVPRAVYLPNCDRKGFYKRKQCKPSRGRKRGICWCVDKYGMKLPGMEYVDGDFQCHTFDSSNVE

SEQ ID NO: 6588 - protein, 1032 aa, Homo sapiens [sequence omitted]

SEQ ID NO: 6589 - protein, 617 aa, Homo sapiens
MAWEARREPGPRRAAVRETVMLLLCLGVPTGRPYNVDTESALLYQGPHNTLFGYSVVLHSHGANRWLLVGAPTANWLANASVINPGAIYRCRIGKNPGQTCEQLQLGSPNGEPCGKTCLEERDNQWLGVTLSRQPGENGSIVTCGHRWKNIFYIKNENKLPTGGCYGVPPDLRTELSKRIAPCYQDYVKKFGENFASCQAGISSFYTKDLIVMGAPGSSYWTGSLFVYNITTNKYKAFLDKQNQVKFGSYLGYSVGAGHFRSQHTTEVVGGAPQHEQIGKAYIFSIDEKELNILHEMKGKKLGSYFGASVCAVDLNADGFSDLLVGAPMQSTIREEGRVFVYINSGSGAVMNAMETNLVGSDKYAARFGESIVNLGDIDNDGFEDVAIGAPQEDDLQGAIYIYNGRADGISSTFSQRIEGLQISKSLSMFGQSISGQIDADNNGYVDVAVGAFRSDSAVLLRTRPVVIVDASLSHPESVNRTKFDCVENGWPSVCIDLTLCFSYKGKEVPGYIVLFYNMSLDVNRKAESPPRFYFSSNGTSDVITGSIQVSSREANCRTHQAFMRKDVRDILTPIQIEAAYHLGPHVISKRSTEEFPPLQPILQQKKEKDIMKKTKK

SEQ ID NO: 6590 - protein, 1049 aa, Homo sapiens
MGSRTPESPLHAVQLRWGPRRRPPLLPLLLLLLPPPPRVGGFNLDAEAPAVLSGPPGSFFGFSVEFYRPGTDGVSVLVGAPKANTSQPGVLQGGAVYLCPWGASPTQCTPIEFDSKGSRLLESSLSSSEGEEPVEYKSLQWFGATVRAHGSSILACAPLYSWRTEKEPLSDPVGTCYLSTDNFTRILEYAPCRSDFSWAAGQGYCQGGFSAEFTKTGRVVLGGPGSYFWQGQILSATQEQIAESYYPEYLINLVQGQLQTRQASSIYDDSYLGYSVAVGEFSGDDTEDFVAGVPKGNLTYGYVTILNGSDIRSLYNFSGEQMASYFGYAVAATDVNGDGLDDLLVGAPLLMDRTPDGRPQEVGRVYVYLQHPAGIEPTPTLTLTGHDEFGRFGSSLTPLGDLDQDGYNDVAIGAPFGGETQQGVVFVFPGGPGGLGSKPSQVLQPLWAASHTPDFFGSALRGGRDLDGNGYPDLIVGSFGVDKAVVYRGRPIVSASASLTIFPAMFNPEERSCSLEGNPVACINLSFCLNASGKHVADSIGFTVELQLDWQKQKGGVRRALFLASRQATLTQTLLIQNGAREDCREMKIYLRNESEFRDKLSPIHIALNFSLDPQAPVDSHGLRPALHYQSKSRIEDKAQILLDCGEDNICVPDLQLEVFGEQNHVYLGDKNALNLTFHAQNVGEGGAYEAELRVTAPPEAEYSGLVRHPGNFSSLSCDYFAVNQSRLLVCDLGNPMKAGASLWGGLRFTVPHLRDTKKTIQFDFQILSKNLNNSQSDVVSFRLSVEAQAQVTLNGVSKPEAVLFPVSDWHPRDQPQKEEDLGPAVHHVYELINQGPSSISQGVLELSCPQALEGQQLLYVTRVTGLNCTTNHPINPKGLELDPEGSLHHQQKREAPSRSSASSGPQILKCPEAECFRLRCELGPLHQQESQSLQLHFRVWAKTFLQREHQPFSLQCEAVYKALKMPYRILPRQLPQKERQVATAVQWTKAEGSYGVPLWIIILAILFGLLLLGLLIYILYKLGFFKRSLPYGTAMEKAQLKPPATSDA

SEQ ID NO: 6591 - protein, 1130 aa, Homo sapiens
MAAAGQLCLLYLSAGLLSRLGAAFNLDTREDNVIRKYGDPGSLFGFSLAMHWQLQPEDKRLLLVGAPRAEALPLQRANRTGGLYSCDITARGPCTRIEFDNDADPTSESKEDQWMGVTVQSQGPGGKVVTCAHRYEKRQHVNTKQESRDIFGRCYVLSQNLRIEDDMDGGDWSFCDGRLRGHEKFGSCQQGVAATFTKDFHYIVFGAPGTYNWKGIVRVEQKNNTFFDMNIFEDGPYEVGGETEHDESLVPVPANSYLGLLFLTSVSYTDPDQFVYKTRPPREQPDTFPDVMMNSYLGFSLDSGKGIVSKDEITFVSGAPRANHSGAVVLLKRDMKSAHLLPEHIFDGEGLASSFGYDVAVVDLNKDGWQDIVIGAPQYFDRDGEVGGAVYVYMNQQGRWNNVKPIRLNGTKDSMFGIAVKNIGDINQDGYPDIAVGAPYDDLGKVFIYHGSANGINTKPTQVLKGISPYFGYSIAGNMDLDRNSYPDVAVGSLSDSVTIFRSRPVINIQKTITVTPNRIDLRQKTACGAPSGICLQVKSCFEYTANPAGYNPSISIVGTLEAEKERRKSGLSSRVQFRNQGSEPKYTQELTLKRQKQKVCMEETLWLQDNIRDKLRPIPITASVEIQEPSSRRRVNSLPEVLPILNSDEPKTAHIDVHFLKEGCGDDNVCNSNLKLEYKFCTREGNQDKFSYLPIQKGVPELVLKDQKDIALEITVTNSPSNPRNPTKDGDDAHEAKLIATFPDTLTYSAYRELRAFPEKQLSCVANQNGSQADCELGNPFKRNSNVTFYLVLSTTEVTFDTPDLDINLKLETTSNQDNLAPITAKAKVVIELLLSVSGVAKPSQVYFGGTVVGEQAMKSEDEVGSLIEYEFRVINLGKPLTNLGTATLNIQWPKEISNGKWLLYLVKVESKGLEKVTCEPQKEINSLNLTESHNSRKKREITEKQIDDNRKFSLFAERKYQTLNCSVNVNCVNIRCPLRGLDSKASLILRSRLWNSTFLEEYSKLNYLDILMRAFIDVTAAAENIRLPNAGTQVRVTVFPSKTVAQYSGVPWWIILVAILAGILMLALLVFILWKCGFFKRSRYDDSVPRYHAVRIRKEEREIKDEKYIDNLEKKQWITKWNENESYS

SEQ ID NO: 6592 - protein, 1073 aa, Homo sapiens
MAAAGQLCLLYLSAGLLSRLGAAFNLDTREDNVIRKYGDPGSLFGFSLAMHWQLQPEDKRLLLVGAPRAEALPLQRANRTGGLYSCDITARGPCTRIEFDNDADPTSESKEDQWMGVTVQSQGPGGKVVTCAHRYEKRQHVNTKQESRDIFGRCYVLSQNLRIEDDMDGGDWSFCDGRLRGHEKFGSCQQGVAATFTKDFHYIVFGAPGTYNWKGIVRVEQKNNTFFDMNIFEDGPYEVGGETEHDESLVPVPANSYLGFSLDSGKGIVSKDEITFVSGAPRANHSGAVVLLKRDMKSAHLLPEHIFDGEGLASSFGYDVAVVDLNKDGWQDIVIGAPQYFDRDGEVGGAVYVYMNQQGRWNNVKPIRLNGTKDSMFGIAVKNIGDINQDGYPDIAVGAPYDDLGKVFIYHGSANGINTKPTQVLKGISPYFGYSIAGNMDLDRNSYPDVAVGSLSDSVTIFRSRPVINIQKTITVTPNRIDLRQKTACGAPSGICLQVKSCFEYTANPAGYNPSISIVGTLEAEKERRKSGLSSRVQFRNQGSEPKYTQELTLKRQKQKVCMEETLWLQDNIRDKLRPIPITASVEIQEPSSRRRVNSLPEVLPILNSDEPKTAHIDVHFLKEGCGDDNVCNSNLKLEYKFCTREGNQDKFSYLPIQKGVPELVLKDQKDIALEITVTNSPSNPRNPTKDGDDAHEAKLIATFPDTLTYSAYRELRAFPEKQLSCVANQNGSQADCELGNPFKRNSNVTFYLVLSTTEVTFDTPDLDINLKLETTSNQDNLAPITAKAKVVIELLLSVSGVAKPSQVYFGGTVVGEQAMKSEDEVGSLIEYEFRVINLGKPLTNLGTATLNIQWPKEISNGKWLLYLVKVESKGLEKVTCEPQKEINSLNLTESHNSRKKREITEKQIDDNRKFSLFAERKYQTLNCSVNVNCVNIRCPLRGLDSKASLILRSRLWNSTFLEEYSKLNYLDILMRAFIDVTAAAENIRLPNAGTQVRVTVFPSKTVAQYSGVPWWIILVAILAGILMLALLVFILWKCGFFKRNKKDHYDATYHKAEIHAQPSDKERLTSDA

SEQ ID NO: 6593 - protein, 1068 aa, Homo sapiens
MAAAGQLCLLYLSAGLLSRLGAAFNLDTREDNVIRKYGDPGSLFGFSLAMHWQLQPEDKRLLLVGAPRAEALPLQRANRTGGLYSCDITARGPCTRIEFDNDADPTSESKEDQWMGVTVQSQGPGGKVVTCAHRYEKRQHVNTKQESRDIFGRCYVLSQNLRIEDDMDGGDWSFCDGRLRGHEKFGSCQQGVAATFTKDFHYIVFGAPGTYNWKGLLFLTSVSYTDPDQFVYKTRPPREQPDTFPDVMMNSYLGFSLDSGKGIVSKDEITFVSGAPRANHSGAVVLLKRDMKSAHLLPEHIFDGEGLASSFGYDVAVVDLNKDGWQDIVIGAPQYFDRDGEVGGAVYVYMNQQGRWNNVKPIRLNGTKDSMFGIAVKNIGDINQDGYPDIAVGAPYDDLGKVFIYHGSANGINTKPTQVLKGISPYFGYSIAGNMDLDRNSYPDVAVGSLSDSVTIFRSRPVINIQKTITVTPNRIDLRQKTACGAPSGICLQVKSCFEYTANPAGYNPSISIVGTLEAEKERRKSGLSSRVQFRNQGSEPKYTQELTLKRQKQKVCMEETLWLQDNIRDKLRPIPITASVEIQEPSSRRRVNSLPEVLPILNSDEPKTAHIDVHFLKEGCGDDNVCNSNLKLEYKFCTREGNQDKFSYLPIQKGVPELVLKDQKDIALEITVTNSPSNPRNPTKDGDDAHEAKLIATFPDTLTYSAYRELRAFPEKQLSCVANQNGSQADCELGNPFKRNSNVTFYLVLSTTEVTFDTPDLDINLKLETTSNQDNLAPITAKAKVVIELLLSVSGVAKPSQVYFGGTVVGEQAMKSEDEVGSLIEYEFRVINLGKPLTNLGTATLNIQWPKEISNGKWLLYLVKVESKGLEKVTCEPQKEINSLNLTESHNSRKKREITEKQIDDNRKFSLFAERKYQTLNCSVNVNCVNIRCPLRGLDSKASLILRSRLWNSTFLEEYSKLNYLDILMRAFIDVTAAAENIRLPNAGTQVRVTVFPSKTVAQYSGVPWWIILVAILAGILMLALLVFILWKCGFFKRNKKDHYDATYHKAEIHAQPSDKERLTSDA

SEQ ID NO: 6594 - protein, 1112 aa, Homo sapiens
MAAAGQLCLLYLSAGLLSRLGAAFNLDTREDNVIRKYGDPGSLFGFSLAMHWQLQPEDKRLLLVGAPRAEALPLQRANRTGGLYSCDITARGPCTRIEFDNDADPTSESKEDQWMGVTVQSQGPGGKVVTCAHRYEKRQHVNTKQESRDIFGRCYVLSQNLRIEDDMDGGDWSFCDGRLRGHEKFGSCQQGVAATFTKDFHYIVFGAPGTYNWKGIVRVEQKNNTFFDMNIFEDGPYEVGGETEHDESLVPVPANSYLGLLFLTSVSYTDPDQFVYKTRPPREQPDTFPDVMMNSYLGFSLDSGKGIVSKDEITFVSGAPRANHSGAVVLLKRDMKSAHLLPEHIFDGEGLASSFGYDVAVVDLNKDGWQDIVIGAPQYFDRDGEVGGAVYVYMNQQGRWNNVKPIRLNGTKDSMFGIAVKNIGDINQDGYPDIAVGAPYDDLGKVFIYHGSANGINTKPTQVLKGISPYFGYSIAGNMDLDRNSYPDVAVGSLSDSVTIFRSRPVINIQKTITVTPNRIDLRQKTACGAPSGICLQVKSCFEYTANPAGYNPSISIVGTLEAEKERRKSGLSSRVQFRNQGSEPKYTQELTLKRQKQKVCMEETLWLQDNIRDKLRPIPITASVEIQEPSSRRRVNSLPEVLPILNSDEPKTAHIDVHFLKEGCGDDNVCNSNLKLEYKFCTREGNQDKFSYLPIQKGVPELVLKDQKDIALEITVTNSPSNPRNPTKDGDDAHEAKLIATFPDTLTYSAYRELRAFPEKQLSCVANQNGSQADCELGNPFKRNSNVTFYLVLSTTEVTFDTPDLDINLKLETTSNQDNLAPITAKAKVVIELLLSVSGVAKPSQVYFGGTVVGEQAMKSEDEVGSLIEYEFRVINLGKPLTNLGTATLNIQWPKEISNGKWLLYLVKVESKGLEKVTCEPQKEINSLNLTESHNSRKKREITEKQIDDNRKFSLFAERKYQTLNCSVNVNCVNIRCPLRGLDSKASLILRSRLWNSTFLEEYSKLNYLDILMRAFIDVTAAAENIRLPNAGTQVRVTVFPSKTVAQYSGVPWWIILVAILAGILMLALLVFILWKCGFFKRNKKDHYDATYHKAEIHAQPSDKERLTSDA

SEQ ID NO: 6595 - protein, 1091 aa, Homo sapiens
MAAAGQLCLLYLSAGLLSRLGAAFNLDTREDNVIRKYGDPGSLFGFSLAMHWQLQPEDKRLLLVGAPRAEALPLQRANRTGGLYSCDITARGPCTRIEFDNDADPTSESKEDQWMGVTVQSQGPGGKVVTCAHRYEKRQHVNTKQESRDIFGRCYVLSQNLRIEDDMDGGDWSFCDGRLRGHEKFGSCQQGVAATFTKDFHYIVFGAPGTYNWKGIVRVEQKNNTFFDMNIFEDGPYEVGGETEHDESLVPVPANSYLGFSLDSGKGIVSKDEITFVSGAPRANHSGAVVLLKRDMKSAHLLPEHIFDGEGLASSFGYDVAVVDLNKDGWQDIVIGAPQYFDRDGEVGGAVYVYMNQQGRWNNVKPIRLNGTKDSMFGIAVKNIGDINQDGYPDIAVGAPYDDLGKVFIYHGSANGINTKPTQVLKGISPYFGYSIAGNMDLDRNSYPDVAVGSLSDSVTIFRSRPVINIQKTITVTPNRIDLRQKTACGAPSGICLQVKSCFEYTANPAGYNPSISIVGTLEAEKERRKSGLSSRVQFRNQGSEPKYTQELTLKRQKQKVCMEETLWLQDNIRDKLRPIPITASVEIQEPSSRRRVNSLPEVLPILNSDEPKTAHIDVHFLKEGCGDDNVCNSNLKLEYKFCTREGNQDKFSYLPIQKGVPELVLKDQKDIALEITVTNSPSNPRNPTKDGDDAHEAKLIATFPDTLTYSAYRELRAFPEKQLSCVANQNGSQADCELGNPFKRNSNVTFYLVLSTTEVTFDTPDLDINLKLETTSNQDNLAPITAKAKVVIELLLSVSGVAKPSQVYFGGTVVGEQAMKSEDEVGSLIEYEFRVINLGKPLTNLGTATLNIQWPKEISNGKWLLYLVKVESKGLEKVTCEPQKEINSLNLTESHNSRKKREITEKQIDDNRKFSLFAERKYQTLNCSVNVNCVNIRCPLRGLDSKASLILRSRLWNSTFLEEYSKLNYLDILMRAFIDVTAAAENIRLPNAGTQVRVTVFPSKTVAQYSGVPWWIILVAILAGILMLALLVFILWKCGFFKRSRYDDSVPRYHAVRIRKEEREIKDEKYIDNLEKKQWITKWNENESYS

SEQ ID NO: 6596 - protein, 954 aa, Homo sapiens
MGVTVQSQGPGGKVVTCAHRYEKRQHVNTKQESRDIFGRCYVLSQNLRIEDDMDGGDWSFCDGRLRGHEKFGSCQQGVAATFTKDFHYIVFGAPGTYNWKGLLFLTSVSYTDPDQFVYKTRPPREQPDTFPDVMMNSYLGFSLDSGKGIVSKDEITFVSGAPRANHSGAVVLLKRDMKSAHLLPEHIFDGEGLASSFGYDVAVVDLNKDGWQDIVIGAPQYFDRDGEVGGAVYVYMNQQGRWNNVKPIRLNGTKDSMFGIAVKNIGDINQDGYPDIAVGAPYDDLGKVFIYHGSANGINTKPTQVLKGISPYFGYSIAGNMDLDRNSYPDVAVGSLSDSVTIFRSRPVINIQKTITVTPNRIDLRQKTACGAPSGICLQVKSCFEYTANPAGYNPSISIVGTLEAEKERRKSGLSSRVQFRNQGSEPKYTQELTLKRQKQKVCMEETLWLQDNIRDKLRPIPITASVEIQEPSSRRRVNSLPEVLPILNSDEPKTAHIDVHFLKEGCGDDNVCNSNLKLEYKFCTREGNQDKFSYLPIQKGVPELVLKDQKDIALEITVTNSPSNPRNPTKDGDDAHEAKLIATFPDTLTYSAYRELRAFPEKQLSCVANQNGSQADCELGNPFKRNSNVTFYLVLSTTEVTFDTPDLDINLKLETTSNQDNLAPITAKAKVVIELLLSVSGVAKPSQVYFGGTVVGEQAMKSEDEVGSLIEYEFRVINLGKPLTNLGTATLNIQWPKEISNGKWLLYLVKVESKGLEKVTCEPQKEINSLNLTESHNSRKKREITEKQIDDNRKFSLFAERKYQTLNCSVNVNCVNIRCPLRGLDSKASLILRSRLWNSTFLEEYSKLNYLDILMRAFIDVTAAAENIRLPNAGTQVRVTVFPSKTVAQYSGVPWWIILVAILAGILMLALLVFILWKCGFFKRNKKDHYDATYHKAEIHAQPSDKERLTSDA

SEQ ID NO: 6597 - protein, 1130 aa, Homo sapiens; identical to SEQ ID NO: 6591

SEQ ID NO: 6598 - protein, 1086 aa, Homo sapiens
MAAAGQLCLLYLSAGLLSRLGAAFNLDTREDNVIRKYGDPGSLFGFSLAMHWQLQPEDKRLLLVGAPRAEALPLQRANRTGGLYSCDITARGPCTRIEFDNDADPTSESKEDQWMGVTVQSQGPGGKVVTCAHRYEKRQHVNTKQESRDIFGRCYVLSQNLRIEDDMDGGDWSFCDGRLRGHEKFGSCQQGVAATFTKDFHYIVFGAPGTYNWKGLLFLTSVSYTDPDQFVYKTRPPREQPDTFPDVMMNSYLGFSLDSGKGIVSKDEITFVSGAPRANHSGAVVLLKRDMKSAHLLPEHIFDGEGLASSFGYDVAVVDLNKDGWQDIVIGAPQYFDRDGEVGGAVYVYMNQQGRWNNVKPIRLNGTKDSMFGIAVKNIGDINQDGYPDIAVGAPYDDLGKVFIYHGSANGINTKPTQVLKGISPYFGYSIAGNMDLDRNSYPDVAVGSLSDSVTIFRSRPVINIQKTITVTPNRIDLRQKTACGAPSGICLQVKSCFEYTANPAGYNPSISIVGTLEAEKERRKSGLSSRVQFRNQGSEPKYTQELTLKRQKQKVCMEETLWLQDNIRDKLRPIPITASVEIQEPSSRRRVNSLPEVLPILNSDEPKTAHIDVHFLKEGCGDDNVCNSNLKLEYKFCTREGNQDKFSYLPIQKGVPELVLKDQKDIALEITVTNSPSNPRNPTKDGDDAHEAKLIATFPDTLTYSAYRELRAFPEKQLSCVANQNGSQADCELGNPFKRNSNVTFYLVLSTTEVTFDTPDLDINLKLETTSNQDNLAPITAKAKVVIELLLSVSGVAKPSQVYFGGTVVGEQAMKSEDEVGSLIEYEFRVINLGKPLTNLGTATLNIQWPKEISNGKWLLYLVKVESKGLEKVTCEPQKEINSLNLTESHNSRKKREITEKQIDDNRKFSLFAERKYQTLNCSVNVNCVNIRCPLRGLDSKASLILRSRLWNSTFLEEYSKLNYLDILMRAFIDVTAAAENIRLPNAGTQVRVTVFPSKTVAQYSGVPWWIILVAILAGILMLALLVFILWKCGFFKRSRYDDSVPRYHAVRIRKEEREIKDEKYIDNLEKKQWITKWNENESYS

SEQ ID NO: 6599 - protein, 1137 aa, Homo sapiens
MAGARSRDPWGASGICYLFGSLLVELLFSRAVAFNLDVMGALRKEGEPGSLFGFSVALHRQLQPRPQSWLLVGAPQALALPGQQANRTGGLFACPLSLEETDCYRVDIDQGADMQKESKENQWLGVSVRSQGPGGKIVTCAHRYEARQRVDQILETRDMIGRCFVLSQDLAIRDELDGGEWKFCEGRPQGHEQFGFCQQGTAAAFSPDSHYLLFGAPGTYNWKGLLFVTNIDSSDPDQLVYKTLDPADRLPGPAGDLALNSYLGFSIDSGKGLVRAEELSFVAGAPRANHKGAVVILRKDSASRLVPEVMLSGERLTSGFGYSLAVADLNSDGWPDLIVGAPYFFERQEELGGAVYVYLNQGGHWAGISPLRLCGSPDSMFGISLAVLGDLNQDGFPDIAVGAPFDGDGKVFIYHGSSLGVVAKPSQVLEGEAVGIKSFGYSLSGSLDMDGNQYPDLLVGSLADTAVLFRARPILHVSHEVSIAPRSIDLEQPNCAGGHSVCVDLRVCFSYIAVPSSYSPTVALDYVLDADTDRRLRGQVPRVTFLSRNLEEPKHQASGTVWLKHQHDRVCGDAMFQLQENVKDKLRAIVVTLSYSLQTPRLRRQAPGQGLPPVAPILNAHQPSTQRAEIHFLKQGCGEDKICQSNLQLVRARFCTRVSDTEFQPLPMDVDGTTALFALSGQPVIGLELMVTNLPSDPAQPQADGDDAHEAQLLVMLPDSLHYSGVRALDPAEKPLCLSNENASHVECELGNPMKRGAQVTFYLILSTSGISIETTELEVELLLATISEQELHPVSARARVFIELPLSIAGMAIPQQLFFSGVVRGERAMQSERDVGSKVKYEVTVSNQGQSLRTLGSAFLNIMWPHEIANGKWLLYPMQVELEGGQGPGQKGLCSPRPNILHLDVDSRDRRRRELEPPEQQEPGERQEPSMSWWPVSSAEKKKNITLDCARGTANCVVFSCPLYSFDRAAVLHVWGRLWNSTFLEEYSAVKSLEVIVRANITVKSSIKNLMLRDASTVIPVMVYLDPMAVVAEGVPWWVILLAVLAGLLVLALLVLLLWKMGFFKRAKHPEATVPQYHAVKIPREDRQQFKEEKTGTILRNNWGSPRREGPDAHPILAADGHPELGPDGHPGPGTA

SEQ ID NO: 6600 - protein, 1162 aa, Homo sapiens
MAGARSRDPWGASGICYLFGSLLVELLFSRAVAFNLDVMGALRKEGEPGSLFGFSVALHRQLQPRPQSWLLVGAPQALALPGQQANRTGGLFACPLSLEETDCYRVDIDQGADMQKESKENQWLGVSVRSQGPGGKIVTCAHRYEARQRVDQILETRDMIGRCFVLSQDLAIRDELDGGEWKFCEGRPQGHEQFGFCQQGTAAAFSPDSHYLLFGAPGTYNWKGTARVELCAQGSADLAHLDDGPYEAGGEKEQDPRLIPVPANSYFGLLFVTNIDSSDPDQLVYKTLDPADRLPGPAGDLALNSYLGFSIDSGKGLVRAEELSFVAGAPRANHKGAVVILRKDSASRLVPEVMLSGERLTSGFGYSLAVADLNSDGWPDLIVGAPYFFERQEELGGAVYVYLNQGGHWAGISPLRLCGSPDSMFGISLAVLGDLNQDGFPDIAVGAPFDGDGKVFIYHGSSLGVVAKPSQVLEGEAVGIKSFGYSLSGSLDMDGNQYPDLLVGSLADTAVLFRARPILHVSHEVSIAPRSIDLEQPNCAGGHSVCVDLRVCFSYIAVPSSYSPTVALDYVLDADTDRRLRGQVPRVTFLSRNLEEPKHQASGTVWLKHQHDRVCGDAMFQLQENVKDKLRAIVVTLSYSLQTPRLRRQAPGQGLPPVAPILNAHQPSTQRAEIHFLKQGCGEDKICQSNLQLVRARFCTRVSDTEFQPLPMDVDGTTALFALSGQPVIGLELMVTNLPSDPAQPQADGDDAHEAQLLVMLPDSLHYSGVRALDPAEKPLCLSNENASHVECELGNPMKRGAQVTFYLILSTSGISIETTELEVELLLATISEQELHPVSARARVFIELPLSIAGMAIPQQLFFSGVVRGERAMQSERDVGSKVKYEVTVSNQGQSLRTLGSAFLNIMWPHEIANGKWLLYPMQVELEGGQGPGQKGLCSPRPNILHLDVDSRDRRRRELEPPEQQEPGERQEPSMSWWPVSSAEKKKNITLDCARGTANCVVFSCPLYSFDRAAVLHVWGRLWNSTFLEEYSAVKSLEVIVRANITVKSSIKNLMLRDASTVIPVMVYLDPMAVVAEGVPWWVILLAVLAGLLVLALLVLLLWKCGFFHRSSQSSSFPTNYHRACLAVQPSAMEVGGPGTVGWDSSNGRSTPRPPCPSTMR

SEQ ID NO: 6601 - protein, 991 aa, Homo sapiens
MAGARSRDPWGASGICYLFGSLLVELLFSRAVAFNLDVMGALRKEGEPGSLFGFSVALHRQLQPRPQSWLLVGAPQALALPGQQANRTGGLFACPLSLEETDCYRVDIDQGADMQKESKENQWLGVSVRSQGPGGKIVTCAHRYEARQRVDQILETRDMIGRCFVLSQDLAIRDELDGGEWKFCEGRPQGHEQFGFCQQGTAAAFSPDSHYLLFGAPGTYNWKGTARVELCAQGSADLAHLDDGPYEAGGEKEQDPRLIPVPANSYFGLLFVTNIDSSDPDQLVYKTLDPADRLPGPAGDLALNSYLGFSIDSGKGLVRAEELSFVAGAPRANHKGAVVILRKDSASRLVPEVMLSGERLTSGFGYSLAVADLNSDGWPDLIVGAPYFFERQEELGGAVYVYLNQGGHWAGISPLRLCGSPDSMFGISLAVLGDLNQDGFPDIAVGAPFDGDGKVFIYHGSSLGVVAKPSQVLEGEAVGIKSFGYSLSGSLDMDGNQYPDLLVGSLADTAVLFRARPILHVSHEVSIAPRSIDLEQPNCAGGHSVCVDLRVCFSYIAVPSSYSPTVALDYVLDADTDRRLRGQVPRVTFLSRNLEEPKHQALDPAEKPLCLSNENASHVECELGNPMKRGAQVTFYLILSTSGISIETTELEVELLLATISEQELHPVSARARVFIELPLSIAGMAIPQQLFFSGVVRGERAMQSERDVGSKVKYEVTVSNQGQSLRTLGSAFLNIMWPHEIANGKWLLYPMQVELEGGQGPGQKGLCSPRPNILHLDVDSRDRRRRELEPPEQQEPGERQEPSMSWWPVSSAEKKKNITLDCARGTANCVVFSCPLYSFDRAAVLHVWGRLWNSTFLEEYSAVKSLEVIVRANITVKSSIKNLMLRDASTVIPVMVYLDPMAVVAEGVPWWVILLAVLAGLLVLALLVLLLWKCGFFHRSSQSSSFPTNYHRACLAVQPSAMEVGGPGTVGWDSSNGRSTPRPPCPSTMR

SEQ ID NO: 6602 - protein, 1118 aa, Homo sapiens
MAGARSRDPWGASGICYLFGSLLVELLFSRAVAFNLDVMGALRKEGEPGSLFGFSVALHRQLQPRPQSWLLVGAPQALALPGQQANRTGGLFACPLSLEETDCYRVDIDQGADMQKESKENQWLGVSVRSQGPGGKIVTCAHRYEARQRVDQILETRDMIGRCFVLSQDLAIRDELDGGEWKFCEGRPQGHEQFGFCQQGTAAAFSPDSHYLLFGAPGTYNWKGLLFVTNIDSSDPDQLVYKTLDPADRLPGPAGDLALNSYLGFSIDSGKGLVRAEELSFVAGAPRANHKGAVVILRKDSASRLVPEVMLSGERLTSGFGYSLAVADLNSDGWPDLIVGAPYFFERQEELGGAVYVYLNQGGHWAGISPLRLCGSPDSMFGISLAVLGDLNQDGFPDIAVGAPFDGDGKVFIYHGSSLGVVAKPSQVLEGEAVGIKSFGYSLSGSLDMDGNQYPDLLVGSLADTAVLFRARPILHVSHEVSIAPRSIDLEQPNCAGGHSVCVDLRVCFSYIAVPSSYSPTVALDYVLDADTDRRLRGQVPRVTFLSRNLEEPKHQASGTVWLKHQHDRVCGDAMFQLQENVKDKLRAIVVTLSYSLQTPRLRRQAPGQGLPPVAPILNAHQPSTQRAEIHFLKQGCGEDKICQSNLQLVRARFCTRVSDTEFQPLPMDVDGTTALFALSGQPVIGLELMVTNLPSDPAQPQADGDDAHEAQLLVMLPDSLHYSGVRALDPAEKPLCLSNENASHVECELGNPMKRGAQVTFYLILSTSGISIETTELEVELLLATISEQELHPVSARARVFIELPLSIAGMAIPQQLFFSGVVRGERAMQSERDVGSKVKYEVTVSNQGQSLRTLGSAFLNIMWPHEIANGKWLLYPMQVELEGGQGPGQKGLCSPRPNILHLDVDSRDRRRRELEPPEQQEPGERQEPSMSWWPVSSAEKKKNITLDCARGTANCVVFSCPLYSFDRAAVLHVWGRLWNSTFLEEYSAVKSLEVIVRANITVKSSIKNLMLRDASTVIPVMVYLDPMAVVAEGVPWWVILLAVLAGLLVLALLVLLLWKCGFFHRSSQSSSFPTNYHRACLAVQPSAMEVGGPGTVGWDSSNGRSTPRPPCPSTMR

SEQ ID NO: 6603 - protein, 1122 aa, Homo sapiens
MAGARSRDPWGASGICYLFGSLLVELLFSRAVAFNLDVMGALRKEGEPGSLFGFSVALHRQLQPRPQSWLLVGAPQALALPGQQANRTGGLFACPLSLEETDCYRVDIDQGADMQKESKENQWLGVSVRSQGPGGKIVTCAHRYEARQRVDQILETRDMIGRCFVLSQDLAIRDELDGGEWKFCEGRPQGHEQFGFCQQGTAAAFSPDSHYLLFGAPGTYNWKGTARVELCAQGSADLAHLDDGPYEAGGEKEQDPRLIPVPANSYFGFSIDSGKGLVRAEELSFVAGAPRANHKGAVVILRKDSASRLVPEVMLSGERLTSGFGYSLAVADLNSDGWPDLIVGAPYFFERQEELGGAVYVYLNQGGHWAGISPLRLCGSPDSMFGISLAVLGDLNQDGFPDIAVGAPFDGDGKVFIYHGSSLGVVAKPSQVLEGEAVGIKSFGYSLSGSLDMDGNQYPDLLVGSLADTAVLFRARPILHVSHEVSIAPRSIDLEQPNCAGGHSVCVDLRVCFSYIAVPSSYSPTVALDYVLDADTDRRLRGQVPRVTFLSRNLEEPKHQASGTVWLKHQHDRVCGDAMFQLQENVKDKLRAIVVTLSYSLQTPRLRRQAPGQGLPPVAPILNAHQPSTQRAEIHFLKQGCGEDKICQSNLQLVRARFCTRVSDTEFQPLPMDVDGTTALFALSGQPVIGLELMVTNLPSDPAQPQADGDDAHEAQLLVMLPDSLHYSGVRALDPAEKPLCLSNENASHVECELGNPMKRGAQVTFYLILSTSGISIETTELEVELLLATISEQELHPVSARARVFIELPLSIAGMAIPQQLFFSGVVRGERAMQSERDVGSKVKYEVTVSNQGQSLRTLGSAFLNIMWPHEIANGKWLLYPMQVELEGGQGPGQKGLCSPRPNILHLDVDSRDRRRRELEPPEQQEPGERQEPSMSWWPVSSAEKKKNITLDCARGTANCVVFSCPLYSFDRAAVLHVWGRLWNSTFLEEYSAVKSLEVIVRANITVKSSIKNLMLRDASTVIPVMVYLDPMAVVAEGVPWWVILLAVLAGLLVLALLVLLLWKCGFFHRSSQSSSFPTNYHRACLAVQPSAMEVGGPGTVGWDSSNGRSTPRPPCPSTMR

SEQ ID NO: 6604 - protein, 1044 aa, Homo sapiens
MAPFATPMVQALTTTRIQRQAEGFQCWRECGTRRSPFEGKETCAHRYEARQRVDQILETRDMIGRCFVLSQDLAIRDELDGGEWKFCEGRPQGHEQFGFCQQGTAAAFSPDSHYLLFGAPGTYNWKGTARVELCAQGSADLAHLDDGPYEAGGEKEQDPRLIPVPANSYFGFSIDSGKGLVRAEELSFVAGAPRANHKGAVVILRKDSASRLVPEVMLSGERLTSGFGYSLAVADLNSDGWPDLIVGAPYFFERQEELGGAVYVYLNQGGHWAGISPLRLCGSPDSMFGISLAVLGDLNQDGFPDIAVGAPFDGDGKVFIYHGSSLGVVAKPSQVLEGEAVGIKSFGYSLSGSLDMDGNQYPDLLVGSLADTAVLFRARPILHVSHEVSIAPRSIDLEQPNCAGGHSVCVDLRVCFSYIAVPSSYSPTVALDYVLDADTDRRLRGQVPRVTFLSRNLEEPKHQASGTVWLKHQHDRVCGDAMFQLQENVKDKLRAIVVTLSYSLQTPRLRRQAPGQGLPPVAPILNAHQPSTQRAEIHFLKQGCGEDKICQSNLQLVRARFCTRVSDTEFQPLPMDVDGTTALFALSGQPVIGLELMVTNLPSDPAQPQADGDDAHEAQLLVMLPDSLHYSGVRALDPAEKPLCLSNENASHVECELGNPMKRGAQVTFYLILSTSGISIETTELEVELLLATISEQELHPVSARARVFIELPLSIAGMAIPQQLFFSGVVRGERAMQSERDVGSKVKYEVTVSNQGQSLRTLGSAFLNIMWPHEIANGKWLLYPMQVELEGGQGPGQKGLCSPRPNILHLDVDSRDRRRRELEPPEQQEPGERQEPSMSWWPVSSAEKKKNITLDCARGTANCVVFSCPLYSFDRAAVLHVWGRLWNSTFLEEYSAVKSLEVIVRANITVKSSIKNLMLRDASTVIPVMVYLDPMAVVAEGVPWWVILLAVLAGLLVLALLVLLLWKMGFFKRAKHPEATVPQYHAVKIPREDRQQFKEEKTGTILRNNWGSPRREGPDAHPILAADGHPELGPDGHPGPGTA

SEQ ID NO: 6605 - protein, 1141 aa, Homo sapiens
MAGARSRDPWGASGICYLFGSLLVELLFSRAVAFNLDVMGALRKEGEPGSLFGFSVALHRQLQPRPQSWLLVGAPQALALPGQQANRTGGLFACPLSLEETDCYRVDIDQGADMQKESKENQWLGVSVRSQGPGGKIVTCAHRYEARQRVDQILETRDMIGRCFVLSQDLAIRDELDGGEWKFCEGRPQGHEQFGFCQQGTAAAFSPDSHYLLFGAPGTYNWKGTARVELCAQGSADLAHLDDGPYEAGGEKEQDPRLIPVPANSYFGFSIDSGKGLVRAEELSFVAGAPRANHKGAVVILRKDSASRLVPEVMLSGERLTSGFGYSLAVADLNSDGWPDLIVGAPYFFERQEELGGAVYVYLNQGGHWAGISPLRLCGSPDSMFGISLAVLGDLNQDGFPDIAVGAPFDGDGKVFIYHGSSLGVVAKPSQVLEGEAVGIKSFGYSLSGSLDMDGNQYPDLLVGSLADTAVLFRARPILHVSHEVSIAPRSIDLEQPNCAGGHSVCVDLRVCFSYIAVPSSYSPTVALDYVLDADTDRRLRGQVPRVTFLSRNLEEPKHQASGTVWLKHQHDRVCGDAMFQLQENVKDKLRAIVVTLSYSLQTPRLRRQAPGQGLPPVAPILNAHQPSTQRAEIHFLKQGCGEDKICQSNLQLVRARFCTRVSDTEFQPLPMDVDGTTALFALSGQPVIGLELMVTNLPSDPAQPQADGDDAHEAQLLVMLPDSLHYSGVRALDPAEKPLCLSNENASHVECELGNPMKRGAQVTFYLILSTSGISIETTELEVELLLATISEQELHPVSARARVFIELPLSIAGMAIPQQLFFSGVVRGERAMQSERDVGSKVKYEVTVSNQGQSLRTLGSAFLNIMWPHEIANGKWLLYPMQVELEGGQGPGQKGLCSPRPNILHLDVDSRDRRRRELEPPEQQEPGERQEPSMSWWPVSSAEKKKNITLDCARGTANCVVFSCPLYSFDRAAVLHVWGRLWNSTFLEEYSAVKSLEVIVRANITVKSSIKNLMLRDASTVIPVMVYLDPMAVVAEGVPWWVILLAVLAGLLVLALLVLLLWKMGFFKRAKHPEATVPQYHAVKIPREDRQQFKEEKTGTILRNNWGSPRREGPDAHPILAADGHPELGPDGHPGPGTA

SEQ ID NO: 6606 - protein, 1181 aa, Homo sapiens
MAGARSRDPWGASGICYLFGSLLVELLFSRAVAFNLDVMGALRKEGEPGSLFGFSVALHRQLQPRPQSWLLVGAPQALALPGQQANRTGGLFACPLSLEETDCYRVDIDQGADMQKESKENQWLGVSVRSQGPGGKIVTCAHRYEARQRVDQILETRDMIGRCFVLSQDLAIRDELDGGEWKFCEGRPQGHEQFGFCQQGTAAAFSPDSHYLLFGAPGTYNWKGTARVELCAQGSADLAHLDDGPYEAGGEKEQDPRLIPVPANSYFGLLFVTNIDSSDPDQLVYKTLDPADRLPGPAGDLALNSYLGFSIDSGKGLVRAEELSFVAGAPRANHKGAVVILRKDSASRLVPEVMLSGERLTSGFGYSLAVADLNSDGWPDLIVGAPYFFERQEELGGAVYVYLNQGGHWAGISPLRLCGSPDSMFGISLAVLGDLNQDGFPDIAVGAPFDGDGKVFIYHGSSLGVVAKPSQVLEGEAVGIKSFGYSLSGSLDMDGNQYPDLLVGSLADTAVLFRARPILHVSHEVSIAPRSIDLEQPNCAGGHSVCVDLRVCFSYIAVPSSYSPTVALDYVLDADTDRRLRGQVPRVTFLSRNLEEPKHQASGTVWLKHQHDRVCGDAMFQLQENVKDKLRAIVVTLSYSLQTPRLRRQAPGQGLPPVAPILNAHQPSTQRAEIHFLKQGCGEDKICQSNLQLVRARFCTRVSDTEFQPLPMDVDGTTALFALSGQPVIGLELMVTNLPSDPAQPQADGDDAHEAQLLVMLPDSLHYSGVRALDPAEKPLCLSNENASHVECELGNPMKRGAQVTFYLILSTSGISIETTELEVELLLATISEQELHPVSARARVFIELPLSIAGMAIPQQLFFSGVVRGERAMQSERDVGSKVKYEVTVSNQGQSLRTLGSAFLNIMWPHEIANGKWLLYPMQVELEGGQGPGQKGLCSPRPNILHLDVDSRDRRRRELEPPEQQEPGERQEPSMSWWPVSSAEKKKNITLDCARGTANCVVFSCPLYSFDRAAVLHVWGRLWNSTFLEEYSAVKSLEVIVRANITVKSSIKNLMLRDASTVIPVMVYLDPMAVVAEGVPWWVILLAVLAGLLVLALLVLLLWKMGFFKRAKHPEATVPQYHAVKIPREDRQQFKEEKTGTILRNNWGSPRREGPDAHPILAADGHPELGPDGHPGPGTA

SEQ ID NO: 6607 - protein, 1048 aa, Homo sapiens
MAFPPRRRLRLGPRGLPLLLSGLLLPLCRAFNLDVDSPAEYSGPEGSYFGFAVDFFVPSASSRMFLLVGAPKANTTQPGIVEGGQVLKCDWSSTRRCQPIEFDATGNRDYAKDDPLEFKSHQWFGASVRSKQDKILACAPLYHWRTEMKQEREPVGTCFLQDGTKTVEYAPCRSQDIDADGQGFCQGGFSIDFTKADRVLLGGPGSFYWQGQLISDQVAEIVSKYDPNVYSIKYNNQLATRTAQAIFDDSYLGYSVAVGDFNGDGIDDFVSGVPRAARTLGMVYIYDGKNMSSLYNFTGEQMAAYFGFSVAATDINGDDYADVFIGAPLFMDRGSDGKLQEVGQVSVSLQRASGDFQTTKLNGFEVFARFGSAIAPLGDLDQDGFNDIAIAAPYGGEDKKGIVYIFNGRSTGLNAVPSQILEGQWAARSMPPSFGYSMKGATDIDKNGYPDLIVGAFGVDRAILYRARPVITVNAGLEVYPSILNQDNKTCSLPGTALKVSCFNVRFCLKADGKGVLPRKLNFQVELLLDKLKQKGAIRRALFLYSRSPSHSKNMTISRGGLMQCEELIAYLRDESEFRDKLTPITIFMEYRLDYRTAADTTGLQPILNQFTPANISRQAHILLDCGEDNVCKPKLEVSVDSDQKKIYIGDDNPLTLIVKAQNQGEGAYEAELIVSIPLQADFIGVVRNNEALARLSCAFKTENQTRQVVCDLGNPMKAGTQLLAGLRFSVHQQSEMDTSVKFDLQIQSSNLFDKVSPVVSHKVDLAVLAAVEIRGVSSPDHVFLPIPNWEHKENPETEEDVGPVVQHIYELRNNGPSSFSKAMLHLQWPYKYNNNTLLYILHYDIDGPMNCTSDMEINPLRIKISSLQTTEKNDTVAGQGERDHLITKRDLALSEGDIHTLGCGVAQCLKIVCQVGRLDRGKSAILYVKSLLWTETFMNKENQNHSYSLKSSASFNVIEFPYKNLPIEDITNSTLVTTNVTWGIQPAPMPVPVWVIILAVLAGLLLLAVLVFVMYRMGFFKRVRPPQEEQEREQLQPHENGEGNSET

SEQ ID NO: 6608 - protein, 1012 aa, Homo sapiens
MAFPPRRRLRLGPRGLPLLLSGLLLPLCRAFNLDVDSPAEYSGPEGSYFGFAVDFFVPSASSRMFLLVGAPKANTTQPGIVEGGQVLKCDWSSTRRCQPIEFDATGNRDYAKDDPLEFKSHQWFGASVRSKQDKILACAPLYHWRTEMKQEREPVGTCFLQDGTKTVEYAPCRSRQLISDQVAEIVSKYDPNVYSIKYNNQLATRTAQAIFDDSYLGYSVAVGDFNGDGIDDFVSGVPRAARTLGMVYIYDGKNMSSLYNFTGEQMAAYFGFSVAATDINGDDYADVFIGAPLFMDRGSDGKLQEVGQVSVSLQRASGDFQTTKLNGFEVFARFGSAIAPLGDLDQDGFNDIAIAAPYGGEDKKGIVYIFNGRSTGLNAVPSQILEGQWAARSMPPSFGYSMKGATDIDKNGYPDLIVGAFGVDRAILYRARPVITVNAGLEVYPSILNQDNKTCSLPGTALKVSCFNVRFCLKADGKGVLPRKLNFQVELLLDKLKQKGAIRRALFLYSRSPSHSKNMTISRGGLMQCEELIAYLRDESEFRDKLTPITIFMEYRLDYRTAADTTGLQPILNQFTPANISRQAHILLDCGEDNVCKPKLEVSVDSDQKKIYIGDDNPLTLIVKAQNQGEGAYEAELIVSIPLQADFIGVVRNNEALARLSCAFKTENQTRQVVCDLGNPMKAGTQLLAGLRFSVHQQSEMDTSVKFDLQIQSSNLFDKVSPVVSHKVDLAVLAAVEIRGVSSPDHVFLPIPNWEHKENPETEEDVGPVVQHIYELRNNGPSSFSKAMLHLQWPYKYNNNTLLYILHYDIDGPMNCTSDMEINPLRIKISSLQTTEKNDTVAGQGERDHLITKRDLALSEGDIHTLGCGVAQCLKIVCQVGRLDRGKSAILYVKSLLWTETFMNKENQNHSYSLKSSASFNVIEFPYKNLPIEDITNSTLVTTNVTWGIQPAPMPVPVWVIILAVLAGLLLLAVLVFVMYRMGFFKRVRPPQEEQEREQLQPHENGEGNSET

SEQ ID NO: 6609 - protein, 1002 aa, Homo sapiens
MLLGTLLLILYILMLCRMFLLVGAPKANTTQPGIVEGGQVLKCDWSSTRRCQPIEFDATGNRDYAKDDPLEFKSHQWFGASVRSKQDKILACAPLYHWRTEMKQEREPVGTCFLQDGTKTVEYAPCRSQDIDADGQGFCQGGFSIDFTKADRVLLGGPGSFYWQGQLISDQVAEIVSKYDPNVYSIKYNNQLATRTAQAIFDDSYLGYSVAVGDFNGDGIDDFVSGVPRAARTLGMVYIYDGKNMSSLYNFTGEQMAAYFGFSVAATDINGDDYADVFIGAPLFMDRGSDGKLQEVGQVSVSLQRASGDFQTTKLNGFEVFARFGSAIAPLGDLDQDGFNDIAIAAPYGGEDKKGIVYIFNGRSTGLNAVPSQILEGQWAARSMPPSFGYSMKGATDIDKNGYPDLIVGAFGVDRAILYRARPVITVNAGLEVYPSILNQDNKTCSLPGTALKVSCFNVRFCLKADGKGVLPRKLNFQVELLLDKLKQKGAIRRALFLYSRSPSHSKNMTISRGGLMQCEELIAYLRDESEFRDKLTPITIFMEYRLDYRTAADTTGLQPILNQFTPANISRQAHILLDCGEDNVCKPKLEVSVDSDQKKIYIGDDNPLTLIVKAQNQGEGAYEAELIVSIPLQADFIGVVRNNEALARLSCAFKTENQTRQVVCDLGNPMKAGTQLLAGLRFSVHQQSEMDTSVKFDLQIQSSNLFDKVSPVVSHKVDLAVLAAVEIRGVSSPDHVFLPIPNWEHKENPETEEDVGPVVQHIYELRNNGPSSFSKAMLHLQWPYKYNNNTLLYILHYDIDGPMNCTSDMEINPLRIKISSLQTTEKNDTVAGQGERDHLITKRDLALSEGDIHTLGCGVAQCLKIVCQVGRLDRGKSAILYVKSLLWTETFMNKENQNHSYSLKSSASFNVIEFPYKNLPIEDITNSTLVTTNVTWGIQPAPMPVPVWVIILAVLAGLLLLAVLVFVMYRMGFFKRVRPPQEEQEREQLQPHENGEGNSET

SEQ ID NO: 6610 - protein, 482 aa, Homo sapiens
MAFPPRRRLRLGPRGLPLLLSGLLLPLCRAFNLDVDSPAEYSGPEGSYFGFAVDFFVPSASSRMFLLVGAPKANTTQPGIVEGGQVLKCDWSSTRRCQPIEFDATGNRDYAKDDPLEFKSHQWFGASVRSKQDKILACAPLYHWRTEMKQEREPVGTCFLQDGTKTVEYAPCRSQDIDADGQGFCQGGFSIDFTKADRVLLGGPGSFYWQGQLISDQVAEIVSKYDPNVYSIKYNNQLATRTAQAIFDDSYLGYSVAVGDFNGDGIDDFVSGVPRAARTLGMVYIYDGKNMSSLYNFTGEQMAAYFGFSVAATDINGDDYADVFIGAPLFMDRGSDGKLQEVGQVSVSLQRASGDFQTTKLNGFEVFARFGSAIAPLGDLDQDGFNDIAIAAPYGGEDKKGIVYIFNGRSTGLNAVPSQILEGQWAARSMPPSFGYSMKGATDIDKNGYPDLIVGAFGVDRAILYRARPVIPIFVQLHHVVH

SEQ ID NO: 6611 - protein, 798 aa, Homo sapiens
MNLQPIFWIGLISSVCCVFAQTDENRCLKANAKSCGECIQAGPNCGWCTNSTFLQEGMPTSARCDDLEALKKKGCPPDDIENPRGSKDIKKNKNVTNRSKGTAEKLKPEDITQIQPQQLVLRLRSGEPQTFTLKFKRAEDYPIDLYYLMDLSYSMKDDLENVKSLGTDLMNEMRRITSDFRIGFGSFVEKTVMPYISTTPAKLRNPCTSEQNCTSPFSYKNVLSLTNKGEVFNELVGKQRISGNLDSPEGGFDAIMQVAVCGSLIGWRNVTRLLVFSTDAGFHFAGDGKLGGIVLPNDGQCHLENNMYTMSHYYDYPSIAHLVQKLSENNIQTIFAVTEEFQPVYKELKNLIPKSAVGTLSANSSNVIQLIIDAYNSLSSEVILENGKLSEGVTISYKSYCKNGVNGTGENGRKCSNISIGDEVQFEISITSNKCPKKDSDSFKIRPLGFTEEVEVILQYICECECQSEGIPESPKCHEGNGTFECGACRCNEGRVGRHCECSTDEVNSEDMDAYCRKENSSEICSNNGECVCGQCVCRKRDNTNEIYSGKFCECDNFNCDRSNGLICGGNGVCKCRVCECNPNYTGSACDCSLDTSTCEASNGQICNGRGICECGVCKCTDPKFQGQTCEMCQTCLGVCAEHKECVQCRAFNKGEKKDTCTQECSYFNITKVESRDKLPQPVQPDPVSHCKEKDVDDCWFYFTYSVNGNNEVMVHVVENPECPTGPDIIPIVAGVVAGIVLIGLALLLIWKLLMIIHDRREFAKFEKEKMNAKWDTGENPIYKSAVTTVVNPKYEGK

SEQ ID NO: 6612 - protein, 825 aa, Homo sapiens
MNLQPIFWIGLISSVCCVFAQTDENRCLKANAKSCGECIQAGPNCGWCTNSTFLQEGMPTSARCDDLEALKKKGCPPDDIENPRGSKDIKKNKNVTNRSKGTAEKLKPEDITQIQPQQLVLRLRSGEPQTFTLKFKRAEDYPIDLYYLMDLSYSMKDDLENVKSLGTDLMNEMRRITSDFRIGFGSFVEKTVMPYISTTPAKLRNPCTSEQNCTSPFSYKNVLSLTNKGEVFNELVGKQRISGNLDSPEGGFDAIMQVAVCGSLIGWRNVTRLLVFSTDAGFHFAGDGKLGGIVLPNDGQCHLENNMYTMSHYYDYPSIAHLVQKLSENNIQTIFAVTEEFQPVYKELKNLIPKSAVGTLSANSSNVIQLIIDAYNSLSSEVILENGKLSEGVTISYKSYCKNGVNGTGENGRKCSNISIGDEVQFEISITSNKCPKKDSDSFKIRPLGFTEEVEVILQYICECECQSEGIPESPKCHEGNGTFECGACRCNEGRVGRHCECSTDEVNSEDMDAYCRKENSSEICSNNGECVCGQCVCRKRDNTNEIYSGKFCECDNFNCDRSNGLICGGNGVCKCRVCECNPNYTGSACDCSLDTSTCEASNGQICNGRGICECGVCKCTDPKFQGQTCEMCQTCLGVCAEHKECVQCRAFNKGEKKDTCTQECSYFNITKVESRDKLPQPVQPDPVSHCKEKDVDDCWFYFTYSVNGNNEVMVHVVENPECPTGPDIIPIVAGVVAGIVLIGLALLLIWKLLMIIHDRREFAKFEKEKMNAKWDTSLSVAQPGVQWCDISSLQPLTSRFQQFSCLSLPSTWDYRVKILFIRVP

SEQ ID NO: 6613 - protein, 798 aa, Homo sapiens; identical to SEQ ID NO: 6611

SEQ ID NO: 6614 - protein, 49 aa, Homo sapiens
MNLQPIFWIGLISSVCCVFAQTDENRCLKANAKSCGECIQAGPNCGWCT

SEQ ID NO: 6615 - protein, 89 aa, Homo sapiens
MNLQPIFWIGLISSVCCVFAQTDENRCLKANAKSCGECIQAGPNCGWCTNSTFLQEGMPTSARCDDLEALKKKGCPPDDIENPRGSKDI

SEQ ID NO: 6616 - protein, 801 aa, Homo sapiens
MNLQPIFWIGLISSVCCVFAQTDENRCLKANAKSCGECIQAGPNCGWCTNSTFLQEGMPTSARCDDLEALKKKGCPPDDIENPRGSKDIKKNKNVTNRSKGTAEKLKPEDITQIQPQQLVLRLRSGEPQTFTLKFKRAEDYPIDLYYLMDLSYSMKDDLENVKSLGTDLMNEMRRITSDFRIGFGSFVEKTVMPYISTTPAKLRNPCTSEQNCTSPFSYKNVLSLTNKGEVFNELVGKQRISGNLDSPEGGFDAIMQVAVCGSLIGWRNVTRLLVFSTDAGFHFAGDGKLGGIVLPNDGQCHLENNMYTMSHYYDYPSIAHLVQKLSENNIQTIFAVTEEFQPVYKELKNLIPKSAVGTLSANSSNVIQLIIDAYNSLSSEVILENGKLSEGVTISYKSYCKNGVNGTGENGRKCSNISIGDEVQFEISITSNKCPKKDSDSFKIRPLGFTEEVEVILQYICECECQSEGIPESPKCHEGNGTFECGACRCNEGRVGRHCECSTDEVNSEDMDAYCRKENSSEICSNNGECVCGQCVCRKRDNTNEIYSGKFCECDNFNCDRSNGLICGGNGVCKCRVCECNPNYTGSACDCSLDTSTCEASNGQICNGRGICECGVCKCTDPKFQGQTCEMCQTCLGVCAEHKECVQCRAFNKGEKKDTCTQECSYFNITKVESRDKLPQPVQPDPVSHCKEKDVDDCWFYFTYSVNGNNEVMVHVVENPECPTGPDIIPIVAGVVAGIVLIGLALLLIWKLLMIIHDRREFAKFEKEKMNAKWDTQENPIYKSPINNFKNPNYGRKAGL

SEQ ID NO: 6617 - protein, 136 aa, Homo sapiens
MNLQPIFWIGLISSVCCVFAQTDENRCLKANAKSCGECIQAGPNCGWCTNSTFLQEGMPTSARCDDLEALKKKGCPPDDIENPRGSKDIKKNKNVTNRSKGTAEKLKPEDITQIQPQQLVLRLRSGEPQTFTLKFK

SEQ ID NO: 6618 - protein, 125 aa, Homo sapiens
MNLQPIFWIGLISSVCCVFAQTDENRCLKANAKSCGECIQAGPNCGWCTNSTFLQEGMPTSARCDDLEALKKKGCPPDDIENPRGSKDIKKNKNVTNRSKGTAEKLKPEDITQIQPQQLVLRLRS

SEQ ID NO: 6619 - protein, 163 aa, Homo sapiens
MNLQPIFWIGLISSVCCVFAQTDENRCLKANAKSCGECIQAGPNCGWCTNSTFLQEGMPTSARCDDLEALKKKGCPPDDIENPRGSKDIKKNKNVTNRSKGTAEKLKPEDITQIQPQQLVLRLRSGEPQTFTLKFKRAEDYPIDLYYLMDLSYSMKDDLENVK

SEQ ID NO: 6620 - protein, 152 aa, Homo sapiens
MNLQPIFWIGLISSVCCVFAQTDENRCLKANAKSCGECIQAGPNCGWCTNSVSKTFLQEGMPTSARCDDLEALKKKGCPPDDIENPRGSKDIKKNKNVTNRSKGTAEKLKPEDITQIQPQQLVLRLRSGEPQTFTLKFKRAEDYPIDLYYLM

SEQ ID NO: 6621 - protein, 104 aa, Homo sapiens
MNLQPIFWIGLISSVCCVFAQTDENRCLKANAKSCGECIQAGPNCGWCTNSTFLQEGMPTSARCDDLEALKKKGCPPDDIENPRGSKDIKKNKNVTNRSKGTAE

SEQ ID NO: 6622 - protein, 143 aa, Homo sapiens
MNLQPIFWIGLISSVCCVFAQTDENRCLKANAKSCGECIQAGPNCGWCTNSTFLQEGMPTSARCDDLEALKKKGCPPDDIENPRGSKDIKKNKNVTNRSKGTAEKLKPEDITQIQPQQLVLRLRSGEPQTFTLKFKRAEDYPI

SEQ ID NO: 6623 - protein, 769 aa, Homo sapiens
MLGLRPPLLALVGLLSLGCVLSQECTKFKVSSCRECIESGPGCTWCQKLNFTGPGDPDSIRCDTRPQLLMRGCAADDIMDPTSLAETQEDHNGGQKQLSPQKVTLYLRPGQAAAFNVTFRRAKGYPIDLYYLMDLSYSMLDDLRNVKKLGGDLLRALNEITESGRIGFGSFVDKTVLPFVNTHPDKLRNPCPNKEKECQPPFAFRHVLKLTNNSNQFQTEVGKQLISGNLDAPEGGLDAMMQVAACPEEIGWRNVTRLLVFATDDGFHFAGDGKLGAILTPNDGRCHLEDNLYKRSNEFDYPSVGQLAHKLAENNIQPIFAVTSRMVKTYEKLTEIIPKSAVGELSEDSSNVVQLIKNAYNKLSSRVFLDHNALPDTLKVTYDSFCSNGVTHRNQPRGDCDGVQINVPITFQVKVTATECIQEQSFVIRALGFTDIVTVQVLPQCECRCRDQSRDRSLCHGKGFLECGICRCDTGYIGKNCECQTQGRSSQELEGSCRKDNNSIICSGLGDCVCGQCLCHTSDVPGKLIYGQYCECDTINCERYNGQVCGGPGRGLCFCGKCRCHPGFEGSACQCERTTEGCLNPRRVECSGRGRCRCNVCECHSGYQLPLCQECPGCPSPCGKYISCAECLKFEKGPFGKNCSAACPGLQLSNNPVKGRTCKERDSEGCWVAYTLEQQDGMDRYLIYVDESRECVAGPNIAAIVGGTVAGIVLIGILLLVIWKALIHLSDLREYRRFEKEKLKSQWNNDNPLFKSATTTVMNPKFAES

SEQ ID NO: 6624 - protein, 322 aa, Homo sapiens
GRLGKDLATGVLSQECTKFKVSSCRECIESGPGCTWCQKLNFTGPGDPDSIRCDTRPQLLMRGCAADDIMDPTSLAETQEDHNGGQKQLSPQKVTLYLRPGQAAAFNVTFRRAKGYPIDLYYLMDLSYSMLDDLRNVKKLGGDLLRALNEITESGRIGFGSFVDKTVLPFVNTHPDKLRNPCPNKEKECQPPFAFRHVLKLTNNSNQFQTEVGKQLISGNLDAPEGGLDAMMQVAACPEEIGWRNVTRLLVFATDDGFHFAGDGKLGAILTPNDGRCHLEDNLYKRSNEFDYPSVGQLAHKLAENNIQPIFAVTSRMVKTYE

SEQ ID NO: 6625 - protein, 769 aa, Homo sapiens; identical to SEQ ID NO: 6623

SEQ ID NO: 6626 - protein, 769 aa, Homo sapiens; identical to SEQ ID NO: 6623

SEQ ID NO: 6627 - protein, 769 aa, Homo sapiens; identical to SEQ ID NO: 6623

SEQ ID NO: 6628 - protein, 769 aa, Homo sapiens; identical to SEQ ID NO: 6623

SEQ ID NO: 6629 - protein, 120 aa, Homo sapiens
MLGLRPPLLALVGLLSLGCVLSQECTKFKVSSCRECIESGPGCTWCQKLNFTGPGDPDSIRCDTRPQLLMRGCAADDIMDPTSLAETQEDHNGGQKQLSPQKVTLYLRPGQAAAFNVTFR

SEQ ID NO: 6630 - protein, 70 aa, Homo sapiens
MLGLRPPLLALVGLLSLGCVLSQECTKFKVSSCRECIESGPGCTWCQKLNFTGPGDPDSIRCDTRPQLLM

SEQ ID NO: 6631 - protein, 49 aa, Homo sapiens
MLGLRPPLLALVGLLSLGCVLSQECTKFKVSSCRECIESGPGCTWCQKL

SEQ ID NO: 6632 - protein, 160 aa, Homo sapiens
MLGLRPPLLALVGLLSLGCVLSQECTKFKVSSCRECIESGPGCTWCQKLNFTGPGDPDSIRCDTRPQLLMRGCAADDIMDPTSLAETQEDHNGGQKQLSPQKVTLYLRPGQAAAFNVTFRRAKGYPIDLYYLMDLSYSMLDDLRNVKKLGGDLLRALNEI

SEQ ID NO: 6633 - protein, 166 aa, Homo sapiens
MLGLRPPLLALVGLLSLGCVLSQECTKFKVSSCRECIESGPGCTWCQKLNFTGPGDPDSIRCDTRPQLLMRGCAADDIMDPTSLAETQEDHNGGQKQLSPQKVTLYLRPGQAAAFNVTFRRAKGYPIDLYYLMDLSYSMLDDLRNVKKLGGDLLRALNEITESGRI

SEQ ID NO: 6634 - protein, 378 aa, Homo sapiens
MLGLRPPLLALVGLLSLGCVLSQECTKFKVSSCRECIESGPGCTWCQKLNFTGPGDPDSIRCDTRPQLLMRGCAADDIMDPTSLAETQEDHNGGQKQLSPQKVTLYLRPGFGSFVDKTVLPFVNTHPDKLRNPCPNKEKECQPPFAFRHVLKLTNNSNQFQTEVGKQLISGNLDAPEGGLDAMMQVAACPEEIGWRNVTRLLVFATDDGFHFAGDGKLGAILTPNDGRCHLEDNLYKRSNEFDYPSVGQLAHKLAENNIQPIFAVTSRMVKTYEKLTEIIPKSAVGELSEDSSNVVQLIKNAYNKLSSRVFLDHNALPDTLKVTYDSFCSNGVTHRNQPRGDCDGVQINVPITFQVKVTATECIQEQSFVIGRWASRT

SEQ ID NO: 6635 - protein, 788 aa, Homo sapiens
MRARPRPRPLWATVLALGALAGVGVGGPNICTTRGVSSCQQCLAVSPMCAWCSDEALPLGSPRCDLKENLLKDNCAPESIEFPVSEARVLEDRPLSDKGSGDSSQVTQVSPQRIALRLRPDDSKNFSIQVRQVEDYPVDIYYLMDLSYSMKDDLWSIQNLGTKLATQMRKLTSNLRIGFGAFVDKPVSPYMYISPPEALENPCYDMKTTCLPMFGYKHVLTLTDQVTRFNEEVKKQSVSRNRDAPEGGFDAIMQATVCDEKIGWRNDASHLLVFTTDAKTHIALDGRLAGIVQPNDGQCHVGSDNHYSASTTMDYPSLGLMTEKLSQKNINLIFAVTENVVNLYQNYSELIPGTTVGVLSMDSSNVLQLIVDAYGKIRSKVELEVRDLPEELSLSFNATCLNNEVIPGLKSCMGLKIGDTVSFSIEAKVRGCPQEKEKSFTIKPVGFKDSLIVQVTFDCDCACQAQAEPNSHRCNNGNGTFECGVCRCGPGWLGSQCECSEEDYRPSQQDECSPREGQPVCSQRGECLCGQCVCHSSDFGKITGKYCECDDFSCVRYKGEMCSGHGQCSCGDCLCDSDWTGYYCNCTTRTDTCMSSNGLLCSGRGKCECGSCVCIQPGSYGDTCEKCPTCPDACTFKKECVECKKFDRGALHDENTCNRYCRDEIESVKELKDTGKDAVNCTYKNEDDCVVRFQYYEDSSGKSILYVVEEPECPKGPDILVVLLSVMGAILLIGLAALLIWKLLITIHDRKEFAKFEEERARAKWDTANNPLYKEATSTFTNITYRGT

SEQ ID NO: 6636 - protein, 751 aa, Homo sapiens
MCAWCSDEALPLGSPRCDLKENLLKDNCAPESIEFPVSEARVLEDRPLSDKGSGDSSQVTQVSPQRIALRLRPDDSKNFSIQVRQVEDYPVDIYYLMDLSYSMKDDLWSIQNLGTKLATQMRKLTSNLRIGFGAFVDKPVSPYMYISPPEALENPCYDMKTTCLPMFGYKHVLTLTDQVTRFNEEVKKQSVSRNRDAPEGGFDAIMQATVCDEKIGWRNDASHLLVFTTDAKTHIALDGRLAGIVQPNDGQCHVGSDNHYSASTTMDYPSLGLMTEKLSQKNINLIFAVTENVVNLYQNYSELIPGTTVGVLSMDSSNVLQLIVDAYGKIRSKVELEVRDLPEELSLSFNATCLNNEVIPGLKSCMGLKIGDTVSFSIEAKVRGCPQEKEKSFTIKPVGFKDSLIVQVTFDCDCACQAQAEPNSHRCNNGNGTFECGVCRCGPGWLGSQCECSEEDYRPSQQDECSPREGQPVCSQRGECLCGQCVCHSSDFGKITGKYCECDDFSCVRYKGEMCSGHGQCSCGDCLCDSDWTGYYCNCTTRTDTCMSSNGLLCSGRGKCECGSCVCIQPGSYGDTCEKCPTCPDACTFKKECVECKKFDRGALHDENTCNRYCRDEIESVKELKDTGKDAVNCTYKNEDDCVVRFQYYEDSSGKSILYVVEEPECPKGPDILVVLLSVMGAILLIGLAALLIWKLLITIHDRKEFAKFEEERARAKWDTEILLYYCSFILVHQSLESLRTEFTSKQKDGN

SEQ ID NO: 6637 - protein, 788 aa, Homo sapiens; identical to SEQ ID NO: 6635

SEQ ID NO: 6638 - protein, 452 aa, Homo sapiens
MDDIFTQCREGNAVAVRLWLDNTENDLNQGDDHGFSPLHWACREGRSAVVEMLIMRGARINVMNRGDDTPLHLAASHGHRDIVQKLLQYKADINAVNEHGNVPLHYACFWGQDQVAEDLVANGALVSICNKYGEMPVDKAKAPLRELLRERAEKMGQNLNRIPYKDTFWKGTTRTRPRNGTLNKHSGIDFKQLNFLTKLNENHSGELWKGRWQGNDIVVKVLKVRDWSTRKSRDFNEECPRLRIFSHPNVLPVLGACQSPPAPHPTLITHWMPYGSLYNVLHEGTNFVVDQSQAVKFALDMARGMAFLHTLEPLIPRHALNSRSVMIDEDMTARISMADVKFSFQCPGRMYAPAWVAPEALQKKPEDTNRRSADMWSFAVLLWELVTREVPFADLSNMEIGMKVALEGLRPTIPPGISPHVCKLMKICMNEDPAKRPKFDMIVPILEKMQDK

SEQ ID NO: 6639 - protein, 452 aa, Homo sapiens; identical to SEQ ID NO: 6638

SEQ ID NO: 6640 - protein, 452 aa, Homo sapiens; identical to SEQ ID NO: 6638

SEQ ID NO: 6641 - protein, 318 aa, Homo sapiens
MPVDKAKAPLRELLRERAEKMGQNLNRIPYKDTFWKGTTRTRPRNGTLNKHSGIDFKQLNFLTKLNENHSGELWKGRWQGNDIVVKVLKVRDWSTRKSRDFNEECPRLRIFSHPNVLPVLGACQSPPAPHPTLITHWMPYGSLYNVLHEGTNFVVDQSQAVKFALDMARGMAFLHTLEPLIPRHALNSRSVMIDEDMTARISMADVKFSFQCPGRMYAPAWVAPEALQKKPEDTNRRSADMWSFAVLLWELVTREVPFADLSNMEIGMKVALEGLRPTIPPGISPHVCKLMKICMNEDPAKRPKFDMIVPILEKMQDK

SEQ ID NO: 6642 - protein, 325 aa, Homo sapiens
MPITRMRMRPWLEMQINSNQIPGLIWINKEEMIFQIPWKHAAKHGWDINKDACLFRSWAIHTGRYKAGEKEPDPKTWKANFRCAMNSLPDIEEVKDQSRNKGSSAVRVYRMLPPLTKNQRKERKSKSSRDAKSKAKRKSCGDSSPDTFSDGLSSSTLPDDHSSYTVPGYMQDLEVEQALTPALSPCAVSSTLPDWHIPVEVVPDSTSDLYNFQVSPMPSTSEATTDEDEEGKLPEDIMKLLEQSEWQPTNVDGKGYLLNEPGVQPTSVYGDFSCKEEPEIDSPGGDIGLSLQRVFTDLKNMDATWLDSLLTPVRLPSIQAIPCAP

SEQ ID NO: 6643 - protein, 325 aa, Homo sapiens; identical to SEQ ID NO: 6642

SEQ ID NO: 6644 - protein, 192 aa, Homo sapiens
MPITRMRMRPWLEMQINSNQIPGLIWINKEEMIFQIPWKHAAKHGWDINKDACLFRSWAIHTGRYKAGEKEPDPKTWKANFRCAMNSLPDIEEVKDQSRNKGSSAVRVYRMLPPLTKNQRKERKSKSSRDAKSKAKRKSCGDSSPDTFSDGLSSSTLPDDHSSYTVPGYMQDLEVEQALTPALSPCAVSSTL

SEQ ID NO: 6645 - protein, 451 aa, Homo sapiens
MNLEGGGRGGEFGMSAVSCGNGKLRQWLIDQIDSGKYPGLVWENEEKSIFRIPWKHAGKQDYNREEDAALFKAWALFKGKFREGIDKPDPPTWKTRLRCALNKSNDFEELVERSQLDISDPYKVYRIVPEGAKKGAKQLTLEDPQMSMSHPYTMTTPYPSLPAQQVHNYMMPPLDRSWRDYVPDQPHPEIPYQCPMTFGPRGHHWQGPACENGCQVTGTFYACAPPESQAPGVPTEPSIRSAEALAFSDCRLHICLYYREILVKELTTSSPEGCRISHGHTYDASNLDQVLFPYPEDNGQRKNIEKLLSHLERGVVLWMAPDGLYAKRLCQSRIYWDGPLALCNDRPNKLERDQTCKLFDTQQFLSELQAFAHHGRSLPRFQVTLCFGEEFPDPQRQRKLITAHVEPLLARQLYYFAQQNSGHFLRGYDLPEHISNPEDYHRSIRHSSIQE

SEQ ID NO: 6646 - protein, 480 aa, Homo sapiens
LGPTAALSSESRARAAQAGGGPRARARTRGMNLEGGGRGGEFGMSAVSCGNGKLRQWLIDQIDSGKYPGLVWENEEKSIFRIPWKHAGKQDYNREEDAALFKAWALFKGKFREGIDKPDPPTWKTRLRCALNKSNDFEELVERSQLDISDPYKVYRIVPEGAKKGAKQLTLEDPQMSMSHPYTMTTPYPSLPAQVHNYMMPPLDRSWRDYVPDQPHPEIPYQCPMTFGPRGHHWQGPACENGCQVTGTFYACAPPESQAPGVPTEPSIRSAEALAFSDCRLHICLYYREILVKELTTSSPEGCRISHGHTYDASNLDQVLFPYPEDNGQRKNIEKLLSHLERGVVLWMAPDGLYAKRLCQSRIYWDGPLALCNDRPNKLERDQTCKLFDTQQFLSELQAFAHHGRSLPRFQVTLCFGEEFPDPQRQRKLITAHVEPLLARQLYYFAQQNSGHFLRGYDLPEHISNPEDYHRSIRHSSIQE

SEQ ID NO: 6647 - protein, 498 aa, Homo sapiens
MNQSIPVAPTPPRRVRLKPWLVAQVNSCQYPGLQWVNGEKKLFCIPWRHATRHGPSQDGDNTIFKAWAKETGKYTEGVDEADPAKWKANLRCALNKSRDFRLIYDGPRDMPPQPYKIYEVCSNGPAPTDSQPPEDYSFGAGEEEEEEEELQRMLPSLSLTEDVKWPPTLQPPTLRPPTLQPPTLQPPVVLGPPAPDPSPLAPPPGNPAGFRELLSEVLEPGPLPASLPPAGEQLLPDLLISPHMLPLTDLEIKFQYRGRPPRALTISNPHGCRLFYSQLEATQEQVELFGPISLEQVRFPSPEDIPSDKQRFYTNQLLDVLDRGLILQLQGQDLYAIRLCQCKVFWSGPCASAHDSCPNPIQREVKTKLFSLEHFLNELILFQKGQTNTPPPFEIFFCFGEEWPDRKPREKKLITVQVVPVAARLLLEMFSGELSWSADSIRLQISNPDLKDRMVEQFKELHHIWQSQQRLQPVAQAPPGAGLGVGQGPWPMHPAGMQ

SEQ ID NO: 6648 - protein, 514 aa, Homo sapiens
MNQSIPVAPTPPRRVRLKPWLVAQVNSCQYPGLQWVNGEKKLFCIPWRHATRHGPSQDGDNTIFKAWAKETGKYTEGVDEADPAKWKANLRCALNKSRDFRLIYDGPRDMPPQPYKIYEVCSNGPAPTDSQPPEDYSFGAGEEEEEEEELQRMLPSLSLTDAVQSGPHMTPYSLLKEDVKWPPTLQPPTLRPPTLQPPTLQPPVVLGPPAPDPSPLAPPPGNPAGFRELLSEVLEPGPLPASLPPAGEQLLPDLLISPHMLPLTDLEIKFQYRGRPPRALTISNPHGCRLFYSQLEATQEQVELFGPISLEQVRFPSPEDIPSDKQRFYTNQLLDVLDRGLILQLQGQDLYAIRLCQCKVFWSGPCASAHDSCPNPIQREVKTKLFSLEHFLNELILFQKGQTNTPPPFEIFFCFGEEWPDRKPREKKLITVQVVPVAARLLLEMFSGELSWSADSIRLQISNPDLKDRMVEQFKELHHIWQSQQRLQPVAQAPPGAGLGVGQGPWPMHPAGMQ

SEQ ID NO: 6649 - protein, 498 aa, Homo sapiens; identical to SEQ ID NO: 6647

SEQ ID NO: 6650 - protein, 488 aa, Homo sapiens
MNQSIPVAPTPPRRVRLKPWLVAQVNSCQYPGLQWVNGEKKLFCIPWRHATRHGPSQDGDNTIFKAWAKETGKYTEGVDEADPAKWKANLRCALNKSRDFRLIYDGPRDMPPQPYKIYEVCSNGPAPTDSQPPEDYSFGAGEEEEEEEELQRMLPSLSLTEDVKWPPTLQPPTLQPPVVLGPPAPDPSPLAPPPGNPAGFRELLSEVLEPGPLPASLPPAGEQLLPDLLISPHMLPLTDLEIKFQYRGRPPRALTISNPHGCRLFYSQLEATQEQVELFGPISLEQVRFPSPEDIPSDKQRFYTNQLLDVLDRGLILQLQGQDLYAIRLCQCKVFWSGPCASAHDSCPNPIQREVKTKLFSLEHFLNELILFQKGQTNTPPPFEIFFCFGEEWPDRKPREKKLITVQVVPVAARLLLEMFSGELSWSADSIRLQISNPDLKDRMVEQFKELHHIWQSQQRLQPVAQAPPGAGLGVGQGPWPMHPAGMQ

SEQ ID NO: 6651 - protein, 227 aa, Homo sapiens [sequence omitted]

SEQ ID NO: 6652 - protein, 157 aa, Homo sapiens
MNQSIPVAPTPPRRVRLKPWLVAQVNSCQYPGLQWVNGEKKLFCIPWRHATRHGPSQDGDNTIFKAWAKETGKYTEGVDEADPAKWKANLRCALNKSRDFRLIYDGPRDMPPQPYKIYEVCSNGPAPTDSQPPEDYSFGAGEEEEEEEEMQCSLAPT

SEQ ID NO: 6653 - protein, 106 aa, Homo sapiens
MNQSIPVAPTPPRRVRLKPWLVAQVNSCQYPGLQWVNGEKKLFCIPWRHATRHGPSQDGDNTIFKAWAKETGKYTEGVDEADPAKWKANLRCALNKSRDFRLIYDG

SEQ ID NO: 6654 - protein, 59 aa, Homo sapiens
MNQSIPVAPTPPRRVRLKPWLVAQVNSCQYPGLQWVNGEKKLFCIPWRHATRHGPSQDG

SEQ ID NO: 6655 - protein, 498 aa, Homo sapiens; identical to SEQ ID NO: 6647

SEQ ID NO: 6656 - protein, 141 aa, Homo sapiens
MNQSIPVAPTPPRRVRLKPWLVAQVNSCQYPGLQWVNGEKKLFCIPWRHATRHGPSQDGDNTIFKAWAKETGKYTEGVDEADPAKWKANLRCALNKSRDFRLIYDGPRDMPPQPYKIYEVCSNGPAPTDSQPPEDYSFGAG

SEQ ID NO: 6657 - protein, 152 aa, Homo sapiens
MNQSIPVAPTPPRRVRLKPWLVAQVNSCQYPGLQWVNGEKKLFCIPWRHATRHGPSQDGDNTIFKAWAKETGKYTEGVDEADPAKWKANLRCALNKSRDFRLIYDGPRDMPPQPYKIYEVCSNGPAPTDSQPPEDYSFGAGEEEEEEEEVSV

SEQ ID NO: 6658 - protein, 412 aa, Homo sapiens
MNQSIPVAPTPPRRVRLKPWLVAQVNSCQYPGLQWVNGEKKLFCIPWRHATRHGPSQDGDNTIFKAWAKETGKYTEGVDEADPAKWKANLRCALNKSRDFRLIYDGPRDMPPQPYKIYEVCSNGPAPTDSQPPEDYSFGAGEEEEEEEELQRMLPSLSLTVTDLEIKFQYRGRPPRALTISNPHGCRLFYSQLEATQEQVELFGPISLEQVRFPSPEDIPSDKQRFYTNQLLDVLDRGLILQLQGQDLYAIRLCQCKVFWSGPCASAHDSCPNPIQREVKTKLFSLEHFLNELILFQKGQTNTPPPFEIFFCFGEEWPDRKPREKKLITVQVVPVAARLLLEMFSGELSWSADSIRLQISNPDLKDRMVEQFKELHHIWQSQQRLQPVAQAPPGAGLGVGQGPWPMHPAGMQ

SEQ ID NO: 6659 - protein, 189 aa, Homo sapiens
MASPFALLMVLVVLSCKSSCSLGCDLPETHSLDNRRTLMLLAQMSRISPSSCLMDRHDFGFPQEEFDGNQFQKAPAISVLHELIQQIFNLFTTKDSSAAWDEDLLDKFCTELYQQLNDLEACVMQEERVGETPLMNADSILAVKKYFRRITLYLTEKKYSPCAWEVVRAEIMRSLSLSTNLQERLRRKE

SEQ ID NO: 6660 - protein, 166 aa, Homo sapiens
MKYTSYILAFQLCIVLGSLGCYCQDPYVKEAENLKKYFNAGHSDVADNGTLFLGILKNWKEESDRKIMQSQIVSFYFKLFKNFKDDQSIQKSVETIKEDMNVKFFNSNKKKRDDFEKLTNYSVTDLNVQRKAIHELIQVMAELSPAAKTGKRKRSQMLFRGRRASQ

SEQ ID NO: 6661 - protein, 180 aa, Homo sapiens
MALADLYEEGGGGGGEGEDNADSKETICRPSGRKSSKMQAFRIWDVNQKTFYLRNNQLVAGYLQGPNVNLEEKIDVVPIEPHALFLGIHGGKMCLSCVKSGDETRLQLEAVNITDLSENRKQDKRFAFIRSDSGPTTSFESAACPGWFLCTAMEADQPVSLTNMPDEGVMVTKFYFQEDE

SEQ ID NO: 6662 - protein, 159 aa, Homo sapiens
MALETICRPSGRKSSKMQAFRIWDVNQKTFYLRNNQLVAGYLQGPNVNLEEKIDVVPIEPHALFLGIHGGKMCLSCVKSGDETRLQLEAVNITDLSENRKQDKRFAFIRSDSGPTTSFESAACPGWFLCTAMEADQPVSLTNMPDEGVMVTKFYFQEDE

SEQ ID NO: 6663 - protein, 177 aa, Homo sapiens
MEICRGLRSHLITLLLFLFHSETICRPSGRKSSKMQAFRIWDVNQKTFYLRNNQLVAGYLQGPNVNLEEKIDVVPIEPHALFLGIHGGKMCLSCVKSGDETRLQLEAVNITDLSENRKQDKRFAFIRSDSGPTTSFESAACPGWFLCTAMEADQPVSLTNMPDEGVMVTKFYFQEDE

SEQ ID NO: 6664 - protein, 143 aa, Homo sapiens
MQAFRIWDVNQKTFYLRNNQLVAGYLQGPNVNLEEKIDVVPIEPHALFLGIHGGKMCLSCVKSGDETRLQLEAVNITDLSENRKQDKRFAFIRSDSGPTTSFESAACPGWFLCTAMEADQPVSLTNMPDEGVMVTKFYFQEDE

SEQ ID NO: 6665 - protein, 569 aa, Homo sapiens
MKVLLRLICFIALLISSLEADKCKEREEKIILVSSANEIDVRPCPLNPNEHKGTITWYKDDSKTPVSTEQASRIHQHKEKLWFVPAKVEDSGHYYCVVRNSSYCLRIKISAKFVENEPNLCYNAQAIFKQKLPVAGDGGLVCPYMEFFKNENNELPKLQWYKDCKPLLLDNIHFSGVKDRLIVMNVAEKHRGNYTCHASYTYLGKQYPITRVIEFITLEENKPTRPVIVSPANETMEVDLGSQIQLICNVTGQLSDIAYWKWNGSVIDEDDPVLGEDYYSVENPANKRRSTLITVLNISEIESRFYKHPFTCFAKNTHGIDAAYIQLIYPVTNFQKHMIGICVTLTVIIVCSVFIYKIFKIDIVLWYRDSCYDFLPIKASDGKTYDAYILYPKTVGEGSTSDCDIFVFKVLPEVLEKQCGYKLFIYGRDDYVGEDIVEVINENVKKSRRLIIILVRETSGFSWLGGSSEEQIAMYNALVQDGIKVVLLELEKIQDYEKMPESIKFIKQKHGAIRWSGDFTQGPQSAKTRFWKNVRYHMPVQRRSPSSKHQLLSPATKEKLQREAHVPLG

SEQ ID NO: 6666 - protein, 569 aa, Homo sapiens; identical to SEQ ID NO: 6665

SEQ ID NO: 6667 - protein, 182 aa, Homo sapiens
MKVLLRLICFIALLISSLEADKCKEREEKIILVSSANEIDVRPCPLNPNEHKGTITWYKDDSKTPVSTEQASRIHQHKEKLWFVPAKVEDSGHYYCVVRNSSYCLRIKISAKFVENEPNLCYNAQAIFKQKLPVAGDGGLVCPYMEFFKNENNELPKLQWYKDCKPLLLDNIHFSGVKDRLI

SEQ ID NO: 6668 - protein, 114 aa, Homo sapiens
MKVLLRLICFIALLISSLEADKCKEREEKIILVSSANEIDVRPCPLNPNEHKGTITWYKDDSKTPVSTEQASRIHQHKEKLWFVPAKVEDSGHYYCVVRNSSYCLRIKISAKFV

SEQ ID NO: 6669 - protein, 106 aa, Homo sapiens
MKVLLRLICFIALLISSLEADKCKEREEKIILVSSANEIDVRPCPLNPNEHKGTITWYKDDSKTPVSTEQASRIHQHKEKLWFVPAKVEDSGHYYCVVRNSSYCLR

SEQ ID NO: 6670 - protein, 80 aa, Homo sapiens
MKVLLRLICFIALLISSLEADKCKEREEKIILVSSANEIDVRPCPLNPNEHKGTITWYKDDSKTPVSTEQASRIHQHKEK

SEQ ID NO: 6671 - protein, 269 aa, Homo sapiens
MAEVPELASEMMAYYSGNEDDLFFEADGPKQMKCSFQDLDLCPLDGGIQLRISDHHYSKGFRQAASVVVAMDKLRKMLVPCPQTFQENDLSTFFPFIFEEEPIFFDTWDNEAYVHDAPVRSLNCTLRDSQQKSLVMSGPYELKALHLQGQDMEQQVVFSMSFVQGEESNDKIPVALGLKEKNLYLSCVLKDDKPTLQLESVDPKNYPKKKMEKRFVFNKIEINNKLEFESAQFPNWYISTSQAENMPVFLGGTKGGQDITDFTMQFVSS

SEQ ID NO: 6672 - protein, 111 aa, Homo sapiens
MAEVPELASEMMAYYSGNEDDLFFEADGPKQMKCSFQDLDLCPLDGGIQLRISDHHYSKGFRQAASVVVAMDKLRKMLVPCPQTFQENDLSTFFPFIFEEEPIFFDTWDNE

SEQ ID NO: 6673 - protein, 143 aa, Homo sapiens
MAEVPELASEMMAYYSGNEDDLFFEADGPKQMKCSFQDLDLCPLDGGIQLRISDHHYSKGFRQAASVVVAMDKLRKMLVPCPQTFQENDLSTFFPFIFEEEPIFFDTWDNEAYVHDAPVRSLNCTLRDSQQKSLVMSGPYELK

SEQ ID NO: 6674 - protein, 125 aa, Homo sapiens
MAEVPELASEMMAYYSGNEDDLFFEADGPKQMKCSFQDLDLCPLDGGIQLRISDHHYSKGFRQAASVVVAMDKLRKMLVPCPQTFQENDLSTFFPFIFEEEPIFFDTWDNEAYVHDAPVRSLNCT

SEQ ID NO: 6675 - protein, 253 aa, Homo sapiens
MWPPGSASQPPPSPAAATGLHPAARPVSLQCRLSMCPARSLLLVATLVLLDHLSLARNLPVATPDPGMFPCLHHSQNLLRAVSNMLQKARQTLEFYPCTSEEIDHEDITKDKTSTVEACLPLELTKNESCLNSRETSFITNGSCLASRKTSFMMALCLSSIYEDLKMYQVEFKTMNAKLLMDPKRQIFLDQNMLAVIDELMQALNFNSETVPQKSSLEEPDFYKTKIKLCILLHAFRIRAVTIDRVMSYLNAS

SEQ ID NO: 6676 - protein, 239 aa, Homo sapiens
MWPPGSASQPPPSPAAATGLHPAARPVSLQCRLSMCPARSLLLVATLVLLDHLSLARNLPVATPDPGMFPCLHHSQNLLRAVSNMLQKARQTLEFYPCTSEEIDHEDITKDKTSTVEACLPLELTKNGSCLASRKTSFMMALCLSSIYEDLKMYQVEFKTMNAKLLMDPKRQIFLDQNMLAVIDELMQALNFNSETVPQKSSLEEPDFYKTKIKLCILLHAFRIRAVTIDRVMSYLNAS

SEQ ID NO: 6677 - protein, 215 aa, Homo sapiens
MWPPGSASQPPPSPAAATGLHPAARPVSLQCRLSMCPARSLLLVATLVLLDHLSLARNLPVATPDPGMFPCLHHSQNLLRAVSNMLQKNESCLNSRETSFITNGSCLASRKTSFMMALCLSSIYEDLKMYQVEFKTMNAKLLMDPKRQIFLDQNMLAVIDELMQALNFNSETVPQKSSLEEPDFYKTKIKLCILLHAFRIRAVTIDRVMSYLNAS

SEQ ID NO: 6678 - protein, 162 aa, Homo sapiens
MRISKPHLRSISIQCYLCLLLNSHFLTEAGIHVFILGCFSAGLPKTEANWVNVISDLKKIEDLIQSMHIDATLYTESDVHPSCKVTAMKCFLLELQVISLESGDASIHDTVENLIILANNSLSSNGNVTESGCKECEELEEKNIKEFLQSFVHIVQMFINTS

SEQ ID NO: 6679 - protein, 162 aa, Homo sapiens; identical to SEQ ID NO: 6678

SEQ ID NO: 6680 - protein, 135 aa, Homo sapiens
MVLGTIDLCSCFSAGLPKTEANWVNVISDLKKIEDLIQSMHIDATLYTESDVHPSCKVTAMKCFLLELQVISLESGDASIHDTVENLIILANNSLSSNGNVTESGCKECEELEEKNIKEFLQSFVHIVQMFINTS

SEQ ID NO: 6681 - protein, 135 aa, Homo sapiens; identical to SEQ ID NO: 6680

SEQ ID NO: 6682 - protein, 135 aa, Homo sapiens; identical to SEQ ID NO: 6680

SEQ ID NO: 6683 - protein, 162 aa, Homo sapiens; identical to SEQ ID NO: 6678

SEQ ID NO: 6684 - protein, 193 aa, Homo sapiens
MAAEPVEDNCINFVAMKFIDNTLYFIAEDDENLESDYFGKLESKLSVIRNLNDQVLFIDQGNRPLFEDMTDSDCRDNAPRTIFIISMYKDSQPRGMAVTISVKCEKISTLSCENKIISFKEMNPPDNIKDTKSDIIFFQRSVPGHDNKMQFESSSYEGYFLACEKERDLFKLILKKEDELGDRSIMFTVQNED

SEQ ID NO: 6685 - protein, 189 aa, Homo sapiens
MAAEPVEDNCINFVAMKFIDNTLYFIENLESDYFGKLESKLSVIRNLNDQVLFIDQGNRPLFEDMTDSDCRDNAPRTIFIISMYKDSQPRGMAVTISVKCEKISTLSCENKIISFKEMNPPDNIKDTKSDIIFFQRSVPGHDNKMQFESSSYEGYFLACEKERDLFKLILKKEDELGDRSIMFTVQNED

SEQ ID NO: 6686 - protein, 193 aa, Homo sapiens; identical to SEQ ID NO: 6684

SEQ ID NO: 6687 - protein, 153 aa, Homo sapiens
MYRMQLLSCIALSLALVTNSAPTSSSTKKTQLQLEHLLLDLQMILNGINNYKNPKLTRMLTFKFYMPKKATELKHLQCLEEELKPLEEVLNLAQSKNFHLRPRDLISNINVIVLELKGSETTFMCEYADETATIVEFLNRWITFCQSIISTLT

SEQ ID NO: 6688 - protein, 153 aa, Homo sapiens [sequence omitted]

SEQ ID NO: 6689 - protein, 137 aa, Homo sapiens
MGLTSQLLPPLFFLLACAGNFVHGHKCDITLQEIIKTLNSLTEQKNTTEKETFCRAATVLRQFYSHHEKDTRCLGATAQQFHRHKQLIRFLKRLDRNLWGLAGLNSCPVKEANQSTLENFLERLKTIMREKYSKCSS

SEQ ID NO: 6690 - protein, 212 aa, Homo sapiens
MNSFSTSAFGPVAFSLGLLLVLPAAFPAPVPPGEDSKDVAAPHRQPLTSSERIDKQIRYILDGISALRKETCNKSNMCESSKEALAENNLNLPKMAEKDGCFQSGFNEETCLVKIITGLLEFEVYLEYLQNRFESSEEQARAVQMSTKVLIQFLQKKAKNLDAITTPDPTTNASLLTKLQAQNQWLQDMTTHLILRSFKEFLQSSLRALRQM

SEQ ID NO: 6691 - protein, 122 aa, Homo sapiens
MCESSKEALAENNLNLPKMAEKDGCFQSGFNEETCLVKIITGLLEFEVYLEYLQNRFESSEEQARAVQMSTKVLIQFLQKKVGVSSFPQLGVGEDRLKDSVLDNSGMQCHFQKRRLHVNKRV

SEQ ID NO: 6692 - protein, 212 aa, Homo sapiens; identical to SEQ ID NO: 6690

SEQ ID NO: 6693 - protein, 198 aa, Homo sapiens
MNSFSTSAFGPVAFSLGLLLVLPAAFPAPVPPGEDSKDVAAPHRQPLTSSERIDKQIRYILDGISALRKETCNKSNMCESSKEALAENNLNLPKMAEKDGCFQSGFNEETCLVKIITGLLEFEVYLEYLQNRFESSEEQARAVQMSTKVLIQFLQKKVGVSSFPQLGVGEDRLKDSVLDNSGMQCHFQKRRLHVNKRV

SEQ ID NO: 6694 - protein, 252 aa, Homo sapiens
MNSFSTSKCRKSLALELPAAVEPCVREGCVAQGGLAGGQQQRQAPSCAVSSPLRSLPSGTGAFGPVAFSLGLLLVLPAAFPAPVPPGEDSKDVAAPHRQPLTSSERIDKQIRYILDGISALRKETCNKSNMCESSKEALAENNLNLPKMAEKDGCFQSGFNEETCLVKIITGLLEFEVYLEYLQNRFESSEEQARAVQMSTKVLIQFLQKKVGVSSFPQLGVGEDRLKDSVLDNSGMQCHFQKRRLHVNKRV

SEQ ID NO: 6695 - protein, 152 aa, Homo sapiens
MNSFSTSAFGPVAFSLGLLLVLPAAFPAPVPPGEDSKDVAAPHRQPLTSSERIDKQIRYILDGISALRKETCNKSNMCESSKEALAENNLNLPKMAEKDGCFQSGFNEETCLVKIITGLLEFEVYLEYLQNRFESSEEQARAVQMSTKVLIQ

SEQ ID NO: 6696 - protein, 99 aa, Homo sapiens
MTSKLAVALLAAFLISAALCEGAVLPRSAKELRCQCIKTYSKPFHPKFIKELRVIESGPHCANTEIIVKLSDGRELCLDPKENWVQRVVEKFLKRAENS

SEQ ID NO: 6697 - protein, 712 aa, Homo sapiens
MAGGPGPGEPAAPGAQHFLYEVPPWVMCRFYKVMDALEPADWCQFAALIVRDQTELRLCERSGQRTASVLWPWINRNARVADLVHILTHLQLLRARDIITAWHPPAPLPSPGTTAPRPSSIPAPAEAEAWSPRKLPSSASTFLSPAFPGSQTHSGPELGLVPSPASLWPPPPSPAPSSTKPGPESSVSLLQGARPFPFCWPLCEISRGTHNFSEELKIGEGGFGCVYRAVMRNTVYAVKRLKENADLEWTAVKQSFLTEVEQLSRFRHPNIVDFAGYCAQNGFYCLVYGFLPNGSLEDRLHCQTQACPPLSWPQRLDILLGTARAIQFLHQDSPSLIHGDIKSSNVLLDERLTPKLGDFGLARFSRFAGSSPSQSSMVARTQTVRGTLAYLPEEYIKTGRLAVDTDTFSFGVVVLETLAGQRAVKTHGARTKYLKDLVEEEAEEAGVALRSTQSTLQAGLAADAWAAPIAMQIYKKHLDPRPGPCPPELGLGLGQLACCCLHRRAKRRPPMTQVYERLEKLQAVVAGVPGHSEAASCIPPSPQENSYVSSTGRAHSGAAPWQPLAAPSGASAQAAEQLQRGPNQPVESDESLGGLSAALRSWHLTPSCPLDPAPLREAGCPQGDTAGESSWGSGPGSRPTAVEGLALGSSASSSSEPPQIIINPARQKMVQKLALYEDGALDSLQLLSSSSLPGLGLEQDRQGPEESDEFQS

SEQ ID NO: 6698 - protein, 693 aa, Homo sapiens
MAGGPGPGEPAAPGAQHFLYEVPPWVMCRFYKVMDALEPADWCQFGGWRRAAGGREARGLLAPTPDAPRPAAALIVRDQTELRLCERSGQRTASVLWPWINRNARVADLVHILTHLQLLRARDIITAWHPPAPLPSPGTTAPRPSSIPAPAEAEAWSPRKLPSSASTFLSPAFPGSQTHSGPELGLVPSPASLWPPPPSPAPSSTKPGPESSVSLLQGARPFPFCWPLCEISRGTHNFSEELKIGEGGFGCVYRAVMRNTVYAVKRLKENADLEWTAVKQSFLTEVEQLSRFRHPNIVDFAGYCAQNGFYCLVYGFLPNGSLEDRLHCQTQACPPLSWPQRLDILLGTARAIQFLHQDSPSLIHGDIKSSNVLLDERLTPKLGDFGLARFSRFAGSSPSQSSMVARTQTVRGTLAYLPEEYIKTGRLAVDTDTFSFGVVVLETLAGQRAVKTHGARTKYLKDLVEEEAEEAGVALRSTQSTLQAGLAADAWAAPIAMQIYKKHLGQLACCCLHRRAKRRPPMTQENSYVSSTGRAHSGAAPWQPLAAPSGASAQAAEQLQRGPNQPVESDESLGGLSAALRSWHLTPSCPLDPAPLREAGCPQGDTAGESSWGSGPGSRPTAVEGLALGSSASSSSEPPQIIINPARQKMVQKLALYEDGALDSLQLLSSSSLPGLGLEQDRQGPEESDEFQS

SEQ ID NO: 6699 - protein, 682 aa, Homo sapiens
MAGGPGPGEPAAPGAQHFLYEVPPWVMCRFYKVMDALEPADWCQFAALIVRDQTELRLCERSGQRTASVLWPWINRNARVADLVHILTHLQLLRARDIITAWHPPAPLPSPGTTAPRPSSIPAPAEAEAWSPRKLPSSASTFLSPAFPGSQTHSGPELGLVPSPASLWPPPPSPAPSSTKPGPESSVSLLQGARPFPFCWPLCEISRGTHNFSEELKIGEGGFGCVYRAVMRNTVYAVKRLKENADLEWTAVKQSFLTEVEQLSRFRHPNIVDFAGYCAQNGFYCLVYGFLPNGSLEDRLHCQTQACPPLSWPQRLDILLGTARAIQFLHQDSPSLIHGDIKSSNVLLDERLTPKLGDFGLARFSRFAGSSPSQSSMVARTQTVRGTLAYLPEEYIKTGRLAVDTDTFSFGVVVLETLAGQRAVKTHGARTKYLKDLVEEEAEEAGVALRSTQSTLQAGLAADAWAAPIAMQIYKKHLDPRPGPCPPELGLGLGQLACCCLHRRAKRRPPMTQENSYVSSTGRAHSGAAPWQPLAAPSGASAQAAEQLQRGPNQPVESDESLGGLSAALRSWHLTPSCPLDPAPLREAGCPQGDTAGESSWGSGPGSRPTAVEGLALGSSASSSSEPPQIIINPARQKMVQKLALYEDGALDSLQLLSSSSLPGLGLEQDRQGPEESDEFQS

SEQ ID NO: 6700 - protein, 708 aa, Homo sapiens
MAGGPGPGEPAAPGAQHFLYEVPPWVMCRFYKVMDALEPADWCQFGGWRRAAGGREARGLLAPTPDAPRPAAALIVRDQTELRLCERSGQRTASVLWPWINRNARVADLVHILTHLQLLRARDIITAWHPPAPLPSPGTTAPRPSSIPAPAEAEAWSPRKLPSSASTFLSPAFPGSQTHSGPELGLVPSPASLWPPPPSPAPSSTKPGPESSVSLLQGARPFPFCWPLCEISRGTHNFSEELKIGEGGFGCVYRAVMRNTVYAVKRLKENADLEWTAVKQSFLTEVEQLSRFRHPNIVDFAGYCAQNGFYCLVYGFLPNGSLEDRLHCQTQACPPLSWPQRLDILLGTARAIQFLHQDSPSLIHGDIKSSNVLLDERLTPKLGDFGLARFSRFAGSSPSQSSMVARTQTVRGTLAYLPEEYIKTGRLAVDTDTFSFGVVVLETLAGQRAVKTHGARTKYLKDLVEEEAEEAGVALRSTQSTLQAGLAADAWAAPIAMQIYKKHLDPRPGPCPPELGLGLGQLACCCLHRRAKRRPPMTQENSYVSSTGRAHSGAAPWQPLAAPSGASAQAAEQLQRGPNQPVESDESLGGLSAALRSWHLTPSCPLDPAPLREAGCPQGDTAGESSWGSGPGSRPTAVEGLALGSSASSSSEPPQIIINPARQKMVQKLALYEDGALDSLQLLSSSSLPGLGLEQDRQGPEESDEFQS

SEQ ID NO: 6701 - protein, 633 aa, Homo sapiens
MAGGPGPGEPAAPGAQHFLYEVPPWVMCRFYKVMDALEPADWCQFAALIVRDQTELRLCERSGQRTASVLWPWINRNARVADLVHILTHLQLLRARDIITAWHPPAPLPSPGTTAPRPSSIPAPAEAEAWSPRKLPSSASTFLSPAFPGSQTHSGPELGLVPSPASLWPPPPSPAPSSTKPGPESSVSLLQGARPFPFCWPLCEISRGTHNFSEELKIGEGGFGCVYRAVMRNTVYAVKRLKENADLEWTAVKQSFLTEVEQLSRFRHPNIVDFAGYCAQNGFYCLVYGFLPNGSLEDRLHCQTQACPPLSWPQRLDILLGTARAIQFLHQDSPSLIHGDIKSSNVLLDERLTPKLGDFGLARFSRFAGSSPSQSSMVARTQTVRGTLAYLPEEYIKTGRLAVDTDTFSFGVVVLETLAGQRAVKTHGARTKYLVYERLEKLQAVVAGVPGHSEAASCIPPSPQENSYVSSTGRAHSGAAPWQPLAAPSGASAQAAEQLQRGPNQPVESDESLGGLSAALRSWHLTPSCPLDPAPLREAGCPQGDTAGESSWGSGPGSRPTAVEGLALGSSASSSSEPPQIIINPARQKMVQKLALYEDGALDSLQLLSSSSLPGLGLEQDRQGPEESDEFQS

SEQ ID NO: 6702 - protein, 414 aa, Homo sapiens
MSKKISGGSVVEMQGDEMTRIIWELIKEKLIFPYVELDLHSYDLGIENRDATNDQVTKDAAEAIKKHNVGVKCATITPDEKRVEEFKLKQMWKSPNGTIRNILGGTVFREAIICKNIPRLVSGWVKPIIIGRHAYGDQYRATDFVVPGPGKVEITYTPSDGTQKVTYLVHNFEEGGGVAMGMYNQDKSIEDFAHSSFQMALSKGWPLYLSTKNTILKKYDGRFKDIFQEIYDKQYKSQFEAQKIWYEHRLIDDMVAQAMKSEGGFIWACKNYDGDVQSDSVAQGYGSLGMMTSVLVCPDGKTVEAEAAHGTVTRHYRMYQKGQETSTNPIASIFAWTRGLAHRAKLDNNKELAFFANALEEVSIETIEAGFMTKDLAACIKGLPNVQRSDYLNTFEFMDKLGENLKIKLAQAKL

SEQ ID NO: 6703 - protein, 157 aa, Homo sapiens
MSKKISGGSVVEMQGDEMTRIIWELIKEKLIFPYVELDLHSYDLGIENRDATNDQVTKDAAEAIKKHNVGVKCATITPDEKRVEEFKLKQMWKSPNGTIRNILGGTVFREAIICKNIPRLVSGWVKPIIIGRHAYGDQYRATDFVVPGPGKVEITYT

SEQ ID NO: 6704 - protein, 414 aa, Homo sapiens; identical to SEQ ID NO: 6702

SEQ ID NO: 6705 - protein, 74 aa, Homo sapiens
MSKKISGGSVVEMQGDEMTRIIWELIKEKLIFPYVELDLHSYDLGIENRDATNDQVTKDAAEAIKKHNVGVKCA

SEQ ID NO: 6706 - protein, 414 aa, Homo sapiens; identical to SEQ ID NO: 6702

SEQ ID NO: 6707 - protein, 62 aa, Homo sapiens
MSKKISGGSVVEMQGDEMTRIIWELIKEKLIFPYVELDLHSYDLGIENRDATNDQVTKDAAE

SEQ ID NO: 6708 - protein, 452 aa, Homo sapiens
MAGYLRVVRSLCRASGSRPAWAPAALTAPTSQEQPRRHYADKRIKVAKPVVEMDGDEMTRIIWQFIKEKLILPHVDIQLKYFDLGLPNRDQTDDQVTIDSALATQKYSVAVKCATITPDEARVEEFKLKKMWKSPNGTIRNILGGTVFREPIICKNIPRLVPGWTKPITIGRHAHGDQYKATDFVADRAGTFKMVFTPKDGSGVKEWEVYNFPAGGVGMGMYNTDESISGFAHSCFQYAIQKKWPLYMSTKNTILKAYDGRFKDIFQEIFDKHYKTDFDKNKIWYEHRLIDDMVAQVLKSSGGFVWACKNYDGDVQSDILAQGFGSLGLMTSVLVCPDGKTIEAEAAHGTVTRHYREHQKGRPTSTNPIASIFAWTRGLEHRGKLDGNQDLIRFAQMLEKVCVETVESGAMTKDLAGCIHGLSNVKLNEHFLNTTDFLDTIKSNLDRALGRQ

SEQ ID NO: 6709 - protein, 322 aa, Homo sapiens
MWKSPNGTIRNILGGTVFREPIICKNIPRLVPGWTKPITIGRHAHGDQYKATDFVADRAGTFKMVFTPKDGSGVKEWEVYNFPAGGVGMGMYNTDESISGFAHSCFQYAIQKKWPLYMSTKNTILKAYDGRFKDIFQEIFDKHYKTDFDKNKIWYEHRLIDDMVAQVLKSSGGFVWACKNYDGDVQSDILAQGFGSLGLMTSVLVCPDGKTIEAEAAHGTVTRHYREHQKGRPTSTNPIASIFAWTRGLEHRGKLDGNQDLIRFAQMLEKVCVETVESGAMTKDLAGCIHGLSNVKLNEHFLNTTDFLDTIKSNLDRALGRQ

SEQ ID NO: 6710 - protein, 400 aa, Homo sapiens
MDGDEMTRIIWQFIKEKLILPHVDIQLKYFDLGLPNRDQTDDQVTIDSALATQKYSVAVKCATITPDEARVEEFKLKKMWKSPNGTIRNILGGTVFREPIICKNIPRLVPGWTKPITIGRHAHGDQYKATDFVADRAGTFKMVFTPKDGSGVKEWEVYNFPAGGVGMGMYNTDESISGFAHSCFQYAIQKKWPLYMSTKNTILKAYDGRFKDIFQEIFDKHYKTDFDKNKIWYEHRLIDDMVAQVLKSSGGFVWACKNYDGDVQSDILAQGFGSLGLMTSVLVCPDGKTIEAEAAHGTVTRHYREHQKGRPTSTNPIASIFAWTRGLEHRGKLDGNQDLIRFAQMLEKVCVETVESGAMTKDLAGCIHGLSNVKLNEHFLNTTDFLDTIKSNLDRALGRQ

SEQ ID NO: 6711 - protein, 1218 aa, Homo sapiens
MRSPRTRGRSGRPLSLLLALLCALRAKVCGASGQFELEILSMQNVNGELQNGNCCGGARNPGDRKCTRDECDTYFKVCLKEYQSRVTAGGPCSFGSGSTPVIGGNTFNLKASRGNDRNRIVLPFSFAWPRSYTLLVEAWDSSNDTVQPDSIIEKASHSGMINPSRQWQTLKQNTGVAHFEYQIRVTCDDYYYGFGCNKFCRPRDDFFGHYACDQNGNKTCMEGWMGPECNRAICRQGCSPKHGSCKLPGDCRCQYGWQGLYCDKCIPHPGCVHGICNEPWQCLCETNWGGQLCDKDLNYCGTHQPCLNGGTCSNTGPDKYQCSCPEGYSGPNCEIAEHACLSDPCHNRGSCKETSLGFECECSPGWTGPTCSTNIDDCSPNNCSHGGTCQDLVNGFKCVCPPQWTGKTCQLDANECEAKPCVNAKSCKNLIASYYCDCLPGWMGQNCDININDCLGQCQNDASCRDLVNGYRCICPPGYAGDHCERDIDECASNPCLNGGHCQNEINRFQCLCPTGFSGNLCQLDIDYCEPNPCQNGAQCYNRASDYFCKCPEDYEGKNCSHLKDHCRTTPCEVIDSCTVAMASNDTPEGVRYISSNVCGPHGKCKSQSGGKFTCDCNKGFTGTYCHENINDCESNPCRNGGTCIDGVNSYKCICSDGWEGAYCETNINDCSQNPCHNGGTCRDLVNDFYCDCKNGWKGKTCHSRDSQCDEATCNNGGTCYDEGDAFKCMCPGGWEGTTCNIARNSSCLPNPCHNGGTCVVNGESFTCVCKEGWEGPICAQNTNDCSPHPCYNSGTCVDGDNWYRCECAPGFAGPDCRININECQSSPCAFGATCVDEINGYRCVCPPGHSGAKCQEVSGRPCITMGSVIPDGAKWDDDCNTCQCLNGRIACSKVWCGPRPCLLHKGHSECPSGQSCIPILDDQCFVHPCTGVGECRSSSLQPVKTKCTSDSYYQDNCANITFTFNKEMMSPGLTTEHICSELRNLNILKNVSAEYSIYIACEPSPSANNEIHVAISAEDIRDDGNPIKEITDKIIDLVSKRDGNSSLIAAVAEVRVQRRPLKNRTDFLVPLLSSVLTVAWICCLVTAFYWCLRKRRKPGSHTHSASEDNTTNNVREQLNQIKNPIEKHGANTVPIKDYENKNSKMSKIRTHNSEVEEDDMDKHQQKARFAKQPAYTLVDREEKPPNGTPTKHPNWTNKQDNRDLESAQSLNRMEYIV

SEQ ID NO: 6712 - protein, 1059 aa, Homo sapiens
MINPSRQWQTLKQNTGVAHFEYQIRVTCDDYYYGFGCNKFCRPRDDFFGHYACDQNGNKTCMEGWMGPECNRAICRQGCSPKHGSCKLPGDCRCQYGWQGLYCDKCIPHPGCVHGICNEPWQCLCETNWGGQLCDKDLNYCGTHQPCLNGGTCSNTGPDKYQCSCPEGYSGPNCEIAEHACLSDPCHNRGSCKETSLGFECECSPGWTGPTCSTNIDDCSPNNCSHGGTCQDLVNGFKCVCPPQWTGKTCQLDANECEAKPCVNAKSCKNLIASYYCDCLPGWMGQNCDININDCLGQCQNDASCRDLVNGYRCICPPGYAGDHCERDIDECASNPCLNGGHCQNEINRFQCLCPTGFSGNLCQLDIDYCEPNPCQNGAQCYNRASDYFCKCPEDYEGKNCSHLKDHCRTTPCEVIDSCTVAMASNDTPEGVRYISSNVCGPHGKCKSQSGGKFTCDCNKGFTGTYCHENINDCESNPCRNGGTCIDGVNSYKCICSDGWEGAYCETNINDCSQNPCHNGGTCRDLVNDFYCDCKNGWKGKTCHSRDSQCDEATCNNGGTCYDEGDAFKCMCPGGWEGTTCNIARNSSCLPNPCHNGGTCVVNGESFTCVCKEGWEGPICAQNTNDCSPHPCYNSGTCVDGDNWYRCECAPGFAGPDCRININECQSSPCAFGATCVDEINGYRCVCPPGHSGAKCQEVSGRPCITMGSVIPDGAKWDDDCNTCQCLNGRIACSKVWCGPRPCLLHKGHSECPSGQSCIPILDDQCFVHPCTGVGECRSSSLQPVKTKCTSDSYYQDNCANITFTFNKEMMSPGLTTEHICSELRNLNILKNVSAEYSIYIACEPSPSANNEIHVAISAEDIRDDGNPIKEITDKIIDLVSKRDGNSSLIAAVAEVRVQRRPLKNRTDFLVPLLSSVLTVAWICCLVTAFYWCLRKRRKPGSHTHSASEDNTTNNVREQLNQIKNPIEKHGANTVPIKDYENKNSKMSKIRTHNSEVEEDDMDKHQQKARFAKQPAYTLVDREEKPPNGTPTKHPNWTNKQDNRDLESAQSLNRMEYIV

SEQ ID NO: 6713 - protein, 1132 aa, Homo sapiens
MGMACLTMTEMEGTSTSSIYQNGDISGNANSMKQIDPVLQVYLYHSLGKSEADYLTFPSGEYVAEEICIAASKACGITPVYHNMFALMSETERIWYPPNHVFHIDESTRHNVLYRIRFYFPRWYCSGSNRAYRHGISRGAEAPLLDDFVMSYLFAQWRHDFVHGWIKVPVTHETQEECLGMAVLDMMRIAKENDQTPLAIYNSISYKTFLPKCIRAKIQDYHILTRKRIRYRFRRFIQQFSQCKATARNLKLKYLINLETLQSAFYTEKFEVKEPGSGPSGEEIFATIIITGNGGIQWSRGKHKESETLTEQDLQLYCDFPNIIDVSIKQANQEGSNESRVVTIHKQDGKNLEIELSSLREALSFVSLIDGYYRLTADAHHYLCKEVAPPAVLENIQSNCHGPISMDFAISKLKKAGNQTGLYVLRCSPKDFNKYFLTFAVERENVIEYKHCLITKNENEEYNLSGTKKNFSSLKDLLNCYQMETVRSDNIIFQFTKCCPPKPKDKSNLLVFRTNGVSDVPTSPTLQRPTHMNQMVFHKIRNEDLIFNESLGQGTFTKIFKGVRREVGDYGQLHETEVLLKVLDKAHRNYSESFFEAASMMSKLSHKHLVLNYGVCVCGDENILVQEFVKFGSLDTYLKKNKNCINILWKLEVAKQLAWAMHFLEENTLIHGNVCAKNILLIREEDRKTGNPPFIKLSDPGISITVLPKDILQERIPWVPPECIENPKNLNLATDKWSFGTTLWEICSGGDKPLSALDSQRKLQFYEDRHQLPAPKWAELANLINNCMDYEPDFRPSFRAIIRDLNSLFTPDYELLTENDMLPNMRIGALGFSGAFEDRDPTQFEERHLKFLQQLGKGNFGSVEMCRYDPLQDNTGEVVAVKKLQHSTEEHLRDFEREIEILKSLQHDNIVKYKGVCYSAGRRNLKLIMEYLPYGSLRDYLQKHKERIDHIKLLQYTSQICKGMEYLGTKRYIHRDLATRNILVENENRVKIGDFGLTKVLPQDKEYYKVKEPGESPIFWYAPESLTESKFSVASDVWSFGVVLYELFTYIEKSKSPPAEFMRMIGNDKQGQMIVFHLIELLKNNGRLPRPDGCPDEIYMIMTECWNNNVNQRPSFRDLALRVDQIRDNMAG

SEQ ID NO: 6714 - protein, 1132 aa, Homo sapiens; identical to SEQ ID NO: 6713

SEQ ID NO: 6715 - protein, 983 aa, Homo sapiens
MSYLFAQWRHDFVHGWIKVPVTHETQEECLGMAVLDMMRIAKENDQTPLAIYNSISYKTFLPKCIRAKIQDYHILTRKRIRYRFRRFIQQFSQCKATARNLKLKYLINLETLQSAFYTEKFEVKEPGSGPSGEEIFATIIITGNGGIQWSRGKHKESETLTEQDLQLYCDFPNIIDVSIKQANQEGSNESRVVTIHKQDGKNLEIELSSLREALSFVSLIDGYYRLTADAHHYLCKEVAPPAVLENIQSNCHGPISMDFAISKLKKAGNQTGLYVLRCSPKDFNKYFLTFAVERENVIEYKHCLITKNENEEYNLSGTKKNFSSLKDLLNCYQMETVRSDNIIFQFTKCCPPKPKDKSNLLVFRTNGVSDVPTSPTLQRPTHMNQMVFHKIRNEDLIFNESLGQGTFTKIFKGVRREVGDYGQLHETEVLLKVLDKAHRNYSESFFEAASMMSKLSHKHLVLNYGVCVCGDENILVQEFVKFGSLDTYLKKNKNCINILWKLEVAKQLAWAMHFLEENTLIHGNVCAKNILLIREEDRKTGNPPFIKLSDPGISITVLPKDILQERIPWVPPECIENPKNLNLATDKWSFGTTLWEICSGGDKPLSALDSQRKLQFYEDRHQLPAPKWAELANLINNCMDYEPDFRPSFRAIIRDLNSLFTPDYELLTENDMLPNMRIGALGFSGAFEDRDPTQFEERHLKFLQQLGKGNFGSVEMCRYDPLQDNTGEVVAVKKLQHSTEEHLRDFEREIEILKSLQHDNIVKYKGVCYSAGRRNLKLIMEYLPYGSLRDYLQKHKERIDHIKLLQYTSQICKGMEYLGTKRYIHRDLATRNILVENENRVKIGDFGLTKVLPQDKEYYKVKEPGESPIFWYAPESLTESKFSVASDVWSFGVVLYELFTYIEKSKSPPAEFMRMIGNDKQGQMIVFHLIELLKNNGRLPRPDGCPDEIYMIMTECWNNNVNQRPSFRDLALRVDQIRDNMAG

SEQ ID NO: 6716 - protein, 243 aa, Homo sapiens
MTGIAAASFFSNTCRFGGCGLHFPTLADLIEHIEDNHIDTDPRVLEKQELQQPTYVALSYINRFMTDAARREQESLKKKIQPKLSLTLSSSVSRGNVSTPPRHSSGSLTPPVTPPITPSSSFRSSTPTGSEYDEEEVDYEESDSDESWTTESAISSEAILSSMCMNGGEEKPFACPVPGCKKRYKNVNGIKYHAKNGHRTQIRVRKPFKCRCGKSYKTAQGLRHHTINFHPPVSAEIIRKMQQ

SEQ ID NO: 6717 - protein, 347 aa, Homo sapiens
MCTKMEQPFYHDDSYTATGYGRAPGGLSLHDYKLLKPSLAVNLADPYRSLKAPGARGPGPEGGGGGSYFSGQGSDTGASLKLASSELERLIVPNSNGVITTTPTPPGQYFYPRGGGSGGGAGGAGGGVTEEQEGFADGFVKALDDLHKMNHVTPPNVSLGATGGPPAGPGGVYAGPEPPPVYTNLSSYSPASASSGGAGAAVGTGSSYPTTTISYLPHAPPFAGGHPAQLGLGRGASTFKEEPQTVPEARSRDATPPVSPINMEDQERIKVERKRLRNRLAATKCRKRKLERIARLEDKVKTLKAENAGLSSTAGLLREQVAQLKQKVMTHVSNGCQLLLGVKGHAF

SEQ ID NO: 6718 - protein, 331 aa, Homo sapiens
MTAKMETTFYDDALNASFLPSESGPYGYSNPKILKQSMTLNLADPVGSLKPHLRAKNSDLLTSPDVGLLKLASPELERLIIQSSNGHITTTPTPTQFLCPKNVTDEQEGFAEGFVRALAELHSQNTLPSVTSAAQPVNGAGMVAPAVASVAGGSGSGGFSASLHSEPPVYANLSNFNPGALSSGGGAPSYGAAGLAFPAQPQQQQQPPHHLPQQMPVQHPRLQALKEEPQTVPEMPGETPPLSPIDMESQERIKAERKRMRNRIAASKCRKRKLERIARLEEKVKTLKAQNSELASTANMLREQVAQLKQKVMNHVNSGCQLMLTQQLQTF

SEQ ID NO: 6719 - protein, 276 aa, Homo sapiens
MRAPHLHLSAASGARALAKLLPLLMAQLWAAEAALLPQNDTRLDPEAYGSPCARGSQPWQVSLFNGLSFHCAGVLVDQSWVLTAAHCGNKPLWARVGDDHLLLLQGEQLRRTTRSVVHPKYHQGSGPILPRRTDEHDLMLLKLARPVVLGPRVRALQLPYRCAQPGDQCQVAGWGTTAARRVKYNKGLTCSSITILSPKECEVFYPGVVTNNMICAGLDRGQDPCQSDSGGPLVCDETLQGILSWGVYPCGSAQHPAVYTQICKYMSWINKVIRSN

SEQ ID NO: 6720 - protein, 276 aa, Homo sapiens; identical to SEQ ID NO: 6719

SEQ ID NO: 6721 - protein, 276 aa, Homo sapiens; identical to SEQ ID NO: 6719

SEQ ID NO: 6722 - protein, 218 aa, Homo sapiens
MWVPVVFLTLSVTWIGAAPLILSRIVGGWECEKHSQPWQVLVASRGRAVCGGVLVHPQWVLTAAHCIRKPGDDSSHDLMLLRLSEPAELTDAVKVMDLPTQEPALGTTCYASGWGSIEPEEFLTPKKLQCVDLHVISNDVCAQVHPQKVTKFMLCAGRWTGGKSTCSGDSGGPLVCNGVLQGITSWGSEPCALPERPSLYTKVVHYRKWIKDTIVANP

SEQ ID NO: 6723 - protein, 529 aa, Homo sapiens [sequence omitted]

SEQ ID NO: 6724 - protein, 529 aa, Homo sapiens [sequence omitted]

SEQ ID NO: 6725 - protein, 655 aa, Homo sapiens
MPLKWKTSSPAIWKFPVPVLKTSRSTPLSPAYISLVEEEDQHMKLSLGGSEMGLSSHLQSSKAGPTRIFTSNTHSSVVLQGFDQLRLEGLLCDVTLMPGDTDDAFPVHRVMMASASDYFKAMFTGGMKEQDLMCIKLHGVSKVGLRKIIDFIYTAKLSLNMDNLQDTLEAASFLQILPVLDFCKVFLISGVTLDNCVEVGRIANTYNLTEVDKYVNSFVLKNFPALLSTGEFLKLPFERLAFVLSSNSLKHCTELELFKATCRWLRLEEPRMDFAAKLMKNIRFPLMTPQELINYVQTVDFMRTDNTCVNLLLEASNYQMMPYMQPVMQSDRTAIRSDTTHLVTLGGVLRQQLVVSKELRMYDEKAHEWKSLAPMDAPRYQHGIAVIGNFLYVVGGQSNYDTKGKTAVDTVFRFDPRYNKWMQVASLNEKRTFFHLSALKGYLYAVGGRNAAGELPTVECYNPRTNEWTYVAKMSEPHYGHAGTVYGGVMYISGGITHDTFQKELMCFDPDTDKWIQKAPMTTVRGLHCMCTVGERLYVIGGNHFRGTSDYDDVLSCEYYSPILDQWTPIAAMLRGQSDVGVAVFENKIYVVGGYSWNNRCMVEIVQKYDPDKDEWHKVFDLPESLGGIRACTLTVFPPEETTPSPSRESPLSAP

SEQ ID NO: 6726 - protein, 604 aa, Homo sapiens
MGLSSHLQSSKAGPTRIFTSNTHSSVVLQGFDQLRLEGLLCDVTLMPGDTDDAFPVHRVMMASASDYFKAMFTGGMKEQDLMCIKLHGVSKVGLRKIIDFIYTAKLSLNMDNLQDTLEAASFLQILPVLDFCKVFLISGVTLDNCVEVGRIANTYNLTEVDKYVNSFVLKNFPALLSTGEFLKLPFERLAFVLSSNSLKHCTELELFKATCRWLRLEEPRMDFAAKLMKNIRFPLMTPQELINYVQTVDFMRTDNTCVNLLLEASNYQMMPYMQPVMQSDRTAIRSDTTHLVTLGGVLRQQLVVSKELRMYDEKAHEWKSLAPMDAPRYQHGIAVIGNFLYVVGGQSNYDTKGKTAVDTVFRFDPRYNKWMQVASLNEKRTFFHLSALKGYLYAVGGRNAAGELPTVECYNPRTNEWTYVAKMSEPHYGHAGTVYGGVMYISGGITHDTFQKELMCFDPDTDKWIQKAPMTTVRGLHCMCTVGERLYVIGGNHFRGTSDYDDVLSCEYYSPILDQWTPIAAMLRGQSDVGVAVFENKIYVVGGYSWNNRCMVEIVQKYDPDKDEWHKVFDLPESLGGIRACTLTVFPPEETTPSPSRESPLSAP

SEQ ID NO: 6727 - protein, 604 aa, Homo sapiens; identical to SEQ ID NO: 6726

SEQ ID NO: 6728 - protein, 604 aa, Homo sapiens; identical to SEQ ID NO: 6726

SEQ ID NO: 6729 - protein, 604 aa, Homo sapiens; identical to SEQ ID NO: 6726

SEQ ID NO: 6730 - protein, 38 aa, Homo sapiens
MGLSSHLQSSKAGPTRIFTSNTHSSVVLQGFDQLRLEG

SEQ ID NO: 6731 - protein, 604 aa, Homo sapiens; identical to SEQ ID NO: 6726

SEQ ID NO: 6732 - protein, 658 aa, Homo sapiens
MMRVQTLREKWAYWRRRQLSLKQADFKDIFKKSTSGSLVEEEDQHMKLSLGGSEMGLSSHLQSSKAGPTRIFTSNTHSSVVLQGFDQLRLEGLLCDVTLMPGDTDDAFPVHRVMMASASDYFKAMFTGGMKEQDLMCIKLHGVSKVGLRKIIDFIYTAKLSLNMDNLQDTLEAASFLQILPVLDFCKVFLISGVTLDNCVEVGRIANTYNLTEVDKYVNSFVLKNFPALLSTGEFLKLPFERLAFVLSSNSLKHCTELELFKATCRWLRLEEPRMDFAAKLMKNIRFPLMTPQELINYVQTVDFMRTDNTCVNLLLEASNYQMMPYMQPVMQSDRTAIRSDTTHLVTLGGVLRQQLVVSKELRMYDEKAHEWKSLAPMDAPRYQHGIAVIGNFLYVVGGQSNYDTKGKTAVDTVFRFDPRYNKWMQVASLNEKRTFFHLSALKGYLYAVGGRNAAGELPTVECYNPRTNEWTYVAKMSEPHYGHAGTVYGGVMYISGGITHDTFQKELMCFDPDTDKWIQKAPMTTVRGLHCMCTVGERLYVIGGNHFRGTSDYDDVLSCEYYSPILDQWTPIAAMLRGQSDVGVAVFENKIYVVGGYSWNNRCMVEIVQKYDPDKDEWHKVFDLPESLGGIRACTLTVFPPEETTPSPSRESPLSAP

SEQ ID NO: 6733 - protein, 639 aa, Homo sapiens
MDHLHRGELVAAILRNRSLVEEEDQHMKLSLGGSEMGLSSHLQSSKAGPTRIFTSNTHSSVVLQGFDQLRLEGLLCDVTLMPGDTDDAFPVHRVMMASASDYFKAMFTGGMKEQDLMCIKLHGVSKVGLRKIIDFIYTAKLSLNMDNLQDTLEAASFLQILPVLDFCKVFLISGVTLDNCVEVGRIANTYNLTEVDKYVNSFVLKNFPALLSTGEFLKLPFERLAFVLSSNSLKHCTELELFKATCRWLRLEEPRMDFAAKLMKNIRFPLMTPQELINYVQTVDFMRTDNTCVNLLLEASNYQMMPYMQPVMQSDRTAIRSDTTHLVTLGGVLRQQLVVSKELRMYDEKAHEWKSLAPMDAPRYQHGIAVIGNFLYVVGGQSNYDTKGKTAVDTVFRFDPRYNKWMQVASLNEKRTFFHLSALKGYLYAVGGRNAAGELPTVECYNPRTNEWTYVAKMSEPHYGHAGTVYGGVMYISGGITHDTFQKELMCFDPDTDKWIQKAPMTTVRGLHCMCTVGERLYVIGGNHFRGTSDYDDVLSCEYYSPILDQWTPIAAMLRGQSDVGVAVFENKIYVVGGYSWNNRCMVEIVQKYDPDKDEWHKVFDLPESLGGIRACTLTVFPPEETTPSPSRESPLSAP

SEQ ID NO: 6734 - protein, 639 aa, Homo sapiens; identical to SEQ ID NO: 6733

SEQ ID NO: 6735 - protein, 613 aa, Homo sapiens
MKLSLGGSEMGLSSHLQSSKAGPTRIFTSNTHSSVVLQGFDQLRLEGLLCDVTLMPGDTDDAFPVHRVMMASASDYFKAMFTGGMKEQDLMCIKLHGVSKVGLRKIIDFIYTAKLSLNMDNLQDTLEAASFLQILPVLDFCKVFLISGVTLDNCVEVGRIANTYNLTEVDKYVNSFVLKNFPALLSTGEFLKLPFERLAFVLSSNSLKHCTELELFKATCRWLRLEEPRMDFAAKLMKNIRFPLMTPQELINYVQTVDFMRTDNTCVNLLLEASNYQMMPYMQPVMQSDRTAIRSDTTHLVTLGGVLRQQLVVSKELRMYDEKAHEWKSLAPMDAPRYQHGIAVIGNFLYVVGGQSNYDTKGKTAVDTVFRFDPRYNKWMQVASLNEKRTFFHLSALKGYLYAVGGRNAAGELPTVECYNPRTNEWTYVAKMSEPHYGHAGTVYGGVMYISGGITHDTFQKELMCFDPDTDKWIQKAPMTTVRGLHCMCTVGERLYVIGGNHFRGTSDYDDVLSCEYYSPILDQWTPIAAMLRGQSDVGVAVFENKIYVVGGYSWNNRCMVEIVQKYDPDKDEWHKVFDLPESLGGIRACTLTVFPPEETTPSPSRESPLSAP

SEQ ID NO: 6736 - protein, 472 aa, Homo sapiens
MTTCSRQFTSSSSMKGSCGIGGGIGGGSSRISSVLAGGSCRAPSTYGGGLSVSSSRFSSGGACGLGGGYGGGFSSSSSSFGSGFGGGYGGGLGAGLGGGFGGGFAGGDGLLVGSEKVTMQNLNDRLASYLDKVRALEEANADLEVKIRDWYQRQRPAEIKDYSPYFKTIEDLRNKILTATVDNANVLLQIDNARLAADDFRTKYETELNLRMSVEADINGLRRVLDELTLARADLEMQIESLKEELAYLKKNHEEEMNALRGQVGGDVNVEMDAAPGVDLSRILNEMRDQYEKMAEKNRKDAEEWFFTKTEELNREVATNSELVQSGKSEISELRRTMQNLEIELQSQLSMKASLENSLEETKGRYCMQLAQIQEMIGSVEEQLAQLRCEMEQQNQEYKILLDVKTRLEQEIATYRRLLEGEDAHLSSSQFSSGSQSSRDVTSSSRQIRTKVMDVHDGKVVSTHEQVLRTKN

SEQ ID NO: 6737 - protein, 430 aa, Homo sapiens
MSFTTRSTFSTNYRSLGSVQAPSYGARPVSSAASVYAGAGGSGSRISVSRSTSFRGGMGSGGLATGIAGGLAGMGGIQNEKETMQSLNDRLASYLDRVRSLETENRRLESKIREHLEKKGPQVRDWSHYFKIIEDLRAQIFANTVDNARIVLQIDNARLAADDFRVKYETELAMRQSVENDIHGLRKVIDDTNITRLQLETEIEALKEELLFMKKNHEEEVKGLQAQIASSGLTVEVDAPKSQDLAKIMADIRAQYDELARKNREELDKYWSQQIEESTTVVTTQSAEVGAAETTLTELRRTVQSLEIDLDSMRNLKASLENSLREVEARYALQMEQLNGILLHLESELAQTRAEGQRQAQEYEALLNIKVKLEAEIATYRRLLEDGEDFNLGDALDSSNSMQTIQKTTTRRIVDGKVVSETNDTKVLRH

SEQ ID NO: 6738 - protein, 430 aa, Homo sapiens; identical to SEQ ID NO: 6737

SEQ ID NO: 6739 - protein, 400 aa, Homo sapiens
MTSYSYRQSSATSSFGGLGGGSVRFGPGVAFRAPSIHGGSGGRGVSVSSARFVSSSSSGAYGGGYGGVLTASDGLLAGNEKLTMQNLNDRLASYLDKVRALEAANGELEVKIRDWYQKQGPGPSRDYSHYYTTIQDLRDKILGATIENSRIVLQIDNARLAADDFRTKFETEQALRMSVEADINGLRRVLDELTLARTDLEMQIEGLKEELAYLKKNHEEEISTLRGQVGGQVSVEVDSAPGTDLAKILSDMRSQYEVMAEQNRKDAEAWFTSRTEELNREVAGHTEQLQMSRSEVTDLRRTLQGLEIELQSQLSMKAALEDTLAETEARFGAQLAHIQALISGIEAQLGDVRADSERQNQEYQRLMDIKSRLEQEIATYRSLLEGQEDHYNNLSASKVL

SEQ ID NO: 6740 - protein, 196 aa, Homo sapiens
MTSYSYRQSSATSSFGGLGGGSVRFGPGVAFRAPSIHGGSGGRGVSVSSARFVSSSSSGAYGGGYGGVLTASDGLLAGNEKLTMQNLNDRLASYLDKVRALEAANGELEILGATIENSRIVLQIDNARLAADDFRTKFETEQALRMSVEADINGLRRVLDELTLARTDLEMQIEGLKEELAYLKKNHEEEISTLRG

SEQ ID NO: 6741 - protein, 590 aa, Homo sapiens
MSRQSSVSFRSGGSRSFSTASAITPSVSRTSFTSVSRSGGGGGGGFGRVSLAGACGVGGYGSRSLYNLGGSKRISISTSGGSFRNRFGAGAGGGYGFGGGAGSGFGFGGGAGGGFGLGGGAGFGGGFGGPGFPVCPPGGIQEVTVNQSLLTPLNLQIDPSIQRVRTEEREQIKTLNNKFASFIDKVRFLEQQNKVLDTKWTLLQEQGTKTVRQNLEPLFEQYINNLRRQLDSIVGERGRLDSELRNMQDLVEDFKNKYEDEINKRTTAENEFVMLKKDVDAAYMNKVELEAKVDALMDEINFMKMFFDAELSQMQTHVSDTSVVLSMDNNRNLDLDSIIAEVKAQYEEIANRSRTEAESWYQTKYEELQQTAGRHGDDLRNTKHEISEMNRMIQRLRAEIDNVKKQCANLQNAIADAEQRGELALKDARNKLAELEEALQKAKQDMARLLREYQELMNTKLALDVEIATYRKLLEGEECRLSGEGVGPVNISVVTSSVSSGYGSGSGYGGGLGGGLGGGLGGGLAGGSSGSYYSSSSGGVGLGGGLSVGGSGFSASSGRGLGVGFGSGGGSSSSVKFVSTTSSSRKSFKS

SEQ ID NO: 6742 - protein, 555 aa, Homo sapiens
MSRQSSVSFRSGGSRSFSTASAITPSVSRTSFTSVSRSGGGGGGGFGRVSLAGACGVGGYGFGGGAGSGFGFGGGAGGGFGLGGGAGFGGGFGGPGFPVCPPGGIQEVTVNQSLLTPLNLQIDPSIQRVRTEEREQIKTLNNKFASFIDKVRFLEQQNKVLDTKWTLLQEQGTKTVRQNLEPLFEQYINNLRRQLDSIVGERGRLDSELRNMQDLVEDFKNKYEDEINKRTTAENEFVMLKKDVDAAYMNKVELEAKVDALMDEINFMKMFFDAELSQMQTHVSDTSVVLSMDNNRNLDLDSIIAEVKAQYEEIANRSRTEAESWYQTKYEELQQTAGRHGDDLRNTKHEISEMNRMIQRLRAEIDNVKKQCANLQNAIADAEQRGELALKDARNKLAELEEALQKAKQDMARLLREYQELMNTKLALDVEIATYRKLLEGEECRLSGEGVGPVNISVVTSSVSSGYGSGSGYGGGLGGGLGGGLGGGLAGGSSGSYYSSSSGGVGLGGGLSVGGSGFSASSGRGLGVGFGSGGGSSSSVKFVSTTSSSRKSFKS

SEQ ID NO: 6743 - protein, 132 aa, Homo sapiens
MSRQSSVSFRSGGSRSFSTASAITPSVSRTSFTSVSRSGGGGGGGFGRVSLAGACGVGGYGSRSLYNLGGSKRISISTSGGSFRNRFGAGAGGGYGFGGGAGSGFGFGGGAGGGFGLGGGAGFGGGFGGPGF

SEQ ID NO: 6744 - protein, 469 aa, Homo sapiens
MSIHFSSPVFTSRSAAFSGRGAQVRLSSARPGGLGSSSLYGLGASRPRVAVRSAYGGPVGAGIREVTINQSLLAPLRLDADPSLQRVRQEESEQIKTLNNKFASFIDKVRFLEQQNKLLETKWTLLQEQKSAKSSRLPDIFEAQIAGLRGQLEALQVDGGRLEAELRSMQDVVEDFKNKYEDEINHRTAAENEFVVLKKDVDAAYMSKVELEAKVDALNDEINFLRTLNETELTELQSQISDTSVVLSMDNSRSLDLDGIIAEVKAQYEEMAKCSRAEAEAWYQTKFETLQAQAGKHGDDLRNTRNEISEMNRAIQRLQAEIDNIKNQRAKLEAAIAEAEERGELALKDARAKQEELEAALQRGKQDMARQLREYQELMSVKLALDIEIATYRKLLEGEESRLAGDGVGAVNISVMNSTGGSSSGGGIGLTLGGTMGSNALSFSSSAGPGLLKAYSIRTASASRRSARD

SEQ ID NO: 6745 - protein, 445 aa, Homo sapiens
MSIHFSSPVFTSRSAAFSGRGAQVRLSSARPGGLGSSSLYGLGASRPRVAPLRLDADPSLQRVRQEESEQIKTLNNKFASFIDKVRFLEQQNKLLETKWTLLQEQKSAKSSRLPDIFEAQIAGLRGQLEALQVDGGRLEAELRSMQDVVEDFKNRYEDEINHRTAAENEFVVLKKDVDAAYMSKVELEAKVDALNDEINFLRTLNETELTELQSQISDTSVVLSMDNSRSLDLDGIIAEVKAQYEEMAKCSRAEAEAWYQTKFETLQAQAGKHGDDLRNTRNEISEMNRAIQRLQAEIDNIKNQRAKLEAAIAEAEERGELALKDARAKQEELEAALQRGKQDMARQLREYQELMSVKLALDIEIATYRKLLEGEESRLAGDGVGAVNISVMNSTGGSSSGGGIGLTLGGTMGSNALSFSSSAGPGLLKAYSIRTASASRRSARD

SEQ ID NO: 6746 - protein, 403 aa, Homo sapiens
MSIHFSSPVFTSRSAAFSGRGAQVRLSSARPGGLGSSSLYGLGASRPRVAVRSAYGGPVGAGIREVTINQSLLAPLRLDADPSLQRVRQEESEQIKTLNNKFASFIDKVRFLEQQNKLLETKWTLLQEQKSAKSSRLPDIFEAQIAGLRGQLEALQVDGGRLEAELRSMQDVVEDFKNKYEDEINHRTAAENEFVVLKKDVDAAYMSKVELEAKVDALNDEINFLRTLNETEIHVLQSHISDTSVVVKLDNSQDLNMDCIIAEIKAQYDDIVTCSWAKAESWYHGCLEMKATVIWHGETVGCTKEEIKELTHMIQRLMAKVENAKCQNSKLEVEVTQSEQQGEVALSDNRCKLVELEGTMQKARQYQEVMNSKLGLNVKAASSCHLLDGEEQRLCDGISAVNI

SEQ ID NO: 6747 - protein, 483 aa, Homo sapiens
MSIRVTQKSYKVSTSGPRAFSSRSYTSGPGSRISSSSFSRVGSSNFRGGLGGGYGGASGMGGITAVTVNQSLLSPLVLEVDPNIQAVRTQEKEQIKTLNNKFASFIDKVRFLEQQNKMLETKWSLLQQQKTARSNMDNMFESYINNLRRQLETLGQEKLKLEAELGNMQGLVEDFKNKYEDEINKRTEMENEFVLIKKDVDEAYMNKVELESRLEGLTDEINFLRQLYEEEIRELQSQISDTSVVLSMDNSRSLDMDSIIAEVKAQYEDIANRSRAEAESMYQIKYEELQSLAGKHGDDLRRTKTEISEMNRNISRLQAEIEGLKGQRASLEAAIADAEQRGELAIKDANAKLSELEAALQRAKQDMARQLREYQELMNVKLALDIEIATYRKLLEGEESRLESGMQNMSIHTKTTSGYAGGLSSAYGGLTSPGLSYSLGSSFGSGAGSSSFSRTSSSRAVVVKKIETRDGKLVSESSDVLPK

SEQ ID NO: 6748 - protein, 273 aa, Homo sapiens
MSIRVTQKSYKVSTSGPRAFSSRSYTSGPGSRISSSSFSRVGSSNFRGGLGGGYGGASGMGGITAVTVNQSLLSPLVLEVDPNIQAVRTQEKEQIKTLNNKFASFIDKVRFLEQQNKMLETKWSLLQQQKTARSNMDNMFESYINNLRRQLETLGQEKLKLEAELGNMQGLVEDFKNKYEDEINKRTEMENEFVLIKKDVDEAYMNKVELESRLEGLTDEINFLRQLYEEEIRELQSQISDTSVVLSMDNSRSLDMDSIIAEVKAQYEDIANR

SEQ ID NO: 6749 - protein, 483 aa, Homo sapiens; identical to SEQ ID NO: 6747

SEQ ID NO: 6750 - protein, 177 aa, Homo sapiens
MSIRVTQKSYKVSTSGPRAFSSRSYTSGPGSRISSSSFSRVGSSNFRGGLGGGYGGASGMGGITAVTVNQSLLSPLVLEVDPNIQAVRTQEKEQIKTLNNKFASFIDKVRFLEQQNKMLETKWSLLQQQKTARSNMDNMFESYINNLRRQLETLGQEKLKLEAELGNMQGLVEDFKN

SEQ ID NO: 6751 - protein, 511 aa, Homo sapiens
MNGVSWSQDLQEGISAWFGPPASTPASTMSIRVTQKSYKVSTSGPRAFSSRSYTSGPGSRISSSSFSRVGSSNFRGGLGGGYGGASGMGGITAVTVNQSLLSPLVLEVDPNIQAVRTQEKEQIKTLNNKFASFIDKVRFLEQQNKMLETKWSLLQQQKTARSNMDNMFESYINNLRRQLETLGQEKLKLEAELGNMQGLVEDFKNKYEDEINKRTEMENEFVLIKKDVDEAYMNKVELESRLEGLTDEINFLRQLYEEEIRELQSQISDTSVVLSMDNSRSLDMDSIIAEVKAQYEDIANRSRAEAESMYQIKYEELQSLAGKHGDDLRRTKTEISEMNRNISRLQAEIEGLKGQRASLEAAIADAEQRGELAIKDANAKLSELEAALQRAKQDMARQLREYQELMNVKLALDIEIATYRKLLEGEESRLESGMQNMSIHTKTTSGYAGGLSSAYGGLTSPGLSYSLGSSFGSGAGSSSFSRTSSSRAVVVKKIETRDGKLVSESSDVLPK

SEQ ID NO: 6752 - protein, 483 aa, Homo sapiens; identical to SEQ ID NO: 6747

SEQ ID NO: 6753 - protein, 1356 aa, Homo sapiens
MQSKVLLAVALWLCVETRAASVGLPSVSLDLPRLSIQKDILTIKANTTLQITCRGQRDLDWLWPNNQSGSEQRVEVTECSDGLFCKTLTIPKVIGNDTGAYKCFYRETDLASVIYVYVQDYRSPFIASVSDQHGVVYITENKNKTVVIPCLGSISNLNVSLCARYPEKRFVPDGNRISWDSKKGFTIPSYMISYAGMVFCEAKINDESYQSIMYIVVVVGYRIYDVVLSPSHGIELSVGEKLVLNCTARTELNVGIDFNWEYPSSKHQHKKLVNRDLKTQSGSEMKKFLSTLTIDGVTRSDQGLYTCAASSGLMTKKNSTFVRVHEKPFVAFGSGMESLVEATVGERVRIPAKYLGYPPPEIKWYKNGIPLESNHTIKAGHVLTIMEVSERDTGNYTVILTNPISKEKQSHVVSLVVYVPPQIGEKSLISPVDSYQYGTTQTLTCTVYAIPPPHHIHWYWQLEEECANEPSQAVSVTNPYPCEEWRSVEDFQGGNKIEVNKNQFALIEGKNKTVSTLVIQAANVSALYKCEAVNKVGRGERVISFHVTRGPEITLQPDMQPTEQESVSLWCTADRSTFENLTWYKLGPQPLPIHVGELPTPVCKNLDTLWKLNATMFSNSTNDILIMELKNASLQDQGDYVCLAQDRKTKKRHCVVRQLTVLERVAPTITGNLENQTTSIGESIEVSCTASGNPPPQIMWFKDNETLVEDSGIVLKDGNRNLTIRRVRKEDEGLYTCQACSVLGCAKVEAFFIIEGAQEKTNLEIIILVGTAVIAMFFWLLLVIILRTVKRANGGELKTGYLSIVMDPDELPLDEHCERLPYDASKWEFPRDRLKLGKPLGRGAFGQVIEADAFGIDKTATCRTVAVKMLKEGATHSEHRALMSELKILIHIGHHLNVVNLLGACTKPGGPLMVIVEFCKFGNLSTYLRSKRNEFVPYKTKGARFRQGKDYVGAIPVDLKRRLDSITSSQSSASSGFVEEKSLSDVEEEEAPEDLYKDFLTLEHLICYSFQVAKGMEFLASRKCIHRDLAARNILLSEKNVVKICDFGLARDIYKDPDYVRKGDARLPLKWMAPETIFDRVYTIQSDVWSFGVLLWEIFSLGASPYPGVKIDEEFCRRLKEGTRMRAPDYTTPEMYQTMLDCWHGEPSQRPTFSELVEHLGNLLQANAQQDGKDYIVLPISETLSMEEDSGLSLPTSPVSCMEEEEVCDPKFHYDNTAGISQYLQNSKRKSRPVSVKTFEDIPLEEPEVKVIPDDNQTDSGMVLASEELKTLEDRTKLSPSFGGMVPSKSRESVASEGSNQTSGYQSGYHSDDTDTTVYSSEEAELLKLIEIGVQTGSTAQILQPDSGTTLSSPPV

SEQ ID NO: 6754 - protein, 2209 aa, Homo sapiens
MWNDIELLTNDDTGSGYLSVGSRKEHGTALYQVDLLVKISSEKASLNPKIQACSLSDGFIIVADQSVILLDSICRSLQLHLVFDTEVDVVGLCQEGKFLLVGERSGNLHLIHVTSKQTLLTNAFVQKANDENRRTYQNLVIEKDGSNEGTYYMLLLTYSGFFCITNLQLLKIQQAIENVDFSTAKKLQGQIKSSFISTENYHTLGCLSLVAGDLASEVPVIIGGTGNCAFSKWEPDSSKKGMTVKNLIDAEIIKGAKKFQLIDNLLFVLDTDNVLSLWDIYTLTPVWNWPSLHVEEFLLTTEADSPSSVTWQGITNLKLIALTASANKKMKNLMVYSLPTMEILYSLEVSSVSSLVQTGISTDTIYLLEGVCKNDPKLSEDSVSVLVLRCLTEALPENRLSRLLHKHRFAEAESFAIQFGLDVELVYKVKSNHILEKLALSSVDASEQTEWQQLVDDAKENLHKIQDDEFVVNYCLKAQWITYETTQEMLNYAKTRLLKKEDKTALIYSDGLKEVLRAHAKLTTFYGAFGPEKFSGSSWIEFLNNEDDLKDIFLQLKEGNLVCAQYLWLRHRANFESRFDVKMLESLLNSMSASVSLQKLCPWFKNDVIPFVRRTVPEGQIILAKWLEQAARNLELTDKANWPENGLQLAEIFFTAEKTDELGLASSWHWISLKDYQNTEEVCQLRTLVNNLRELITLHRKYNCKLALSDFEKENTTTIVFRMFDKVLAPELIPSILEKFIRVYMREHDLQEEELLLLYIEDLLNRCSSKSTSLFETAWEAKAMAVIACLSDTDLIFDAVLKIMYAAVVPWSAAVEQLVKQHLEMDHPKVKLLQESYKLMEMKKLLRGYGIREVNLLNKEIMRVVRYILKQDVPSSLEDALKVAQAFMLSDDEIYSLRIIDLIDREQGEDCLLLLKSLPPAEAEKTAERVIIWARLALQEEPDHSKEGKAWRMSVAKTSVDILKILCDIQKDNLQKKDECEEMLKLFKEVASLQENFEVFLSFEDYSNSSLVADLREQHIKAHEVAQAKHKPGSTPEPIAAEVRSPSMESKLHRQALALQMSKQELEAELTLRALKDGNIKTALKKCSDLFKYHCNADTGKLLFLTCQKLCQMLADNVPVTVPVGLNLPSMIHDLASQAATICSPDFLLDALELCKHTLMAVELSRQCQMDDCGILMKASFGTHKDPYEEWSYSDFFSEDGIVLESQMVLPVIYELISSLVPLAESKRYPLESTSLPYCSLNEGDGLVLPVINSISALLQNLQESSQWELALRFVVGSFGTCLQHSVSNFMNATLSEKLFGETTLVKSRHVVMELKEKAVIFIRENATTLLHKVFNCRLVDLDLALGYCTLLPQKDVFENLWKLIDKAWQNYDKILAISLVGSELASLYQEIEMGLKFRELSTDAQWGIRLGKLGISFQPVFRQHFLTKKDLIKALVENIDMDTSLILEYCSTFQLDCDAVLQLFIETLLHNTNAGQGQGDASMDSAKRRHPKLLAKALEMVPLLTSTKDLVISLSGILHKLDPYDYEMIEVVLKVIERADEKITNININQALSILKHLKSYRRISPPVDLEYQYMLEHVITLPSAAQTRLPFHLIFFGTAQNFWKILSTELSEESFPTLLLISKLMKFSLDTLYVSTAKHVFEKKLKPKLLKLTQAKSSTLINKEITKITQTIESCLLSIVNPEWAVAIAISLAQDIPEGSFKISALKFCLYLAERWLQNIPSQDEKREKAEALLKKLHIQYRRSGTEAVLIAHKLNTEEYLRVIGKPAHLIVSLYEHPSINQRIQNSSGTDYPDIHAAAKEIAEVNEINLEKVWDMLLEKWLCPSTKPGEKPSELFELQEDEALRRVQYLLLSRPIDYSSRMLFVFATSTTTTLGMHQLTFAHRTRALQCLFYLADKETIESLFKKPIEEVKSYLRCITFLASFETLNIPITYELFCSSPKEGMIKGLWKNHSHESMAVRLVTELCLEYKIYDLQLWNGLLQKLLGFNMIPYLRKVLKAISSIHSLWQVPYFSKAWQRVIQIPLLSASCPLSPDQLSDCSESLIAVLECPVSGDLDLIGVARQYIQLELPAFALACLMLMPHSEKRHQQIKNFLGSCDPQVILKQLEEHMNTGQLAGFSHQIRSLILNNIINKKEFGILAKTKYFQMLKMHAMNTNNITELVNYLANDLSLDEASVLITEYSKHCGKPVPPDTAPCEILKMFLSGLS

SEQ ID NO: 6755 - protein, 443 aa, Homo sapiens
MLEHVITLPSAAQTRLPFHLIFFGTAQNFWKILSTELSEESFPTLLLISKLMKFSLDTLYVSTAKHVFEKKLKPKLLKLTQAKSSTLINKEITKITQTIESCLLSIVNPEWAVAIAISLAQDIPEGSFKISALKFCLYLAERWLQNIPSQDEKREKAEALLKKLHIQYRRSGTEAVLIAHKLNTEEYLRVIGKPAHLIVSLYEHPSINQRIQNSSGTDYPDIHAAAKEIAEVNEINLEKVWDMLLEKWLCPSTKPGEKPSELFELQEDEALRRVQYLLLSRPIDYSSRMLFVFATSTTTTLGMHQLTFAHRTRALQCLFYLADKETIESLFKKPIEEVKSYLRCITFLASFETLNIPITYELFCSSPKEGMIKGLWKNHSHESMAVRLVTELCLEYKIYDLQLWNGLLQKLLGFNMIPYLRKVLKAISSIHSLWQRWRSCYVA

SEQ ID NO: 6756 - protein, 138 aa, Homo sapiens
MNSLVSWQLLLFLCATHFGEPLEKVASVGNSRPTGQQLESLGLLAPGEQSLPCTERKPAATARLSRRGTSLSPPPESSGSPQQPGLSAPHSRQIPAPQGAVLVQREKDLPNYNWNSFGLRFGKREAAPGNHGRSAGRG

SEQ ID NO: 6757 - protein, 398 aa, Homo sapiens
MHTVATSGPNASWGAPANASGCPGCGANASDGPVPSPRAVDAWLVPLFFAALMLLGLVGNSLVIYVICRHKPMRTVTNFYIANLAATDVTFLLCCVPFTALLYPLPGWVLGDFMCKFVNYIQQVSVQATCATLTAMSVDRWYVTVFPLRALHRRTPRLALAVSLSIWVGSAAVSAPVLALHRLSPGPRAYCSEAFPSRALERAFALYNLLALYLLPLLATCACYAAMLRHLGRVAVRPAPADSALQGQVLAERAGAVRAKVSRLVAAVVLLFAACWGPIQLFLVLQALGPAGSWHPRSYAAYALKTWAHCMSYSNSALNPLLYAFLGSHFRQAFRRVCPCAPRRPRRPRRPGPSDPAAPHAELLRLGSHPAPARAQKPGSSGLAARGLCVLGEDNAPL

SEQ ID NO: 6758 - protein, 978 aa, Homo sapiens
MAHTTKVNGSASGKAGDILSGDQDKEQKDPYFVETPYGYQLDLDFLKYVDDIQKGNTIKRLNIQKRRKPSVPCPEPRTTSGQQGIWTSTESLSSSNSDDNKQCPNFLIARSQVTSTPISKPPPPLETSLPFLTIPENRQLPPPSPQLPKHNLHVTKTLMETRRRLEQERATMQMTPGEFRRPRLASFGGMGTTSSLPSFVGSGNHNPAKHQLQNGYQGNGDYGSYAPAAPTTSSMGSSIRHSPLSSGISTPVTNVSPMHLQHIREQMAIALKRLKELEEQVRTIPVLQVKISVLQEEKRQLVSQLKNQRAASQINVCGVRKRSYSAGNASQLEQLSRARRSGGELYIDYEEEEMETVEQSTQRIKEFRQLTADMQALEQKIQDSSCEASSELRENGECRSVAVGAEENMNDIVVYHRGSRSCKDAAVGTLVEMRNCGVSVTEAMLGVMTEADKEIELQQQTIESLKEKIYRLEVQLRETTHDREMTKLKQELQAAGSRKKVDKATMAQPLVFSKVVEAVVQTRDQMVGSHMDLVDTCVGTSVETNSVGISCQPECKNKVVGPELPMNWWIVKERVEMHDRCAGRSVEMCDKSVSVEVSVCETGSNTEESVNDLTLLKTNLNLKEVRSIGCGDCSVDVTVCSPKECASRGVNTEAVSQVEAAVMAVPRTADQDTSTDLEQVHQFTNTETATLIESCTNTCLSTLDKQTSTQTVETRTVAVGEGRVKDINSSTKTRSIGVGTLLSGHSGFDRPSAVKTKESGVGQININDNYLVGLKMRTIACGPPQLTVGLTASRRSVGVGDDPVGESLENPQPQAPLGMMTGLDHYIERIQKLLAEQQTLLAENYSELAEAFGEPHSQMGSLNSQLISTLSSINSVMKSASTEELRNPDFQKTSLGKITGNYLGYTCKCGGLQSGSPLSSQTSQPEQEVGTSEGKPISSLDAFPTQEGTLSPVNLTDDQIAAGLYGNFSHSQSLASGF

SEQ ID NO: 6759 - protein, 276 aa, Homo sapiens
MLSACNLLKNTINDPKALTSKDMRFCLNTLQHEWFRVSSQKSAIPAMVGDYIAAFEAISPDVLRYVINLADGNGNTALHYSVSHSNFEIVKLLLDADVCNVDHQNKAGYTPIMLAALAAVEAEKDMRIVEELFGCGDVNAKASQAGQTALMLAVSHGRIDMVKGLLACGADVNIQDDEGSTALMCASEHGHVEIVKLLLAQPGCNGHLEDNDGSTALSIALEAGHKDIAVLLYAHVNFAKAQSPVSVVHLAFVNRLKSTRLVDPLPPGIDGRQILC

SEQ ID NO: 6760 - protein, 330 aa, Homo sapiens
MAEGHHAVNIEGLKSARVEDEMQVQECEPEKVEIRERYELSEKMLSACNLLKNTINDPKALTSKDMGQVQWLTPMIPTLREADAGGSHERFCLNTLQHEWFRVSSQKSAIPAMVGDYIAAFEAISPDVLRYVINLADGNGNTALHYSVSHSNFEIVKLLLDADVCNVDHQNKAGYTPIMLAALAAVEAEKDMRIVEELFGCGDVNAKASQAGQTALMLAVSHGRIDMVKGLLACGADVNIQDDEGSTALMCASEHGHVEIVKLLLAQPGCNGHLEDNDGSTALSIALEAGHKDIAVLLYAHVNFAKAQSPGTPRLGRKTSPGPTHRGSFD

SEQ ID NO: 6761 - protein, 1194 aa, Homo sapiens
METRRRLEQERATMQMTPGEFRRPRLASFGGMGTTSSLPSFVGSGNHNPAKHQLQNGYQGNGDYGSYAPAAPTTSSMGSSIRHSPLSSGISTPVTNVSPMHLQHIREQMAIALKRLKELEEQVRTIPVLQVKISVLQEEKRQLVSQLKNQRAASQINVCGVRKRSYSAGNASQLEQLSRARRSGGELYIDYEEEEMETVEQSTQRIKEFRQLTADMQALEQKIQDSSCEASSELRENGECRSVAVGAEENMNDIVVYHRGSRSCKDAAVGTLVEMRNCGVSVTEAMLGVMTEADKEIELQQQTIESLKEKIYRLEVQLRETTHDREMTKLKQELQAAGSRKKVDKATMAQPLVFSKVVEAVVQTRDQMVGSHMDLVDTCVGTSVETNSVGISCQPECKNKVVGPELPMNWWIVKERVEMHDRCAGRSVEMCDKSVSVEVSVCETGSNTEESVNDLTLLKTNLNLKEVRSIGCGDCSVDVTVCSPKECASRGVNTEAVSQVEAAVMAVPRTADQDTSTDLEQVHQFTNTETATLIESCTNTCLSTLDKQTSTQTVETRTVAVGEGRVKDINSSTKTRSIGVGTLLSGHSGFDRPSAVKTKESGVGQININDNYLVGLKMRTIACGPPQLTVGLTASRRSVGVGDDPVGESLENPQPQAPLGMMTGLDHYIERIQKLLAEQQTLLAENYSELAEAFGEPHSQMGSLNSQLISTLSSINSVMKSASTEELRNPDFQKTSLGKITGNYLGYTCKCGGLQSGSPLSSQTSQPEQEVGTSEGKPISSLDAFPTQEGTLSPVNLTDDQIAAGLYACTNNESTLKSIMKKKDGNKDSNGAKKNLQFVGINGGYETTSSDDSSSDESSSSESDDECDVIEYPLEEEEEEEDEDTRGMAEGHHAVNIEGLKSARVEDEMQVQECEPEKVEIRERYELSEKMLSACNLLKNTINDPKALTSKDMRFCLNTLQHEWFRVSSQKSAIPAMVGDYIAAFEAISPDVLRYVINLADGNGNTALHYSVSHSNFEIVKLLLDADVCNVDHQNKAGYTPIMLAALAAVEAEKDMRIVEELFGCGDVNAKASQAGQTALMLAVSHGRIDMVKGLLACGADVNIQDDEGSTALMCASEHGHVEIVKLLLAQPGCNGHLEDNDGSTALSIALEAGHKDIAVLLYAHVNFAKAQSPGTPRLGRKTSPGPTHRGSFD

SEQ ID NO: 6762 - protein, 1352 aa, Homo sapiens
MAHTTKVNGSASGKAGDILSGDQDKEQKDPYFVETPYGYQLDLDFLKYVDDIQKGNTIKRLNIQKRRKPSVPCPEPRTTSGQQGIWTSTESLSSSNSDDNKQCPNFLIARSQVTSTPISKPPPPLETSLPFLTIPENRQLPPPSPQLPKHNLHVTKTLMETRRRLEQERATMQMTPGEFRRPRLASFGGMGTTSSLPSFVGSGNHNPAKHQLQNGYQGNGDYGSYAPAAPTTSSMGSSIRHSPLSSGISTPVTNVSPMHLQHIREQMAIALKRLKELEEQVRTIPVLQVKISVLQEEKRQLVSQLKNQRAASQINVCGVRKRSYSAGNASQLEQLSRARRSGGELYIDYEEEEMETVEQSTQRIKEFRQLTADMQALEQKIQDSSCEASSELRENGECRSVAVGAEENMNDIVVYHRGSRSCKDAAVGTLVEMRNCGVSVTEAMLGVMTEADKEIELQQQTIESLKEKIYRLEVQLRETTHDREMTKLKQELQAAGSRKKVDKATMAQPLVFSKVVEAVVQTRDQMVGSHMDLVDTCVGTSVETNSVGISCQPECKNKVVGPELPMNWWIVKERVEMHDRCAGRSVEMCDKSVSVEVSVCETGSNTEESVNDLTLLKTNLNLKEVRSIGCGDCSVDVTVCSPKECASRGVNTEAVSQVEAAVMAVPRTADQDTSTDLEQVHQFTNTETATLIESCTNTCLSTLDKQTSTQTVETRTVAVGEGRVKDINSSTKTRSIGVGTLLSGHSGFDRPSAVKTKESGVGQININDNYLVGLKMRTIACGPPQLTVGLTASRRSVGVGDDPVGESLENPQPQAPLGMMTGLDHYIERIQKLLAEQQTLLAENYSELAEAFGEPHSQMGSLNSQLISTLSSINSVMKSASTEELRNPDFQKTSLGKITGNYLGYTCKCGGLQSGSPLSSQTSQPEQEVGTSEGKPISSLDAFPTQEGTLSPVNLTDDQIAAGLYACTNNESTLKSIMKKKDGNKDSNGAKKNLQFVGINGGYETTSSDDSSSDESSSSESDDECDVIEYPLEEEEEEEDEDTRGMAEGHHAVNIEGLKSARVEDEMQVQECEPEKVEIRERYELSEKMLSACNLLKNTINDPKALTSKDMRFCLNTLQHEWFRVSSQKSAIPAMVGDYIAAFEAISPDVLRYVINLADGNGNTALHYSVSHSNFEIVKLLLDADVCNVDHQNKAGYTPIMLAALAAVEAEKDMRIVEELFGCGDVNAKASQAGQTALMLAVSHGRIDMVKGLLACGADVNIQDDEGSTALMCASEHGHVEIVKLLLAQPGCNGHLEDNDGSTALSIALEAGHKDIAVLLYAHVNFAKAQSPGTPRLGRKTSPGPTHRGSFD

SEQ ID NO: 6763 - protein, 1352 aa, Homo sapiens; identical to SEQ ID NO: 6762

SEQ ID NO: 6764 - protein, 398 aa, Homo sapiens
MKKKDGNKDSNGAKKNLQFVGINGGYETTSSDDSSSDESSSSESDDECDVIEYPLEEEEEEEDEDTRGMAEGHHAVNIEGLKSARVEDEMQVQECEPEKVEIRERYELSEKMLSACNLLKNTINDPKALTSKDMGQVQWLTPMIPTLREADAGGSHERFCLNTLQHEWFRVSSQKSAIPAMVGDYIAAFEAISPDVLRYVINLADGNGNTALHYSVSHSNFEIVKLLLDADVCNVDHQNKAGYTPIMLAALAAVEAEKDMRIVEELFGCGDVNAKASQAGQTALMLAVSHGRIDMVKGLLACGADVNIQDDEGSTALMCASEHGHVEIVKLLLAQPGCNGHLEDNDGSTALSIALEAGHKDIAVLLYAHVNFAKAQSPGTPRLGRKTSPGPTHRGSFD

SEQ ID NO: 6765 - protein, 736 aa, Homo sapiens
MGNPENIEDAYVAVIRPKNTASLNSREYRAKSYEILLHEVPIEGQKKKRKKVLLETKLQGNSEITQGILDYVVETTKPISPANQGIRGKRVVLMKKFPLDGEKMGREASLFIVPSVVKDNTKYTYTPGCPIFYCLQDIMRVCSESSTHFATLTARMLIALDKWLDERHAQSHFIPALFRPSPLERIKTNVINPAYATESGQTENSLHMGYSALEIKSKMLALEKADTCIYNPLFGSDLQYTNRVDKVVINPYFGLGAPDYSKIQIPKQEKWQRSMSSVTEDKERQWVDDFPLHRSACEGDSELLSRLLSERFSVNQLDSDHWAPIHYACWYGKVEATRILLEKGKCNPNLLNGQLSSPLHFAAGGGHAEIVQILLNHPETDRHITDQQGRSPLNICEENKQNNWEEAAKLLKEAINKPYEKVRIYRMDGSYRSVELKHGNNTTVQQIMEGMRLSQETQQYFTIWICSENLSLQLKPYHKPLQHVRDWPEILAELTNLDPQRETPQLFLRRDVRLPLEVEKQIEDPLAILILFDEARYNLLKGFYTAPDAKLITLASLLLQIVYGNYESKKHKQGFLNEENLKSIVPVTKLKSKAPHWTNRILHEYKNLSTSEGVSKEMHHLQRMFLQNCWEIPTYGAAFFTGQIFTKASPSNHKVIPVYVGVNIKGLHLLNMETKALLISLKYGCFMWQLGDTDTCFQIHSMENKMSFIVHTKQAGLVVKLLMKLNGQLMPTERNS

SEQ ID NO: 6766 - protein, 688 aa, Homo sapiens
MGNPENIEDAYVAVIRPKNTASLNSREYRAKSYEILLHEVPIEGQKKKRKKVLLETKLQGNSEITQGILDYVVETTKPISPANQGIRGKRVVLMKKFPLDGEKMGREASLFIVPSVVKDNTKYTYTPGCPIFYCLQDIMRVCSESSTHFATLTARMLIALDKWLDERHAQSHFIPALFRPSPLERIKTNVINPAYATESGQTENSLHMGYSALEIKSKMLALEKADTCIYNPLFGSDLQYTNRVDKVVINPYFGLGAPDYSKIQIPKQEKWQRSMSSVTEDKYGKVEATRILLEKGKCNPNLLNGQLSSPLHFAAGGGHAEIVQILLNHPETDRHITDQQGRSPLNICEENKQNNWEEAAKLLKEAINKPYEKVRIYRMDGSYRSVELKHGNNTTVQQIMEGMRLSQETQQYFTIWICSENLSLQLKPYHKPLQHVRDWPEILAELTNLDPQRETPQLFLRRDVRLPLEVEKQIEDPLAILILFDEARYNLLKGFYTAPDAKLITLASLLLQIVYGNYESKKHKQGFLNEENLKSIVPVTKLKSKAPHWTNRILHEYKNLSTSEGVSKEMHHLQRMFLQNCWEIPTYGAAFFTGQIFTKASPSNHKVIPVYVGVNIKGLHLLNMETKALLISLKYGCFMWQLGDTDTCFQIHSMENKMSFIVHTKQAGLVVKLLMKLNGQLMPTERNS

SEQ ID NO: 6767 - protein, 736 aa, Homo sapiens; identical to SEQ ID NO: 6765

SEQ ID NO: 6768 - protein, 736 aa, Homo sapiens; identical to SEQ ID NO: 6765

SEQ ID NO: 6769 - protein, 736 aa, Homo sapiens; identical to SEQ ID NO: 6765

SEQ ID NO: 6770 - protein, 69 aa, Homo sapiens
MGNPENIEDAYVAVIRPKNTASLNSREYRAKSYEILLHEVPIEGQKKKRKKVLLETKLQGNSEITQGIL

SEQ ID NO: 6771 - protein, 565 aa, Homo sapiens
MGNPENIEDAYVAVIRPKNTASLNSREYRAKSYEILLHEVPIEGQKKKRKKVLLETKLQGNSEITQGILDYVVETTKPISPANQGIRGKRVVLMKKFPLDGEKMGREASLFIVPSVVKDNTKYTYTPGCPIFYCLQDIMRVCSESSTHFATLTARMLIALDKWLDERHAQSHFIPALFRPSPLERIKTNVINPAYATESGQTENSLHMGYSALEIKSKMLALEKADTCIYNPLFGSDLQYTNRVDKVVINPYFGLGAPDYSKIQIPKQEKWQRSMSSVTEDKERQWVDDFPLHRSACEGDSELLSRLLSERFSVNQLDSDHWAPIHYACWYGKVEATRILLEKGKCNPNLLNGQLSSPLHFAAGGGHAEIVQILLNHPETDRHITDQQGRSPLNICEENKQNNWEEAAKLLKEAINKPYEKVRIYRMDGSYRSVELKHGNNTTVQQIMEGMRLSQETQQYFTIWICSENLSLQLKPYHKPLQHVRDWPEILAELTNLDPQRETPQLFLRRDVRLPLEVEKQIEDPLAILILFDEARYNLLKGFYTAPDAKLITLASLLLQSLWKL

SEQ ID NO: 6772 - protein, 25 aa, Homo sapiens
MGNPENIEDAYVAVIRPKNTASLNS

SEQ ID NO: 6773 - protein, 12 aa, Homo sapiens
MGNPENIEDAYV

SEQ ID NO: 6774 - protein, 38 aa, Homo sapiens
MGNPENIEDAYVAVIRPKNTASLNSREYRAKSYEILLH

SEQ ID NO: 6775 - protein, 98 aa, Homo sapiens
MGNPENIEDAYVAVIRPKNTASLNSREYRAKSYEILLHEVPIEGQKKKRKKVLLETKLQGNSEITQGILDYVVETTKPISPANQGIRGKRVVLMKKFP

SEQ ID NO: 6776 - protein, 184 aa, Homo sapiens
MGNPENIEDAYVAVIRPKNTASLNSREYRAKSYEILLHEVPIEGQKKKRKKVLLETKLQGNSEITQGILDYVVETTKPISPANQGIRGKRVVLMKKFPLDGEKMGREASLFIVPSVVKDNTKYTYTPGCPIFYCLQDIMRVCSESSTHFATLTARMLIALDKWLDERHAQSHFIPALFRPSPLE

SEQ ID NO: 6777 - protein, 112 aa, Homo sapiens
MGNPENIEDAYVAVIRPKNTASLNSREYRAKSYEILLHEVPIEGQKKKRKKVLLETKLQGNSEITQGILDYVVETTKPISPANQGIRGKRVVLMKKFPLDGEKMGREASLFI

SEQ ID NO: 6778 - protein, 34 aa, Homo sapiens
MGNPENIEDAYVAVIRPKNTASLNSREYRAKSYE

SEQ ID NO: 6779 - protein, 58 aa, Homo sapiens
MGNPENIEDAYVAVIRPKNTASLNSREYRAKSYEILLHEVPIEGQKKKRKKVLLETKL

SEQ ID NO: 6780 - protein, 162 aa, Homo sapiens
MGNPENIEDAYVAVIRPKNTASLNSREYRAKSYEILLHEVPIEGQKKKRKKVLLETKLQGNSEITQGILDYVVETTKPISPANQGIRGKRVVLMKKFPLDGEKMGREASLFIVPSVVKDNTKYTYTPGCPIFYCLQDIMRVCSESSTHFATLTARMLIALDK

SEQ ID NO: 6781 - protein, 243 aa, Homo sapiens
MGNPENIEDAYVAVIRPKNTASLNSREYRAKSYEILLHEVPIEGQKKKRKKVLLETKLQGNSEITQGILDYVVETTKPISPANQGIRGKRVVLMKKFPLDGEKMGREASLFIVPSVVKDNTKYTYTPGCPIFYCLQDIMRVCSESSTHFATLTARMLIALDKWLDERHAQSHFIPALFRPSPLERIKTNVINPAYATESGQTENSLHMGYSALEIKSKMLALEKADTCIYNPLFGSDLQYTNR

SEQ ID NO: 6782 - protein, 65 aa, Homo sapiens
MGNPENIEDAYVAVIRPKNTASLNSREYRAKSYEILLHEVPIEGQKKKRKKVLLETKLQGNSEIT

SEQ ID NO: 6783 - protein, 362 aa, Homo sapiens
MATAETALPSISTLTALGPFPDTQDDFLKWWRSEEAQDMGPGPPDPTEPPLHVKSEDQPGEEEDDERGADATWDLDLLLTNFSGPEPGGAPQTCALAPSEASGAQYPPPPETLGAYAGGPGLVAGLLGSEDHSGWVRPALRARAPDAFVGPALAPAPAPEPKALALQPVYPGPGAGSSGGYFPRTGLSVPAASGAPYGLLSGYPAMYPAPQYQGHFQLFRGLQGPAPGPATSPSFLSCLGPGTVGTGLGGTAEDPGVIAETAPSKRGRRSWARKRQAAHTCAHPGCGKSYTKSSHLKAHLRTHTGEKPYACTWEGCGWRFARSDELTRHYRKHTGQRPFRCQLCPRAFSRSDHLALHMKRHL

SEQ ID NO: 6784 - protein, 332 aa, Homo sapiens
MATLKDQLIYNLLKEEQTPQNKITVVGVGAVGMACAISILMKDLADELALVDVIEDKLKGEMMDLQHGSLFLRTPKIVSGKDYNVTANSKLVIITAGARQQEGESRLNLVQRNVNIFKFIIPNVVKYSPNCKLLIVSNPVDILTYVAWKISGFPKNRVIGSGCNLDSARFRYLMGERLGVHPLSCHGWVLGEHGDSSVPVWSGMNVAGVSLKTLHPDLGTDKDKEQWKEVHKQVVESAYEVIKLKGYTSWAIGLSVADLAESIMKNLRRVHPVSTMIKGLYGIKDDVFLSVPCILGQNGISDLVKVTLTSEEEARLKKSADTLWGIQKELQF

SEQ ID NO: 6785 - protein, 274 aa, Homo sapiens
MATLKDQLIYNLLKEEQTPQNKITVVGVGAVGMACAISILMKDLADELALVDVIEDKLKGEMMDLQHGSLFLRTPKIVSGKDYNVTANSKLVIITAGARQQEGESRLNLVQRNVNIFKFIIPNVVKYSPNCKLLIVSNPVDILTYVAWKISGFPKNRVIGSGCNLDSARFRYLMGERLGVHPLSCHGWVLGEHGDSSVPVWSGMNVAGVSLKTLHPDLGTDKDKEQWKECRYTLGDPKGAAILKSSDVISFHCLGYNRILGGGCACCPFYLICD

SEQ ID NO: 6786 - protein, 332 aa, Homo sapiens; identical to SEQ ID NO: 6784

SEQ ID NO: 6787 - protein, 274 aa, Homo sapiens
MATLKDQLIYNLLKEEQTPQNKITVVGVGAVGMACAISILMKDLADELALVDVIEDKLKGEMMDLQHGSLFLRTPKIVSGKVDILTYVAWKISGFPKNRVIGSGCNLDSARFRYLMGERLGVHPLSCHGWVLGEHGDSSVPVWSGMNVAGVSLKTLHPDLGTDKDKEQWKEVHKQVVESAYEVIKLKGYTSWAIGLSVADLAESIMKNLRRVHPVSTMIKGLYGIKDDVFLSVPCILGQNGISDLVKVTLTSEEEARLKKSADTLWGIQKELQF

SEQ ID NO: 6788 - protein, 305 aa, Homo sapiens
MATLKDQLIYNLLKEEQTPQNKITVVGVGAVGMACAISILMKDLADELAIVSGKDYNVTANSKLVIITAGARQQEGESRLNLVQRNVNIFKFIIPNVVKYSPNCKLLIVSNPVDILTYVAWKISGFPKNRVIGSGCNLDSARFRYLMGERLGVHPLSCHGWVLGEHGDSSVPVWSGMNVAGVSLKTLHPDLGTDKDKEQWKEVHKQVVESAYEVIKLKGYTSWAIGLSVADLAESIMKNLRRVHPVSTMIKGLYGIKDDVFLSVPCILGQNGISDLVKVTLTSEEEARLKKSADTLWGIQKELQF

SEQ ID NO: 6789 - protein, 144 aa, Homo sapiens
MATLKDQLIYNLLKEEQTPQNKITVVGVGAVGMACAISILMKDLADELALVDVIEDKLKGEMMDLQHGSLFLRTPKIVSGKDYNVTANSKLVIITAGARQQEGESRLNLVQRNVNIFKFIIPNVVKYSPNCKLLIVSNPGEAFD

SEQ ID NO: 6790 - protein, 114 aa, Homo sapiens
MATLKDQLIYNLLKEEQTPQNKITVVGVGAVGMACAISILMKDLADELALVDVIEDKLKGEMMDLQHGSLFLRTPKIVSGKDYNVTANSKLVIITAGARQQEGESRLNLVQRNV

SEQ ID NO: 6791 - protein, 72 aa, Homo sapiens
MATLKDQLIYNLLKEEQTPQNKITVVGVGAVGMACAISILMKDLADELALVDVIEDKLKGEMMDLQHGSLFL

SEQ ID NO: 6792 - protein, 361 aa, Homo sapiens
MGEPSGGYTYTQTSIFLFHAKIPFGSKSNMATLKDQLIYNLLKEEQTPQNKITVVGVGAVGMACAISILMKDLADELALVDVIEDKLKGEMMDLQHGSLFLRTPKIVSGKDYNVTANSKLVIITAGARQQEGESRLNLVQRNVNIFKFIIPNVVKYSPNCKLLIVSNPVDILTYVAWKISGFPKNRVIGSGCNLDSARFRYLMGERLGVHPLSCHGWVLGEHGDSSVPVWSGMNVAGVSLKTLHPDLGTDKDKEQWKEVHKQVVESAYEVIKLKGYTSWAIGLSVADLAESIMKNLRRVHPVSTMIKGLYGIKDDVFLSVPCILGQNGISDLVKVTLTSEEEARLKKSADTLWGIQKELQF

SEQ ID NO: 6793 - protein, 332 aa, Homo sapiens; identical to SEQ ID NO: 6784

SEQ ID NO: 6794 - protein, 157 aa, Homo sapiens
MATLKDQLIYNLLKEEQTPQNKITVVGVGAVGMACAISILMKDLADELALVDVIEDKLKGEMMDLQHGSLFLRTPKIVSGKDYNVTANSKLVIITAGARQQEGESRLNLVQRNVNIFKFIIPNVVKYSPNCKLLIVSNPVDILTYVAWKISGFPKNR

SEQ ID NO: 6795 - protein, 241 aa, Homo sapiens
MATLKDQLIYNLLKEEQTPQNKITVVGVGAVGMACAISILMKDLADELALVDVIEDKLKGEMMDLQHGSLFLRTPKIVSGKDYNVTANSKLVIITAGARQQEGESRLNLVQRNVNIFKFIIPNVVKYSPNCKLLIVSNPVDILTYVAWKISGFPKNRVIGSGCNLDSARFRYLMGERLGVHPLSCHGWVLGEHGDSSVPVWSGMNVAGVSLKTLHPDLGTDKDKEQWKEVHKQVVERVFTE

SEQ ID NO: 6796 - protein, 1130 aa, Homo sapiens
MKRSEKPEGYRQMRPKTFPASNYTVSSRQMLQEIRESLRNLSKPSDAAKAEHNMSKMSTEDPRQVRNPPKFGTHHKALQEIRNSLLPFANETNSSRSTSEVNPQMLQDLQAAGFDEDMVIQALQKTNNRSIEAAIEFISKMSYQDPRREQMAAAAARPINASMKPGNVQQSVNRKQSWKGSKESLVPQRHGPPLGESVAYHSESPNSQTDVGRPLSGSGISAFVQAHPSNGQRVNPPPPPQVRSVTPPPPPRGQTPPPRGTTPPPPSWEPNSQTKRYSGNMEYVISRISPVPPGAWQEGYPPPPLNTSPMNPPNQGQRGISSVPVGRQPIIMQSSSKFNFPSGRPGMQNGTGQTDFMIHQNVVPAGTVNRQPPPPYPLTAANGQSPSALQTGGSAAPSSYTNGSIPQSMMVPNRNSHNMELYNISVPGLQTNWPQSSSAPAQSSPSSGHEIPTWQPNIPVRSNSFNNPLGNRASHSANSQPSATTVTAITPAPIQQPVKSMRVLKPELQTALAPTHPSWIPQPIQTVQPSPFPEGTASNVTVMPPVAEAPNYQGPPPPYPKHLLHQNPSVPPYESISKPSKEDQPSLPKEDESEKSYENVDSGDKEKKQITTSPITVRKNKKDEERRESRIQSYSPQAFKFFMEQHVENVLKSHQQRLHRKKQLENEMMRVGLSQDAQDQMRKMLCQKESNYIRLKRAKMDKSMFVKIKTLGIGAFGEVCLARKVDTKALYATKTLRKKDVLLRNQVAHVKAERDILAEADNEWVVRLYYSFQDKDNLYFVMDYIPGGDMMSLLIRMGIFPESLARFYIAELTCAVESVHKMGFIHRDIKPDNILIDRDGHIKLTDFGLCTGFRWTHDSKYYQSGDHPRQDSMDFSNEWGDPSSCRCGDRLKPLERRAARQHQRCLAHSLVGTPNYIAPEVLLRTGYTQLCDWWSVGVILFEMLVGQPPFLAQTPLETQMKVINWQTSLHIPPQAKLSPEASDLIIKLCRGPEDRLGKNGADEIKAHPFFKTIDFSSDLRQQSASYIPKITHPTDTSNFDPVDPDKLWSDDNEEENVNDTLNGWYKNGKHPEHAFYEFTFRRFFDDNGYPYNYPKPIEYEYINSQGSEQQSDEDDQNTGSEIKNRDLVYV

SEQ ID NO: 6797 - protein, 690 aa, Homo sapiens
MKRSEKPEGYRQMRPKTFPASNYTVSSRQMLQEIRESLRNLSKPSDAAKAEHNMSKMSTEDPRQVRNPPKFGTHHKALQEIRNSLLPFANETNSSRSTSEVNPQMLQDLQAAGFDEDMVIQALQKTNNRSIEAAIEFISKMSYQDPRREQMAAAAARPINASMKPGNVQQSVNRKQSWKGSKESLVPQRHGPPLGESVAYHSESPNSQTDVGRPLSGSGISAFVQAHPSNGQRVNPPPPPQVRSVTPPPPPRGQTPPPRGTTPPPPSWEPNSQTKRYSGNMEYVISRISPVPPGAWQEGYPPPPLNTSPMNPPNQGQRGISSVPVGRQPIIMQSSSKFNFPSGRPGMQNGTGQTDFMIHQNVVPAGTVNRQPPPPYPLTAANGQSPSALQTGGSAAPSSYTNGSIPQSMMVPNRNSHNMELYNISVPGLQTNWPQSSSAPAQSSPSSGHEIPTWQPNIPVRSNSFNNPLGNRASHSANSQPSATTVTAITPAPIQQPVKSMRVLKPELQTALAPTHPSWIPQPIQTVQPSPFPEGTASNVTVMPPVAEAPNYQGPPPPYPKHLLHQNPSVPPYESISKPSKEDQPSLPKEDESEKSYENVDSGDKEKKQITTSPITVRKNKKDEERRESRIQSYSPQAFKFFMEQHVENVLKSHQQRLHRKKQLENEMMRVKPFKMSIFILNHLFAWCLF

SEQ ID NO: 6798 - protein, 1130 aa, Homo sapiens; identical to SEQ ID NO: 6796

SEQ ID NO: 6799 - protein, 1088 aa, Homo sapiens
MRPKTFPATTYSGNSRQRLQEIREGLKQPSKSSVQGLPAGPNSDTSLDAKVLGSKDATRQQQQMRATPKFGPYQKALREIRYSLLPFANESGTSAAAEVNRQMLQELVNAGCDQEMAGRALKQTGSRSIEAALEYISKMGYLDPRNEQIVRVIKQTSPGKGLMPTPVTRRPSFEGTGDSFASYHQLSGTPYEGPSFGADGPTALEEMPRPYVDYLFPGVGPHGPGHQHQHPPKGYGASVEAAGAHFPLQGAHYGRPHLLVPGEPLGYGVQRSPSFQSKTPPETGGYASLPTKGQGGPPGAGLAFPPPAAGLYVPHPHHKQAGPAAHQLHVLGSRSQVFASDSPPQSLLTPSRNSLNVDLYELGSTSVQQWPAATLARRDSLQKPGLEAPPRAHVAFRPDCPVPSRTNSFNSHQPRPGPPGKAEPSLPAPNTVTAVTAAHILHPVKSVRVLRPEPQTAVGPSHPAWVPAPAPAPAPAPAPAAEGLDAKEEHALALGGAGAFPLDVEYGGPDRRCPPPPYPKHLLLRSKSEQYDLDSLCAGMEQSLRAGPNEPEGGDKSRKSAKGDKGGKDKKQIQTSPVPVRKNSRDEEKRESRIKSYSPYAFKFFMEQHVENVIKTYQQKVNRRLQLEQEMAKAGLCEAEQEQMRKILYQKESNYNRLKRAKMDKSMFVKIKTLGIGAFGEVCLACKVDTHALYAMKTLRKKDVLNRNQVAHVKAERDILAEADNEWVVKLYYSFQDKDSLYFVMDYIPGGDMMSLLIRMEVFPEHLARFYIAELTLAIESVHKMGFIHRDIKPDNILIDLDGHIKLTDFGLCTGFRWTHNSKYYQKGSHVRQDSMEPSDLWDDVSNCRCGDRLKTLEQRARKQHQRCLAHSLVGTPNYIAPEVLLRKGYTQLCDWWSVGVILFEMLVGQPPFLAPTPTETQLKVINWENTLHIPAQVKLSPEARDLITKLCCSADHRLGRNGADDLKAHPFFSAIDFSSDIRKQPAPYVPTISHPMDTSNFDPVDEESPWNDASEGSTKAWDTLTSPNNKHPEHAFYEFTFRRFFDDNGYPFRCPKPSGAEASQAESSDLESSDLVDQTEGCQPVYV

SEQ ID NO: 6800 - protein, 1088 aa, Homo sapiens; identical to SEQ ID NO: 6799

SEQ ID NO: 6801 - protein, 323 aa, Homo sapiens
MAYVPAPGYQPTYNPTLPYYQPIPGGLNVGMSVYIQGVASEHMKRFFVNFVVGQDPGSDVAFHFNPRFDGWDKVVFNTLQGGKWGSEERKRSMPFKKGAAFELVFIVLAEHYKVVVNGNPFYEYGHRLPLQMVTHLQVDGDLQLQSINFIGGQPLRPQGPPMMPPYPGPGHCHQQLNSLPTMEGPPTFNPPVPYFGRLQGGLTARRTIIIKGYVPPTGKSFAINFKVGSSGDIALHINPRMGNGTVVRNSLLNGSWGSEEKKITHNPFGPGQFFDLSIRCGLDRFKVYANGQHLFDFAHRLSAFQRVDTLEIQGDVTLSYVQI

SEQ ID NO: 6802 - protein, 509 aa, Homo sapiens
MNNEEDLLQEDSTRDEGNETEANSMNTLRRTRKKVTKPYVCSTEVGETDMSNSNDCMRDSSQILTPPQLSSRMKHIRQAMAKNRLQFVRFEATDLHGVSRSKTIPAHFFQEKVSHGVCMPRGYLEVIPNPKDNEMNNIRATCFNSDIVLMPELSTFRVLPWADRTARVICDTFTVTGEPLLTSPRYIAKRQLSHLQASGFSLLSAFIYDFCIFGVPEILNSKIISFPALTFLNNHDQPFMQELVDGLYHTGANVESFSSSTRPGQMEISFLPEFGISSADNAFTLRTGVKEVARKYNYIASFFIETGFCDSGILSHSLWDVDRKKNMFCSTSGTEQLTITGKKWLAGLLKHSAALSCLMAPSVSCRKRYSKDRKDLKKSVPTTWGYNDNSCIFNIKCHGEKGTRIENKLGSATANPYLVLAATVAAGLDGLHSSNEVLAGPDESTDFYQVEPSEIPLKLEDALVALEEDQCLRQALGETFIRYFVAMKKYELENEEIAAERNKFLEYFI

SEQ ID NO: 6803 - protein, 208 aa, Homo sapiens
MNNEEDLLQEDSTRDEGNETEANSMNTLRRTRKKVTKPYVCSTEVGETDMSNSNDCMRDSSQILTPPQLSSRMKHIRQAMAKNRLQFVRFEATDLHGVSRSKTIPAHFFQEKVSHGVCMPRGYLEVIPNPKDNEMNNIRATCFNSDIVLMPELSTFRVLPWADRTARVICDTFTVTVSGMSIGRKTCSAALLELSSSRSLGKNGWQDS

SEQ ID NO: 6804 - protein, 167 aa, Homo sapiens
MHWGTLCGFLWLWPYLFYVQAVPIQKVQDDTKTLIKTIVTRINDISHTQSVSSKQKVTGLDFIPGLHPILTLSKMDQTLAVYQQILTSMPSRNVIQISNDLENLRDLLHVLAFSKSCHLPWASGLETLDSLGGVLEASGYSTEVVALSRLQGSLQDMLWQLDLSPGC

SEQ ID NO: 6805 - protein, 596 aa, Homo sapiens
MGSVSSLISGHSFHSKHCRASQYKLRKSSHLKKLNRYSDGLLRFGFSQDSGHGKSSSKMGKSEDFFYIKVSQKARGSHHPDYTALSSGDLGGQAGVDFDPSTPPKLMPFSNQLEMGSEKGAVRPTAFKPVLPRSGAILHSSPESASHQLHPAPPDKPKEQELKPGLCSGALSDSGRNSMSSLPTHSTSSSYQLDPLVTPVGPTSRFGGSAHNITQGIVLQDSNMMSLKALSFSDGGSKLGHSNKADKGPSCVRSPISTDECSIQELEQKLLEREGALQKLQRSFEEKELASSLAYEERPRRCRDELEGPEPKGGNKLKQASQKSQRAQQVLHLQVLQLQQEKRQLRQELESLMKEQDLLETKLRSYEREKTSFGPALEETQWEVCQKSGEISLLKQQLKESQTEVNAKASEILGLKAQLKDTRGKLEGLELRTQDLEGALRTKGLELEVCENELQRKKNEAELLREKVNLLEQELQELRAQAALARDMGPPTFPEDVPALQRELERLRAELREERQGHDQMSSGFQHERLVWKEEKEKVIQYQKQLQQSYVAMYQRNQRLEKALQQLARGDSAGEPLEVDLEGADIPYEDIIATEI

SEQ ID NO: 6806 - protein, 76 aa, Homo sapiens
MGSVSSLISGHSFHSKHCRASQYKLRKSSHLKKLNRYSDGLLRFGFSQDSGHGKAMTRCPRASSMSGSCGRRRRRR

SEQ ID NO: 6807 - protein, 573 aa, Homo sapiens
MGSVSSLISGHSFHSKHCRASQYKLRKSSHLKKLNRYSDGLLRFGFSQDSGHGKSSSKMGKSEDFFYIKVSQKARGSHHPDYTALSSGDLGGQAGVDFDPSTPPKLMPFSNQLEMGSEKGAVRPTAFKPVLPRSGAILHSSPESASHQLHPAPPDKPKEQELKPGLCSGALSDSGRNSMSSLPTHSTSSSYQLDPLVTPVGPTSRFGGSAHNITQGIVLQDSNMMSLKALSFSDGGSKLGHSNKADKGPSCVRSPISTDECSIQELEQKLLEREGALQKLQRSFEEKELASSLAYEERPRRCRDELEGPEPKGGNKLKQASQKSQRAQQVLHLQVLQLQQEKRQLRQELESLMKEQDLLETKLRSYEREKTSFGPALEETQWEVCQKSGEISLLKQQLKESQTEVNAKASEILGLKAQLKDTRGKLEGLELRTQDLEGALRTKGLELEVCENELQRKKNEAELLREKVNLLEQELQELRAQAALARDMGPPTFPEDVPALQRELERLVWKEEKEKVIQYQKQLQQSYVAMYQRNQRLEKALQQLARGDSAGEPLEVDLEGADIPYEDIIATEI

SEQ ID NO: 6808 - protein, 596 aa, Homo sapiens; identical to SEQ ID NO: 6805

SEQ ID NO: 6809 - protein, 537 aa, Homo sapiens
MGSVSSLISGHSFHSKHCRASQYKLRKSSHLKKLNRYSDGLLRFGFSQDSGHGKSSSKMGKSEDFFYIKVSQKARGSHHPDYTALSSGDLGGQAGVDFDPSTPPKLMPFSNQLEMGSEKGAVRPTAFKPVLPRSGAILHSSPESASHQLHPAPPDKPKEQELKPGLCSGALSDSGRNSMSSLPTHSTSSSYQLDPLVTPVGPTSRFGGSAHNITQGIVLQDSNMMSLKALSFSDGGSKLGHSNKADKGPSCVRSPISTDECSIQELEQKLLEREGALQKLQRSFEEKELASSLAYEERPRRCRDELEGPEPKGGNKLKQASQKSQRAQQVLHLQVLQLQQEKRQLRQELESLMKEQDLLETKLRSYEREKTSFGPALEETQWEVCQKSGEISLLKQQLKESQTEVNAKASEILGLKAQLKDTRGKLEGLELRTQDLEGALRTKGLELEVCENELQRKKNEAELLREKHERLVWKEEKEKVIQYQKQLQQSYVAMYQRNQRLEKALQQLARGDSAGEPLEVDLEGADIPYEDIIATEI

SEQ ID NO: 6810 - protein, 334 aa, Homo sapiens
MTENSDKVPIALVGPDDVEFCSPPAYATLTVKPSSPARLLKVGAVVLISGAVLLLFGAIGAFYFWKGSDSHIYNVHYTMSINGKLQDGSMEIDAGNNLETFKMGSGAEEAIAVNDFQNGITGIRFAGGEKCYIKAQVKARIPEVGAVTKQSISSKLEGKIMPVKYEENSLIWVAVDQPVKDNSFLSSKVLELCGDLPIFWLKPTYPKEIQRERREVVRKIVPTTTKRPHSGPRSNPGAGRLNNETRPSVQEDSQAFNPDNPYHQQEGESMTFDPRLDHEGICCIECRRSYTHCQKICEPLGGYYPWPYNYQGCRSACRVIMPCSWWVARILGMV

SEQ ID NO: 6811 - protein, 129 aa, Homo sapiens
MSINGKLQDGSMEIDAGNNLETFKMGSGAEEAIAVNDFQNGITGIRFAGGEKCYIKAQVKARIPEVGAVTKQSISSKLEGKIMPVKYEENSLIWVAVDQPVKDNSFLSSKVLELCGDLPIFWLKPTYPK

SEQ ID NO: 6812 - protein, 333 aa, Homo sapiens
MTENSDKVPIALVGPDDVEFCSPPAYATLTVKPSSPARLLKVGAVVLISGAVLLLFGAIGAFYFWKGSDSHIYNVHYTMSINGKLQDGSMEIDAGNNLETFKMGSGAEEAIAVNDFQNGITGIRFAGGEKCYIKAQVKARIPEVGAVTKQSISSKLEGKIMPVKYEENSLIWVAVDQPVKDNSFLSSKVLELCGDLPIFWLKPTYPKEIQRERREVVRKIVPTTTKRPHSGPRSNPGAGRLNNETRPSVQEDSQAFNPDNPYHQEGESMTFDPRLDHEGICCIECRRSYTHCQKICEPLGGYYPWPYNYQGCRSACRVIMPCSWWVARILGMV

SEQ ID NO: 6813 - protein, 135 aa, Homo sapiens
MNEVIIYNVLLLRTISCISETYGHYLIHCPSKISPELLKKESITNSYAHFQIYNVHYTMSINGKLQDGSMEIDAGNNLETFKMGSGAEEAIAVNDFQNVSIFHAFREFNQASLRDFSNSRRSSVSHTHPNGNCSL

SEQ ID NO: 6814 - protein, 919 aa, Homo sapiens
MQRSIMSFFHPKKEGKAKKPEKEASNSSRETEPPPKAALKEWNGVVSESDSPVKRPGRKAARVLGSEGEEEDEALSPAKGQKPALDCSQVSPPRPATSPENNASLSDTSPMDSSPSGIPKRRTARKQLPKRTIQEVLEEQSEDEDREAKRKKEEEEEETPKESLTEAEVATEKEGEDGDQPTTPPKPLKTSKAETPTESVSEPEVATKQELQEEEEQTKPPRRAPKTLSSFFTPRKPAVKKEVKEEEPGAPGKEGAAEGPLDPSGYNPAKNNYHPVEDACWKPGQKVPYLAVARTFEKIEEVSARLRMVETLSNLLRSVVALSPPDLLPVLYLSLNHLGPPQQGLELGVGDGVLLKAVAQATGRQLESVRAEAAEKGDVGLVAENSRSTQRLMLPPPPLTASGVFSKFRDIARLTGSASTAKKIDIIKGLFVACRHSEARFIARSLSGRLRLGLAEQSVLAALSQAVSLTPPGQEFPPAMVDAGKGKTAEARKTWLEEQGMILKQTFCEVPDLDRIIPVLLEHGLERLPEHCKLSPGIPLKPMLAHPTRGISEVLKRFEEAAFTCEYKYDGQRAQIHALEGGEVKIFSRNQEDNTGKYPDIISRIPKIKLPSVTSFILDTEAVAWDREKKQIQPFQVLTTRKRKEVDASEIQVQVCLYAFDLIYLNGESLVREPLSRRRQLLRENFVETEGEFVFATSLDTKDIEQIAEFLEQSVKDSCEGLMVKTLDVDATYEIAKRSHNWLKLKKDYLDGVGDTLDLVVIGAYLGRGKRAGRYGGFLLASYDEDSEELQAICKLGTGFSDEELEEHHQSLKALVLPSPRPYVRIDGAVIPDHWLDPSAVWEVKCADLSLSPIYPAARGLVDSDKGISLRFPRFIRVREDKQPEQATTSAQVACLYRKQSQIQNQQGEDSGSDPEDTY

SEQ ID NO: 6815 - protein, 888 aa, Homo sapiens
MQRSIMAALKEWNGVVSESDSPVKRPGRKAARVLGSEGEEEDEALSPAKGQKPALDCSQVSPPRPATSPENNASLSDTSPMDSSPSGIPKRRTARKQLPKRTIQEVLEEQSEDEDREAKRKKEEEEETPKESLTEAEVATEKEGEDGDQPTTPPKPLKTSKAETPTESVSEPEVATKQELQEEEEQTKPPRRAPKTLSSFFTPRKPAVKKEVKEEEPGAPGKEGAAEGPLDPSGYNPAKNNYHPVEDACWKPGQKVPYLAVARTFEKIEEVSARLRMVETLSNLLRSVVALSPPDLLPVLYLSLNHLGPPQQGLELGVGDGVLLKAVAQATGRQLESVRAEAAEKGDVGLVAENSRSTQRLMLPPPPLTASGVFSKFRDIARLTGSASTAKKIDIIKGLFVACRHSEARFIARSLSGRLRLGLAEQSVLAALSQAVSLTPPGQEFPPAMVDAGKGKTAEARKTWLEEQGMILKQTFCEVPDLDRIIPVLLEHGLERLPEHCKLSPGIPLKPMLAHPTRGISEVLKRFEEAAFTCEYKYDGQRAQIHALEGGEVKIFSRNQEDNTGKYPDIISRIPKIKLPSVTSFILDTEAVAWDREKKQIQPFQVLTTRKRKEVDASEIQVQVCLYAFDLIYLNGESLVREPLSRRRQLLRENFVETEGEFVFATSLDTKDIEQIAEFLEQSVKDSCEGLMVKTLDVDATYEIAKRSHNWLKLKKDYLDGVGDTLDLVVIGAYLGRGKRAGRYGGFLLASYDEDSEELQAICKLGTGFSDEELEEHHQSLKALVLPSPRPYVRIDGAVIPDHWLDPSAVWEVKCADLSLSPIYPAARGLVDSDKGISLRFPRFIRVREDKQPEQATTSAQVACLYRKQSQIQNQQGEDSGSDPEDTY

SEQ ID NO: 6816 - protein, 851 aa, Homo sapiens
MQRSIMSFFHPKKEGKAKKPEKEASNSSRETEPPPKAALKEWNGVVSESDSPVKRPGRKAARVLGSEGEEEDEALSPAKGQKPALDCSQVSPPRPATSPENNASLSDTSPMDSSPSGIPKRRTEAETPTESVSEPEVATKQELQEEEEQTKPPRRAPKTLSSFFTPRKPAVKKEVKEEEPGAPGKEGAAEGPLDPSGYNPAKNNYHPVEDACWKPGQKVPYLAVARTFEKIEEVSARLRMVETLSNLLRSVVALSPPDLLPVLYLSLNHLGPPQQGLELGVGDGVLLKAVAQATGRQLESVRAEAAEKGDVGLVAENSRSTQRLMLPPPPLTASGVFSKFRDIARLTGSASTAKKIDIIKGLFVACRHSEARFIARSLSGRLRLGLAEQSVLAALSQAVSLTPPGQEFPPAMVDAGKGKTAEARKTWLEEQGMILKQTFCEVPDLDRIIPVLLEHGLERLPEHCKLSPGIPLKPMLAHPTRGISEVLKRFEEAAFTCEYKYDGQRAQIHALEGGEVKIFSRNQEDNTGKYPDIISRIPKIKLPSVTSFILDTEAVAWDREKKQIQPFQVLTTRKRKEVDASEIQVQVCLYAFDLIYLNGESLVREPLSRRRQLLRENFVETEGEFVFATSLDTKDIEQIAEFLEQSVKDSCEGLMVKTLDVDATYEIAKRSHNWLKLKKDYLDGVGDTLDLVVIGAYLGRGKRAGRYGGFLLASYDEDSEELQAICKLGTGFSDEELEEHHQSLKALVLPSPRPYVRIDGAVIPDHWLDPSAVWEVKCADLSLSPIYPAARGLVDSDKGISLRFPRFIRVREDKQPEQATTSAQVACLYRKQSQIQNQQGEDSGSDPEDTY

SEQ ID NO: 6817 - protein, 415 aa, Homo sapiens
MQRSIMSFFHPKKEGKAKKPEKEASNSSRETEPPPKAALKEWNGVVSESDSPVKRPGRKAARVLGSEGEEEDEALSPAKGQKPALDCSQVSPPRPATSPENNASLSDTSPMDSSPSGIPKRRTEEETPKESLTEAEVATEKEGEDGDQPTTPPKPLKTSKAETPTESVSEPEVATKQELQEEEEQTKPPRRAPKTLSSFFTPRKPAVKKEVKEEEPGAPGKEGAAEGPLDPSGYNPAKNNYHPVEDACWKPGQKVPYLAVARTFEKIEEVSARLRMVETLSNLLRSVVALSPPDLLPVLYLSLNHLGPPQQGLELGVGDGVLLKAVAQATGRERRETRSHNCHPRHPHPRSPLKVGSWSPSGLRQPRKATWGWWPRTAAAPRGSCCHHLRSLPPGSSASSATSPGSLAVLPQPRR

SEQ ID NO: 6818 - protein, 832 aa, Homo sapiens
VCCPGSGARDQRKARLTDEEKCWTGRENSDANMQRSIMSFFHPKKEGKAKKPEKEASNSSRETEPPPKAALKEWNGVVSESDSPVKRPGRKAARVLGSEGEEEDEALSPAKGQKPALDCSQVSPPRPATSPENNASLSDTSPMDSSPSGIPKRRTARKQLPKRTIQEVLEEQSEDEDREAKRKKEEEEETPKESLTEAEVATEKEGEDGDQPTTPPKPLKTSKAETPTESVSEPEVATKQELQEEEEQTKPPRRAPKTLSSFFTPRKPAVKKEVKEEEPGAPGKEGAAEGPLDPSGYNPAKNNYHPVEDACWKPGQKVPYLAVARTFEKIEEVSARLRMVETLSNLLRSVVALSPPDLLPVLYLSLNHLGPPQQGLELGVGDGVLLKAVAQATGRQLESVRAEAAEKGDVGLVAENSRSTQRLMLPPPPLTASGVFSKFRDIARLTGSASTAKKIDIIKGLFVACRHSEARFIARSLSGRLRLGLAEQSVLAALSQAVSLTPPGQEFPPAMVDAGKGKTAEARKTWLEEQGMILKQTFCEVPDLDRIIPVLLEHGLERLPEHCKLSPGIPLKPMLAHPTRGISEVLKRFEEAAFTCEYKYDGQRAQIHALEGGEVKIFSRNQEDNTGKYPDIISRIPKIKLPSVTSFILDTEAVAWDREKKQIQPFQVLTTRKRKEVDASEIQVQVCLYAFDLIYLNGESLVREPLSRRRQLLRENFVETEGEFVFATSLDTKDIEQIAEFLEQSVKDSCEGLMVKTLDVDATYEIAKRSHNWLKLKKDYLDGVGDTLDLVVIGAYLGRGKRAGRYGGFLLASYDEDSEELQAICKVLGNWG

SEQ ID NO: 6819 - protein, 949 aa, Homo sapiens
MSLAFKIFFPQTLRALSRKELCLFRKHHWRDVRQFSQWSETDLLHGHPLFLRRKPVLSFQGSHLRSRATYLVFLPGLHVGLCSGPCEMAEQRFCVDYAKRGTAGCKKCKEKIVKGVCRIGKVVPNPFSESGGDMKEWYHIKCMFEKLERARATTKKIEDLTELEGWEELEDNEKEQITQHIADLSSKAAGTPKKKAVVQAKLTTTGQVTSPVKGASFVTSTNPRKFSGFSAKPNNSGEAPSSPTPKRSLSSSKCDPRHKDCLLREFRKLCAMVADNPSYNTKTQIIQDFLRKGSAGDGFHGDVYLTVKLLLPGVIKTVYNLNDKQIVKLFSRIFNCNPDDMARDLEQGDVSETIRVFFEQSKSFPPAAKSLLTIQEVDEFLLRLSKLTKEDEQQQALQDIASRCTANDLKCIIRLIKHDLKMNSGAKHVLDALDPNAYEAFKASRNLQDVVERVLHNAQEVEKEPGQRRALSVQASLMTPVQPMLAEACKSVEYAMKKCPNGMFSEIKYDGERVQVHKNGDHFSYFSRSLKPVLPHKVAHFKDYIPQAFPGGHSMILDSEVLLIDNKTGKPLPFGTLGVHKKAAFQDANVCLFVFDCIYFNDVSLMDRPLCERRKFLHDNMVEIPNRIMFSEMKRVTKALDLADMITRVIQEGLEGLVLKDVKGTYEPGKRHWLKVKKDYLNEGAMADTADLVVLGAFYGQGSKGGMMSIFLMGCYDPGSQKWCTVTKCAGGHDDATLARLQNELDMVKISKDPSKIPSWLKVNKIYYPDFIVPDPKKAAVWEITGAEFSKSEAHTADGISIRFPRCTRIRDDKDWKSATNLPQLKELYQLSKEKADFTVVAGDEGSSTTGGSSEENKGPSGSAVSRKAPSKPSASTKKAEGKLSNSNSKDGNMQTAKPSAMKVGEKLATKSSPVKVGEKRKAADETLCQTKRRPASEQRGRTVPAGRR

SEQ ID NO: 6820 - protein, 1009 aa, Homo sapiens
MSLAFKIFFPQTLRALSRKELCLFRKHHWRDVRQFSQWSETDLLHGHPLFLRRKPVLSFQGSHLRSRATYLVFLPGLHVGLCSGPCEMAEQRFCVDYAKRGTAGCKKCKEKIVKGVCRIGKVVPNPFSESGGDMKEWYHIKCMFEKLERARATTKKIEDLTELEGWEELEDNEKEQITQHIADLSSKAAGTPKKKAVVQAKLTTTGQVTSPVKGASFVTSTNPRKFSGFSAKPNNSGEAPSSPTPKRSLSSSKCDPRHKDCLLREFRKLCAMVADNPSYNTKTQIIQDFLRKGSAGDGFHGDVYLTVKLLLPGVIKTVYNLNDKQIVKLFSRIFNCNPDDMARDLEQGDVSETIRVFFEQSKSFPPAAKSLLTIQEVDEFLLRLSKLTKEDEQQQALQDIASRCTANDLKCIIRLIKHDLKMNSGAKHVLDALDPNAYEAFKASRNLQDVVERVLHNAQEVEKEPGQRRALSVQASLMTPVQPMLAEACKSVEYAMKKCPNGMFSEIKYDGERVQVHKNGDHFSYFSRSLKPVLPHKVAHFKDYIPQAFPGGHSMILDSEVLLIDNKTGKPLPFGTLGVHKKAAFQDANVCLFVFDCIYFNDVSLMDRPLCERRKFLHDNMVEIPNRIMFSEMKRVTKALDLADMITRVIQEGLEGLVLKDVKGTYEPGKRHWLKVKKDYLNEGAMADTADLVVLGAFYGQGSKGGMMSIFLMGCYDPGSQKWCTVTKCAGGHDDATLARLQNELDMVKISKDPSKIPSWLKVNKIYYPDFIVPDPKKAAVWEITGAEFSKSEAHTADGISIRFPRCTRIRDDKDWKSATNLPQLKELYQLSKEKADFTVVAGDEGSSTTGGSSEENKGPSGSAVSRKAPSKPSASTKKAEGKLSNSNSKDGNMQTAKPSAMKVGEKLATKSSPVKVGEKRKAADETLCQTKVLLDIFTGVRLYLPPSTPDFSRLRRYFVAFDGDLVQEFDMTSATHVLGSRDKNPAAQQVSPEWIWACIRKRRLVAPC

SEQ ID NO: 6821 - protein, 911 aa, Homo sapiens
MAASQTSQTVASHVPFADLCSTLERIQKSKGRAEKIRHFREFLDSWRKFHDALHKNHKDVTDSFYPAMRLILPQLERERMAYGIKETMLAKLYIELLNLPRDGKDALKLLNYRTPTGTHGDAGDFAMIAYFVLKPRCLQKGSLTIQQVNDLLDSIASNNSAKRKDLIKKSLLQLITQSSALEQKWLIRMIIKDLKLGVSQQTIFSVFHNDAAELHNVTTDLEKVCRQLHDPSVGLSDISITLFSAFKPMLAAIADIEHIEKDMKHQSFYIETKLDGERMQMHKDGDVYKYFSRNGYNYTDQFGASPTEGSLTPFIHNAFKADIQICILDGEMMAYNPNTQTFMQKGTKFDIKRMVEDSDLQTCYCVFDVLMVNNKKLGHETLRKRYEILSSIFTPIPGRIEIVQKTQAHTKNEVIDALNEAIDKREEGIMVKQPLSIYKPDKRGEGWLKIKPEYVSGLMDELDILIVGGYWGKGSRGGMMSHFLCAVAEKPPPGEKPSVFHTLSRVGSGCTMKELYDLGLKLAKYWKPFHRKAPPSSILCGTEKPEVYIEPCNSVIVQIKAAEIVPSDMYKTGCTLRFPRIEKIRDDKEWHECMTLDDLEQLRGKASGKLASKHLYIGGDDEPQEKKRKAAPKMKKVIGIIEHLKAPNLTNVNKISNIFEDVEFCVMSGTDSQPKPDLENRIAEFGGYIVQNPGPDTYCVIAGSENIRVKNIILSNKHDVVKPAWLLECFKTKSFVPWQPRFMIHMCPSTKEHFAREYDCYGDSYFIDTDLNQLKEVFSGIKNSNEQTPEEMASLIADLEYRYSWDCSPLSMFRRHTVYLDSYAVINDLSTKNEGTRLAIKALELRFHGAKVVSCLAEGVSHVIIGEDHSRVADFKAFRRTFKRKFKILKESWVTDSIDKCELQEENQYLI

SEQ ID NO: 6822 - protein, 911 aa, Homo sapiens; identical to SEQ ID NO: 6821

SEQ ID NO: 6823 - protein, 911 aa, Homo sapiens; identical to SEQ ID NO: 6821

SEQ ID NO: 6824 - protein, 647 aa, Homo sapiens
MRLTLLCCTWREERMGEEGSELPVCASCGQRIYDGQYLQALNADWHADCFRCCDCSASLSHQYYEKDGQLFCKKDYWARYGESCHGCSEQITKGLVMVAGELKYHPECFICLTCGTFIGDGDTYTLVEHSKLYCGHCYYQTVVTPVIEQILPDSPGSHLPHTVTLVSIPASSHGKRGLSVSIDPPHGPPGCGTEHSHTVRVQGVDPGCMSPDVKNSIHVGDRILEINGTPIRNVPLDEIDLLIQETSRLLQLTLEHDPHDTLGHGLGPETSPLSSPAYTPSGEAGSSARQKPVLRSCSIDRSPGAGSLGSPASQRKDLGRSESLRVVCRPHRIFRPSDLIHGEVLGKGCFGQAIKVTHRETGEVMVMKELIRFDEETQRTFLKEVKVMRCLEHPNVLKFIGVLYKDKRLNFITEYIKGGTLRGIIKSMDSQYPWSQRVSFAKDIASGMAYLHSMNIIHRDLNSHNCLVRENKNVVVADFGLARLMVDEKTQPEGLRSLKKPDRKKRYTVVGNPYWMAPEMINGRSYDEKVDVFSFGIVLCEIIGRVNADPDYLPRTMDFGLNVRGFLDRYCPPNCPPSFFPITVRCCDLDPEKRPSFVKLEHWLETLRMHLAGHLPLGPQLEQLDRGFWETYRRGESGLPAHPEVPD

SEQ ID NO: 6825 - protein, 647 aa, Homo sapiens; identical to SEQ ID NO: 6824

SEQ ID NO: 6826 - protein, 613 aa, Homo sapiens
MLLASAPRRRRFLQRAKCCDCSASLSHQYYEKDGQLFCKKDYWARYGESCHGCSEQITKGLVMVAGELKYHPECFICLTCGTFIGDGDTYTLVEHSKLYCGHCYYQTVVTPVIEQILPDSPGSHLPHTVTLVSIPASSHGKRGLSVSIDPPHGPPGCGTEHSHTVRVQGVDPGCMSPDVKNSIHVGDRILEINGTPIRNVPLDEIDLLIQETSRLLQLTLEHDPHDTLGHGLGPETSPLSSPAYTPSGEAGSSARQKPVLRSCSIDRSPGAGSLGSPASQRKDLGRSESLRVVCRPHRIFRPSDLIHGEVLGKGCFGQAIKVTHRETGEVMVMKELIRFDEETQRTFLKEVKVMRCLEHPNVLKFIGVLYKDKRLNFITEYIKGGTLRGIIKSMDSQYPWSQRVSFAKDIASGMAYLHSMNIIHRDLNSHNCLVRENKNVVVADFGLARLMVDEKTQPEGLRSLKKPDRKKRYTVVGNPYWMAPEMINGRSYDEKVDVFSFGIVLCEIIGRVNADPDYLPRTMDFGLNVRGFLDRYCPPNCPPSFFPITVRCCDLDPEKRPSFVKLEHWLETLRMHLAGHLPLGPQLEQLDRGFWETYRRGESGLPAHPEVPD

SEQ ID NO: 6827 - protein, 156 aa, Homo sapiens
MMVLDKEDGVPMLSVQPKGKQKGCAGCNRKIKDRYLLKALDKYWHEDCLKCACCDCRLGEVGSTLYTKANLILCRRDYLRLFGTTGNCAACSKLIPAFEMVMRARDNVYHLDCFACQLCNQRFCVGDKFFLKNNMILCQMDYEEGQLNGTFESQVQ

SEQ ID NO: 6828 - protein, 155 aa, Homo sapiens
MVLDQEDGVPMLSVQPKGKQKGCAGCNRKIKDRYLLKALDKYWHEDCLKCACCDCRLGEVGSTLYTKANLILCRRDYLRLFGTTGNCAACSKLIPAFEMVMRARDNVYHLDCFACQLCNQRFCVGDKFFLKNNMILCQMDYEEGQLNGTFESQVQ

SEQ ID NO: 6829 - protein, 227 aa, Homo sapiens
MEGSAVTVLERGGASSPAERRSKRRRRSGGDGGGGGGARAPEGVRAPAAGQPRATKGAPPPPGTPPPSPMSSAIERKSLDPSEEPVDEVLQIPPSLLTCGGCQQNIGDRYFLKAIDQYWHEDCLSCDLCGCRLGEVGRRLYYKLGRKLCRRDYLRLFGQDGLCASCDKRIRAYEMTMRVKDKVYHLECFKCAACQKHFCVGDRYLLINSDIVCEQDIYEWTKINGMI

SEQ ID NO: 6830 - protein, 158 aa, Homo sapiens
MSSAIERKSLDPSEEPVDEVLQIPPSLLTCGGCQQNIGDRYFLKAIDQYWHEDCLSCDLCGCRLGEVGRRLYYKLGRKLCRRDYLRLFGQDGLCASCDKRIRAYEMTMRVKDKVYHLECFKCAACQKHFCVGDRYLLINSDIVCEQDIYEWTKINGMI

SEQ ID NO: 6831 - protein, 558 aa, Homo sapiens
MHRGGQPLKKRRGSFKMAELDQLPDESSSAKALVSLKEGSLSNTWNEKYSSLQKTPVWKGRNTSSAVEMPFRNSKRSRLFSDEDDRQINTRSPKRNQRVAMVPQKFTATMSTPDKKASQKIGFRLRNLLKLPKAHKWCIYEWFYSNIDKPLFEGDNDFCVCLKESFPNLKTRKLTRVEWGKIRRLMGKPRRCSSAFFEEERSALKQKRQKIRLLQQRKVADVSQFKDLPDEIPLPLVIGTKVTARLRGVHDGLFTGQIDAVDTLNATYRVTFDRTGLGTHTIPDYEVLSNEPHETMPIAAFGQKQRPSRFFMTPPRLHYTPPLQSPIIDNDPLLGQSPWRSKISGSDTETLGGFPVEFLIQVTRLSKILMIKKEHIKKLREMNTEAEKLKSYSMPISIEFQRRYATIVLELEQLNKDLNKVLHKVQQYCYELAPDQGLQPADQPTDMRRRCEEEAQEIVRHANSSTGQPCVENENLTDLISRLTAILLQIKCLAEGGDLNSFEFKSLTDSLNDIKSTIDASNISCFQNNVEIHVAHIQSGLSQMGNLHAFAANNTNRD

SEQ ID NO: 6832 - protein, 507 aa, Homo sapiens
MAELDQLPDESSSAKALVSLKEGSLSNTWNEKYSSLQKTPVWKGRNTSSAVEMKFTATMSTPDKKASQKIGFRLRNLLKLPKAHKWCIYEWFYSNIDKPLFEGDNDFCVCLKESFPNLKTRKLTRVEWGKIRRLMGKPRRCSSAFFEEERSALKQKRQKIRLLQQRKVADVSQFKDLPDEIPLPLVIGTKVTARLRGVHDGLFTGQIDAVDTLNATYRVTFDRTGLGTHTIPDYEVLSNEPHETMPIAAFGQKQRPSRFFMTPPRLHYTPPLQSPIIDNDPLLGQSPWRSKISGSDTETLGGFPVEFLIQVTRLSKILMIKKEHIKKLREMNTEAEKLKSYSMPISIEFQRRYATIVLELEQLNKDLNKVLHKVQQYCYELAPDQGLQPADQPTDMRRRCEEEAQEIVRHANSSTGQPCVENENLTDLISRLTAILLQIKCLAEGGDLNSFEFKSLTDSLNDIKSTIDASNISCFQNNVEIHVAHIQSGLSQMGNLHAFAANNTNRD

SEQ ID NO: 6833 - protein, 523 aa, Homo sapiens
MRPRTEGFFPPAGASLPFSTRNKQPAVPAAAARAAEHAPGAGPGRDSGAGTAPPALRRRASPCGLLPPFLPPGSAGGGGGGARRGPPSAAPPPRAGAGGAGPASASRGGSSAARRRGQRAPHSNLPRKDSLRPTMHRGGQPLKKRRGSFKMAELDQLPDESSSAKALVSLKEGSLSNTWNEKYSSLQKTPVWKGRNTSSAVEMPFRNSKRSRLFSDEDDRQINTRSPKRNQRVAMVPQKFTATMSTPDKKASQKIGFRLRNLLKLPKAHKWCIYEWFYSNIDKPLFEGDNDFCVCLKESFPNLKTRKLTRVEWGKIRRLMGKPRRCSSAFFEEERSALKQKRQKIRLLQQRKVADVSQFKDLPDEIPLPLVIGTKVTARLRGVHDGLFTGQIDAVDTLNATYRVTFDRTGLGTHTIPDYEVLSNEPHETMPIAAFGQKQRPSRFFMTPPRLHYTPPLQSPIIDNDPLLGQSPWRSKISGSDTETLGGFPVEFLIQVTRLSKILMIKGTYQEIKGNEHRSRKIG

SEQ ID NO: 6834 - protein, 613 aa, Homo sapiens
ETAEQNSSLAVGLNDQLHDLSRSRSPAARSSASNIRERRARIARGRWDRVPDVATRRGLLRPAVSGKVRGRRRPSNVGFGNCSSAKALVSLKEGSLSNTWNEKYSSLQKTPVWKGRNTSSAVEMPFRNSKRSRLFSDEDDRQINTRSPKRNQRVAMVPQKFTATMSTPDKKASQKIGFRLRNLLKLPKAHKWCIYEWFYSNIDKPLFEGDNDFCVCLKESFPNLKTRKLTRVEWGKIRRLMGKPRRCSSAFFEEERSALKQKRQKIRLLQQRKVADVSQFKDLPDEIPLPLVIGTKVTARLRGVHDGLFTGQIDAVDTLNATYRVTFDRTGLGTHTIPDYEVLSNEPHETMPIAAFGQKQRPSRFFMTPPRLHYTPPLQSPIIDNDPLLGQSPWRSKISGSDTETLGGFPVEFLIQVTRLSKILMIKKEHIKKLREMNTEAEKLKSYSMPISIEFQRRYATIVLELEQLNKDLNKVLHKVQQYCYELAPDQGLQPADQPTDMRRRCEEEAQEIVRHANSSTGQPCVENENLTDLISRLTAILLQIKCLAEGGDLNSFEFKSLTDSLNDIKSTIDASNISCFQNNVEIHVAHIQSGLSQMGNLHAFAANNTNRD

SEQ ID NO: 6835 - protein, 4599 aa, Homo sapiens
MSEFLLALLTLSGLLPIARVLTVGADRDQQLCDPGEFLCHDHVTCVSQSWLCDGDPDCPDDSDESLDTCPEEVEIKCPLNHIACLGTNKCVHLSQLCNGVLDCPDGYDEGVHCQELLSNCQQLNCQYKCTMVRNSTRCYCEDGFEITEDGRSCKDQDECAVYGTCSQTCRNTHGSYTCSCVEGYLMQPDNRSCKAKIEPTDRPPILLIANFETIEVFYLNGSKMATLSSVNGNEIHTLDFIYNEDMICWIESRESSNQLKCIQITKAGGLTDEWTINILQSFHNVQQMAIDWLTRNLYFVDHVGDRIFVCNSNGSVCVTLIDLELHNPKAIAVDPIAGKLFFTDYGNVAKVERCDMDGMNRTRIIDSKTEQPAALALDLVNKLVYWVDLYLDYVGVVDYQGKNRHTVIQGRQVRHLYGITVFEDYLYATNSDNYNIVRINRFNGTDIHSLIKIENAWGIRIYQKRTQPTVRSHACEVDPYGMPGGCSHICLLSSSYKTRTCRCRTGFNLGSDGRSCKRPKNELFLFYGKGRPGIVRGMDLNTKIADEYMIPIENLVNPRALDFHAETNYIYFADTTSFLIGRQKIDGTERETILKDDLDNVEGIAVDWIGNNLYWTNDGHRKTINVARLEKASQSRKTLLEGEMSHPRGIVVDPVNGWMYWTDWEEDEIDDSVGRIEKAWMDGFNRQIFVTSKMLWPNGLTLDFHTNTLYWCDAYYDHIEKVFLNGTHRKIVYSGRELNHPFGLSHHGNYVFWTDYMNGSIFQLDLITSEVTLLRHERPPLFGLQIYDPRKQQGDNMCRVNNGGCSTLCLAIPGGRVCACADNQLLDENGTTCTFNPGEALPHICKAGEFRCKNRHCIQARWKCDGDDDCLDGSDEDSVNCFNHSCPDDQFKCQNNRCIPKRWLCDGANDCGSNEDESNQTCTARTCQVDQFSCGNGRCIPRAWLCDREDDCGDQTDEMASCEFPTCEPLTQFVCKSGRCISSKWHCDSDDDCGDGSDEVGCVHSCFDNQFRCSSGRCIPGHWACDGDNDCGDFSDEAQINCTKEEIHSPAGCNGNEFQCHPDGNCVPDLWRCDGEKDCEDGSDEKGCNGTIRLCDHKTKFSCWSTGRCINKAWVCDGDIDCEDQSDEDDCDSFLCGPPKHPCANDTSVCLQPEKLCNGKKDCPDGSDEGYLCDECSLNNGGCSNHCSVVPGRGIVCSCPEGLQLNKDNKTCEIVDYCSNHLKCSQVCEQHKHTVKCSCYEGWKLDVDGESCTSVDPFEAFIIFSIRHEIRRIDLHKRDYSLLVPGLRNTIALDFHFNQSLLYWTDVVEDRIYRGKLSESGGVSAIEVVVEHGLATPEGLTVDWIAGNIYWIDSNLDQIEVAKLDGSLRTTLIAGAMEHPRAIALDPRYGILFWTDWDANFPRIESASMSGAGRKTIYKDMKTGAWPNGLTVDHFEKRIVWTDARSDAIYSALYDGTNMIEIIRGHEYLSHPFAVSLYGSEVYWTDWRTNTLSKANKWTGQNVSVIQKTSAQPFDLQIYHPSRQPQAPNPCAANDGKGPCSHMCLINHNRSAACACPHLMKLSSDKKTCYEMKKFLLYARRSEIRGVDIDNPYFNFITAFTVPDIDDVTVIDFDASEERLYWTDIKTQTIKRAFINGTGLETVISRDIQSIRGLAVDWVSRNLYWISSEFDETQINVARLDGSLKTSIIHGIDKPQCLAAHPVRGKLYWTDGNTINMANMDGSNSKILFQNQKEPVGLSIDYVENKLYWISSGNGTINRCNLDGGNLEVIESMKEELTKATALTIMDKKLWWADQNLAQLGTCSKRDGRNPTILRNKTSGVVHMKVYDKEAQQGSNSCQLNNGGCSQLCLPTSETTRTCMCTVGYYLQKNRMSCQGIESFLMYSVHEGIRGIPLEPSDKMDALMPISGTSFAVGIDFHAENDTIYWTDMGFNKISRAKRDQTWKEDIITNGLGRVEGIAVDWIAGNIYWTDHGFNLIEVARLNGSFRYVIISQGLDQPRSIAVHPEKGLLFWTEWGQMPCIGKARLDGSEKVVLVSMGIAWPNGISIDYEENKLYWCDARTDKIERIDLETGGNREMVLSGSNVDMFSVAVFGAYIYWSDRAHANGSVRRGHKNDATETITMRTGLGVNLKEVKIFNRVREKGTNVCARDNGGCKQLCLYRGNSRRTCACAHGYLAEDGVTCLRHEGYLLYSGRTILKSIHLSDETNLNSPIRPYENPRYFKNVIALAFDYNQRRKGTNRIFYSDAHFGNIQLIKDNWEDRQVIVENVGSVEGLAYHRAWDTLYWTSSTTSSITRHTVDQTRPGAFDREAVITMSEDDHPHVLALDECQNLMFWTNWNEQHPSIMRSTLTGKNAQVVVSTDILTPNGLTIDYRAEKLYFSDGSLGKIERCEYDGSQRHVIVKSGPGTFLSLAVYDNYIFWSDWGRRAILRSNKYTGGDTKILRSDIPHQPMGIIAVANDTNSCELSPCALLNGGCHDLCLLTPNGRVNCSCRGDRILLEDNRCVTKNSSCNAYSEFECGNGECIDYQLTCDGIPHCKDKSDEKLLYCENRSCRRGFKPCYNRRCIPHGKLCDGENDCGDNSDELDCKVSTCATVEFRCADGTCIPRSARCNQNIDCADASDEKNCNNTDCTHFYKLGVKTTGFIRCNSTSLCVLPTWICDGSNDCGDYSDELKCPVQNKHKCEENYFSCPSGRCILNTWICDGQKDCEDGRDEFHCDSSCSWNQFACSAQKCISKHWICDGEDDCGDGLDESDSICGAITCAADMFSCQGSRACVPRHWLCDGERDCPDGSDELSTAGCAPNNTCDENAFMCHNKVCIPKQFVCDHDDDCGDGSDESPQCGYRQCGTEEFSCADGRCLLNTQWQCDGDFDCPDHSDEAPLNPKCKSAEQSCNSSFFMCKNGRCIPSGGLCDNKDDCGDGSDERNCHINECLSKKVSGCSQDCQDLPVSYKCKCWPGFQLKDDGKTCVDIDECSSGFPCSQQCINTYGTYKCLCTDGYEIQPDNPNGCKSLSDEEPFLILADHHEIRKISTDGSNYTLLKQGLNNVIAIDFDYREEFIYWIDSSRPNGSRINRMCLNGSDIKVVHNTAVPNALAVDWIGKNLYWSDTEKRIIEVSKLNGLYPTILVSKRLKFPRDLSLDPQAGYLYWIDCCEYPHIGRVGMDGTNQSVVIETKISRPMALTIDYVNRRLYWADENHIEFSNMDGSHRHKVPNQDIPGVIALTLFEDYIYWTDGKTKSLSRAHKTSGADRLSLIYSWHAITDIQVYHSYRQPDVSKHLCMINNGGCSHLCLLAPGKTHTCACPTNFYLAADNRTCLSNCTASQFRCKTDKCIPFWWKCDTVDDCGDGSDEPDDCPEFRCQPGRFQCGTGLCALPAFICDGENDCGDNSDELNCDTHVCLSGQFKCTKNQKCIPVNLRCNGQDDCGDEEDERDCPENSCSPDYFQCKTTKHCISKLWVCDEDPDCADASDEANCDKKTCGPHEFQCKNNNCIPDHWRCDSQNDCSDNSDEENCKPQTCTLKDFLCANGDCVSSRFWCDGDFDCADGSDERNCETSCSKDQFRCSNGQCIPAKWKCDGHEDCKYGEDEKSCEPASPTCSSREYICASDGCISASLKCNGEYDCADGSDEMDCVTECKEDQFRCKNKAHCIPIRWLCDGIHDCVDGSDEENCERGGNICRADEFLCNNSLCKLHFWVCDGEDDCGDNSDEAPDMCVKFLCPSTRPHRCRNNRICLQSEQMCNGIDECGDNSDEDHCGGKLTYKARPCKKDEFACSNKKCIPMDLQCDRLDDCGDGSDEQGCRIAPTEYTCEDNVNPCGDDAYCNQIKTSVFCRCKPGFQRNMKNRQCEDLNECLVFGTCSHQCINVEGSYKCVCDQNFQERNNTCIAEGSEDQVLYIANDTDILGFIYPFNYSGDHQQISHIEHNSRITGMDVYYQRDMIIWSTQFNPGGIFYKRIHGREKRQANSGLICPEFKRPRDIAVDWVAGNIYWTDHSRMHWFSYYTTHWTSLRYSINVGQLNGPNCTRLLTNMAGEPYAIAVNPKRGMMYWTVVGDHSHIEEAAMDGTLRRILVQKNLQRPTGLAVDYFSERIYWADFELSIIGSVLYDGSNSVVSVSSKQGLLHPHRIDIFEDYIYGAGPKNGVFRVQKFGHGSVEYLALNIDKTKGVLISHRYKQLDLPNPCLDLACEFLCLLNPSGATCVCPEGKYLINGTCNDDSLLDDSCKLTCENGGRCILNEKGDLRCHCWPSYSGERCEVNHCSNYCQNGGTCVPSVLGRPTCSCALGFTGPNCGKTVCEDFCQNGGTCIVTAGNQPYCHCQPEYTGDRCQYYVCHHYCVNSESCTIGDDGSVECVCPTRYEGPKCEVDKCVRCHGGHCIINKDSEDIFCNCTNGKIASSCQLCDGYCYNGGTCQLDPETNVPVCLCSTNWSGTQCERPAPKSSKSDHISTRSIAIIVPLVLLVTLITTLVIGLVLCKRKRRTKTIRRQPIINGGINVEIGNPSYNMYEVDHDHNDGGLLDPGFMIDPTKARYIGGGPSAFKLPHTAPPIYLNSDLKGPLTAGPTNYSNPVYAKLYMDGQNCRNSLGSVDERKELLPKKIEIGIRETVA

SEQ ID NO: 6836 - protein, 782 aa, Homo sapiens [sequence omitted]

SEQ ID NO: 6837 - protein, 4537 aa, Homo sapiens
FLHSGPEEVEIKCPLNHIACLGTNKCVHLSQLCNGVLDCPDGYDEGVHCQGESICQQLNCTMYKYKCTMVRNSTRCYCEDGFEITEDGRSCKDQDECAVYGTCSQTCRNTHGSYTCSCVEGYLMQPDNRSCKAKIEPTDRPPILLIANFETIEVFYLNGSKMATLSSVNGNEIHTLDFIYNEDMICWIESRESSNQLKCIQITKAGGLTDEWTINILQSFHNVQQMAIDWLTRNLYFVDHVGDRIFVCNSNGSVCVTLIDLELHNPKAIAVDPIAGKLFFTDYGNVAKVERCDMDGMNRTRIIDSKTEQPAALALDLVNKLVYWVDLYLDYVGVVDYQGKNRHTVIQGRQVRHLYGITVFEDYLYATNSDNYNIVRINRFNGTDIHSLIKIENAWGIRIYQKRTQPTVRSHACEVDPYGMPGGCSHICLLSSSYKTRTCRCRTGFNLGSDGRSCKRPKNELFLFYGKGRPGIVRGMDLNTKIADEYMIPIENLVNPRALDFHAETNYIYFADTTSFLIGRQKIDGTERETILKDDLDNVEGIAVDWIGNNLYWTNDGHRKTINVARLEKASQSRKTLLEGEMSHPRGIVVDPVNGWMYWTDWEEDEIDDSVGRIEKAWMDGFNRQIFVTSKMLWPNGLTLDFHTNTLYWCDAYYDHIEKVFLNGTHRKIVYSGRELNHPFGLSHHGNYVFWTDYMNGSIFQLDLITSEVTLLRHERPPLFGLQIYDPRKQQGDNMCRVNNGGCSTLCLAIPGGRVCACADNQLLDENGTTCTFNPGEALPHICKAGEFRCKNRHCIQARWKCDGDDDCLDGSDEDSVNCFNHSCPDDQFKCQNNRCIPKRWLCDGANDCGSNEDESNQTCTARTCQVDQFSCGNGRCIPRAWLCDREDDCGDQTDEMASCEFPTCEPLTQFVCKSGRCISSKWHCDSDDDCGDGSDEVGCVHSCFDNQFRCSSGRCIPGHWACDGDNDCGDFSDEAQINCTKEEIHSPAGCNGNEFQCHPDGNCVPDLWRCDGEKDCEDGSDEKGCNGTIRLCDHKTKFSCWSTGRCINKAWVCDGDIDCEDQSDEDDCDSFLCGPPKHPCANDTSVCLQPEKLCNGKKDCPDGSDEGYLCDECSLNNGGCSNHCSVVPGRGIVCSCPEGLQLNKDNKTCEIVDYCSNHLKCSQVCEQHKHTVKCSCYEGWKLDVDGESCTSVDPFEAFIIFSIRHEIRRIDLHKRDYSLLVPGLRNTIALDFHFNQSLLYWTDVVEDRIYRGKLSESGGVSAIEVVVEHGLATPEGLTVDWIAGNIYWIDSNLDQIEVAKLDGSLRTTLIAGAMEHPRAIALDPRYGILFWTDWDANFPRIESASMSGAGRKTIYKDMKTGAWPNGLTVDHFEKRIVWTDARSDAIYSALYDGTNMIEIIRGHEYLSHPFAVSLYGSEVYWTDWRTNTLSKANKWTGQNVSVIQKTSAQPFDLQIYHPSRQPQAPNPCAANDGKGPCSHMCLINHNRSAACACPHLMKLSSDKKTCYEMKKFLLYARRSEIRGVDIDNPYFNFITAFTVPDIDDVTVIDFDASEERLYWTDIKTQTIKRAFINGTGLETVISRDIQSIRGLAVDWVSRNLYWISSEFDETQINVARLDGSLKTSIIHGIDKPQCLAAHPVRGKLYWTDGNTINMANMDGSNSKILFQNQKEPVGLSIDYVENKLYWISSGNGTINRCNLDGGNLEVIESMKEELTKATALTIMDKKLWWADQNLAQLGTCSKRDGRNPTILRNKTSGVVHMKVYDKEAQQGSNSCQLNNGGCSQLCLPTSETTRTCMCTVGYYLQKNRMSCQGIESFLMYSVHEGIRGIPLEPSDKMDALMPISGTSFAVGIDFHAENDTIYWTDMGFNKISRAKRDQTWKEDIITNGLGRVEGIAVDWIAGNIYWTDHGFNLIEVARLNGSFRYVIISQGLDQPRSIAVHPEKGLLFWTEWGQMPCIGKARLDGSEKVVLVSMGIAWPNGISIDYEENKLYWCDARTDKIERIDLETGGNREMVLSGSNVDMFSVAVFGAYIYWSDRAHANGSVRRGHKNDATETITMRTGLGVNLKEVKIFNRVREKGTNVCARDNGGCKQLCLYRGNSRRTCACAHGYLAEDGVTCLRHEGYLLYSGRTILKSIHLSDETNLNSPIRPYENPRYFKNVIALAFDYNQRRKGTNRIFYSDAHFGNIQLIKDNWEDRQVIVENVGSVEGLAYHRAWDTLYWTSSTTSSITRHTVDQTRPGAFDREAVITMSEDDHPHVLALDECQNLMFWTNWNEQHPSIMRSTLTGKNAQVVVSTDILTPNGLTIDYRAEKLYFSDGSLGKIERCEYDGSQRHVIVKSGPGTFLSLAVYDNYIFWSDWGRRAILRSNKYTGGDTKILRSDIPHQPMGIIAVANDTNSCELSPCALLNGGCHDLCLLTPNGRVNCSCRGDRILLEDNRCVTKNSSCNAYSEFECGNGECIDYQLTCDGIPHCKDKSDEKLLYCENRSCRRGFKPCYNRRCIPHGKLCDGENDCGDNSDELDCKVSTCATVEFRCADGTCIPRSARCNQNIDCADASDEKNCNNTDCTHFYKLGVKTTGFIRCNSTSLCVLPTWICDGSNDCGDYSDELKCPVQNKHKCEENYFSCPSGRCILNTWICDGQKDCEDGRDEFHCDSSCSWNQFACSAQKCISKHWICDGEDDCGDGLDESDSICGAITCAADMFSCQGSRACVPRHWLCDGERDCPDGSDELSTAGCAPNNTCDENAFMCHNKVCIPKQFVCDHDDDCGDGSDESPQCGYRQCGTEEFSCADGRCLLNTQWQCDGDFDCPDHSDEAPLNPKCKSAEQSCNSSFFMCKNGRCIPSGGLCDNKDDCGDGSDERNCHINECLSKKVSGCSQDCQDLPVSYKCKCWPGFQLKDDGKTCVDIDECSSGFPCSQQCINTYGTYKCLCTDGYEIQPDNPNGCKSLSDEEPFLILADHHEIRKISTDGSNYTLLKQGLNNVIAIDFDYREEFIYWIDSSRPNGSRINRMCLNGSDIKVVHNTAVPNALAVDWIGKNLYWSDTEKRIIEVSKLNGLYPTILVSKRLKFPRDLSLDPQAGYLYWIDCCEYPHIGRVGMDGTNQSVVIETKISRPMALTIDYVNRRLYWADENHIEFSNMDGSHRHKVPNQDIPGVIALTLFEDYIYWTDGKTKSLSRAHKTSGADRLSLIYSWHAITDIQVYHSYRQPDVSKHLCMINNGGCSHLCLLAPGKTHTCACPTNFYLAADNRTCLSNCTASQFRCKTDKCIPFWWKCDTVDDCGDGSDEPDDCPEFRCQPGRFQCGTGLCALPAFICDGENDCGDNSDELNCDTHVCLSGQFKCTKNQKCIPVNLRCNGQDDCGDEEDERDCPENSCSPDYFQCKTTKHCISKLWVCDEDPDCADASDEANCDKKTCGPHEFQCKNNNCIPDHWRCDSQNDCSDNSDEENCKPQTCTLKDFLCANGDCVSSRFWCDGDFDCADGSDERNCETSCSKDQFRCSNGQCIPAKWKCDGHEDCKYGEDEKSCEPASPTCSSREYICASDGCISASLKCNGEYDCADGSDEMDCVTECKEDQFRCKNKAHCIPIRWLCDGIHDCVDGSDEENCERGGNICRADEFLCNNSLCKLHFWVCDGEDDCGDNSDEAPDMCVKFLCPSTRPHRCRNNRICLQSEQMCNGIDECGDNSDEDHCGGKLTYKARPCKKDEFACSNKKCIPMDLQCDRLDDCGDGSDEQGCRIAPTEYTCEDNVNPCGDDAYCNQIKTSVFCRCKPGFQRNMKNRQCEDLNECLVFGTCSHQCINVEGSYKCVCDQNFQERNNTCIAEGSEDQVLYIANDTDILGFIYPFNYSGDHQQISHIEHNSRITGMDVYYQRDMIIWSTQFNPGGIFYKRIHGREKRQANSGLICPEFKRPRDIAVDWVAGNIYWTDHSRMHWFSYYTTHWTSLRYSINVGQLNGPNCTRLLTNMAGEPYAIAVNPKRGMMYWTVVGDHSHIEEAAMDGTLRRILVQKNLQRPTGLAVDYFSERIYWADFELSIIGSVLYDGSNSVVSVSSKQGLLHPHRIDIFEDYIYGAGPKNGVFRVQKFGHGSVEYLALNIDKTKGVLISHRYKQLDLPNPCLDLACEFLCLLNPSGATCVCPEGKYLINGTCNDDSLLDDSCKLTCENGGRCILNEKGDLRCHCWPSYSGERCEVNHCSNYCQNGGTCVPSVLGRPTCSCALGFTGPNCGKTVCEDFCQNGGTCIVTAGNQPYCHCQPEYTGDRCQYYVCHHYCVNSESCTIGDDGSVECVCPTRYEGPKCEVDKCVRCHGGHCIINKDSEDIFCNCTNGKIASSCQLCDGYCYNGGTCQLDPETNVPVCLCSTNWSGTQCERPAPKSSKSDHISTRSIAIIVPLVLLVTLITTLVIGLVLCKRKRRTKTIRRQPIINGGINVEIGNPSYNMYEVDHDHNDGGLLDPGFMIDPTKARYIGGGPSAFKLPHTAPPIYLNSDLKGPLTAGPTNYSNPVYAKLYMDGQNCRNSLGSVDERKELLPKKIEIGIRETVA

SEQ ID NO: 6838 - protein, 280 aa, Homo sapiens
MCPPQAQAEVGPTMTEKAEMVCAPSPAPAPPPKPASPGPPQVEEVGHRGGSSPPRLPPGVPVISLGHSRPPGVAMPTTELGTLRPPLLQLSTLGTAPPTLALHYHPHPFLNSVYIGPAGPFSIFPSSRLKRRPSHCELDLAEGHQPQKVARRVFTNSRERWRQQNVNGAFAELRKLLPTHPPDRKLSKNEVLRLAMKYIGFLVRLLRDQAAALAAGPTPPGPRKRPVHRVPDDGARRGSGRRAEAAARSQPAPPADPDGSPGGAARPIKMEQTALSPEVR

SEQ ID NO: 6839 - protein, 539 aa, Homo sapiens
MGCGCSSHPEDDWMENIDVCENCHYPIVPLDGKGTLLIRNGSEVRDPLVTYEGSNPPASPLQDNLVIALHSYEPSHDGDLGFEKGEQLRILEQSGEWWKAQSLTTGQEGFIPFNFVAKANSLEPEPWFFKNLSRKDAERQLLAPGNTHGSFLIRESESTAGSFSLSVRDFDQNQGEVVKHYKIRNLDNGGFYISPRITFPGLHELVRHYTNASDGLCTRLSRPCQTQKPQKPWWEDEWEVPRETLKLVERLGAGQFGEVWMGYYNGHTKVAVKSLKQGSMSPDAFLAEANLMKQLQHQRLVRLYAVVTQEPIYIITEYMENDTLLDSQLEEKGLGASPWGNLGQQLLLLPTGSLVDFLKTPSGIKLTINKLLDMAAQIAEGMAFIEERNYIHRDLRAANILVSDTLSCKIADFGLARLIEDNEYTAREGAKFPIKWTAPEAINYGTFTIKSDVWSFGILLTEIVTHGRIPYPGMTNPEVIQNLERGYRMVRPDNCPEELYQLMRLCWKERPEDRPTFDYLRSVLEDFFTATEGQYQPQP

SEQ ID NO: 6840 - protein, 509 aa, Homo sapiens
MGCGCSSHPEDDWMENIDVCENCHYPIVPLDGKGTLLIRNGSEVRDPLVTYEGSNPPASPLQDNLVIALHSYEPSHDGDLGFEKGEQLRILEQSGEWWKAQSLTTGQEGFIPFNFVAKANSLEPEPWFFKNLSRKDAERQLLAPGNTHGSFLIRESESTAGSFSLSVRDFDQNQGEVVKHYKIRNLDNGGFYISPRITFPGLHELVRHYTNASDGLCTRLSRPCQTQKPQKPWWEDEWEVPRETLKLVERLGAGQFGEVWMGYYNGHTKVAVKSLKQGSMSPDAFLAEANLMKQLQHQRLVRLYAVVTQEPIYIITEYMENGSLVDFLKTPSGIKLTINKLLDMAAQIAEGMAFIEERNYIHRDLRAANILVSDTLSCKIADFGLARLIEDNEYTAREGAKFPIKWTAPEAINYGTFTIKSDVWSFGILLTEIVTHGRIPYPGMTNPEVIQNLERGYRMVRPDNCPEELYQLMRLCWKERPEDRPTFDYLRSVLEDFFTATEGQYQPQP

SEQ ID NO: 6841 - protein, 516 aa, Homo sapiens
MGCGCSSHPEDDWMENIDVCENCHYPIVPLDGKGTLLIRNGSEVRDPLVTYEGSNPPASPLQGDPRQQGLKDKACGSLAVGFHLSPTYFLPGLAFLVPHPVTPGFLPIPARFSLMPLVFTDNLVIALHSYEPSHDGDLGFEKGEQLRILEQSGEWWKAQSLTTGQEGFIPFNFVAKANSLEPEPWFFKNLSRKDAERQLLAPGNTHGSFLIRESESTAGSFSLSVRDFDQNQGEVVKHYKIRNLDNGGFYISPRITFPGLHELVRHYTRYYNGHTKVAVKSLKQGSMSPDAFLAEANLMKQLQHQRLVRLYAVVTQEPIYIITEYMENGSLVDFLKTPSGIKLTINKLLDMAAQIAEGMAFIEERNYIHRDLRAANILVSDTLSCKIADFGLARLIEDNEYTAREGAKFPIKWTAPEAINYGTFTIKSDVWSFGILLTEIVTHGRIPYPGMTNPEVIQNLERGYRMVRPDNCPEELYQLMRLCWKERPEDRPTFDYLRSVLEDFFTATEGQYQPQP

SEQ ID NO: 6842 - protein, 249 aa, Homo sapiens
MGYYNGHTKVAVKSLKQGSMSPDAFLAEANLMKQLQHQRLVRLYAVVTQEPIYIITEYMENGSLVDFLKTPSGIKLTINKLLDMAAQIAEGMAFIEERNYIHRDLRAANILVSDTLSCKIADFGLARLIEDNEYTAREGAKFPIKWTAPEAINYGTFTIKSDVWSFGILLTEIVTHGRIPYPGMTNPEVIQNLERGYRMVRPDNCPEELYQLMRLCWKERPEDRPTFDYLRSVLEDFFTATEGQYQPQP

SEQ ID NO: 6843 - protein, 536 aa, Homo sapiens
MGIPGSHNLRYFWNFPGQGPIISDVGGADLGGAPSAPSSIPSGTMGCGCSSHPEDDWMENIDVCENCHYPIVPLDGKGTLLIRNGSEVRDPLVTYEGSNPPASPLQDNLVIALHSYEPSHDGDLGFEKGEQLRILEQSGEWWKAQSLTTGQEGFIPFNFVAKANSLEPEPWFFKNLSRKDAERQLLAPGNTHGSFLIRESESTAGSFSLSVRDFDQNQGEVVKHYKIRNLDNGGFYISPRITFPGLHELVRHYTNASDGLCTRLSRPCQTQKPQKPWWEDEWEVPRETLKLVERLGAGQFGEVWMGYYNGHTKVAVKSLKQGSMSPDAFLAEANLMKQLQHQRLVRLYAVVTQEPIYIITEYMENGSLVDFLKTPSGIKLTINKLLDMAAQIAEGMAFIEERNYIHRDLRAANILVSDTLSCKIADFGLARLIEDNEYTAREGAKFPIKWTAPEAINYGTFTHGRIPYPGMTNPEVIQNLERGYRMVRPDNCPEELYQLMRLCWKERPEDRPTFDYLRSVLEDFFTATEGQYQPQP

SEQ ID NO: 6844 - protein, 399 aa, Homo sapiens
MPQLSGGGGGGGGDPELCATDEMIPFKDEGDPQKEKIFAEISHPEEEGDLADIKSSLVNESEIIPASNGHEVARQAQTSQEPYHDKAREHPDDGKHPDGGLYNKGPSYSSYSGYIMMPNMNNDPYMSNGSLSPPIPRTSNKVPVVQPSHAVHPLTPLITYSDEHFSPGSHPSHIPSDVNSKQGMSRHPPAPDIPTFYPLSPGGVGQITPPLGWQGQPVYPITGGFRQPYPSSLSVDTSMSRFSHHMIPGPPGPHTTGIPHPAIVTPQVKQEHPHTDSDLMHVKPQHEQRKEQEPKRPHIKKPLNAFMLYMKEMRANVVAECTLKESAAINQILGRRWHALSREEQAKYYELARKERQLHMQLYPGWSARDNYGKKKKRKREKLQESASGTGPRMTAAYI

SEQ ID NO: 6845 - protein, 386 aa, Homo sapiens
MPQLSGGGGGGGGDPELCATDEMIPFKDEGDPQKEKIFAEISHPEEEGDLADIKSSLVNESEIIPASNGHEVARQAQTSQEPYHDKAREHPDDGKHPDGGLYNKGPSYSSYSGYIMMPNMNNDPYMSNGSLSPPIPRTSNKVPVVQPSHAVHPLTPLITYSDEHFSPGSHPSHIPSDVNSKQGMSRHPPAPDIPTFYPLSPGGVGQITPPLGWFSHHMIPGPPGPHTTGIPHPAIVTPQVKQEHPHTDSDLMHVKPQHEQRKEQEPKRPHIKKPLNAFMLYMKEMRANVVAECTLKESAAINQILGRRWHALSREEQAKYYELARKERQLHMQLYPGWSARDNYGKKKKRKREKLQESASGGKRSSFPTCKAKAATPGPLLEMEAC

SEQ ID NO: 6846 - protein, 371 aa, Homo sapiens
MPQLSGGGGGGGGDPELCATDEMIPFKDEGDPQKEKIFAEISHPEEEGDLADIKSSLVNESEIIPASNGHEVARQAQTSQEPYHDKAREHPDDGKHPDGGLYNKGPSYSSYSGYIMMPNMNNDPYMSNGSLSPPIPRTSNKVPVVQPSHAVHPLTPLITYSDEHFSPGSHPSHIPSDVNSKQGMSRHPPAPDIPTFYPLSPGGVGQITPPLGWFSHHMIPGPPGPHTTGIPHPAIVTPQVKQEHPHTDSDLMHVKPQHEQRKEQEPKRPHIKKPLNAFMLYMKEMRANVVAECTLKESAAINQILGRRWHALSREEQAKYYELARKERQLHMQLYPGWSARDNYGKKKKRKREKLQESASGTGPRMTAAYI

SEQ ID NO: 6847 - protein, 303 aa, Homo sapiens
MAEVARQAQTSQEPYHDKAREHPDDGKHPDGGLYNKGPSYSSYSGYIMMPNMNNDPYMSNGSLSPPIPRTSNKVPVVQPSHAVHPLTPLITYSDEHFSPGSHPSHIPSDVNSKQGMSRHPPAPDIPTFYPLSPGGVGQITPPLGWFSHHMIPGPPGPHTTGIPHPAIVTPQVKQEHPHTDSDLMHVKPQHEQRKEQEPKRPHIKKPLNAFMLYMKEMRANVVAECTLKESAAINQILGRRWHALSREEQAKYYELARKERQLHMQLYPGWSARDNYGKKKKRKREKLQESASGTGPRMTAAYI

SEQ ID NO: 6848 - protein, 499 aa, Homo sapiens
MNDDPSMEENGVERVCPESLLQSREYSSLPLPRHTSSTDGTITSSDPGLEILNMASCDLDRNSLCKKEEDTRSASPTIEAQGTSPAHDNIAFQDSTSKDKTILNLEAKEEPETIEEHKKEHASGDSVVSPLPVTTVKSVNLRQSENTSANEKEVEAEFLRLSLGFKCDWFTLEKRVKLEERSRDLAEENLKKEITNCLKLLESLTPLCEDDNQAQEIIKKLEKSIKFLSQCAARVASRAEMLGAINQESRVSKAVEVMIQHVENLKRMYAKEHAELEELKQVLLQNERSFNPLEDDDDCQIKKRSASLNSKPSSLRRVTIASLPRNIGNAGMVAGMENNDRFSRRSSSWRILGSKQSEHRPSLPRFISTYSWADAEEEKCELKTKDDSEPSGEETVERTRKPSLSEKKNNPSKWDVSSVYDTIASWATNLKSSIRKANKALWLSIAFIVLFAALMSFLTGQLFQKSVDAAPTQQEDSWTSLEHILWPFTRLRHNGPPPV

SEQ ID NO: 6849 - protein, 499 aa, Homo sapiens; identical to SEQ ID NO: 6848

SEQ ID NO: 6850 - protein, 499 aa, Homo sapiens; identical to SEQ ID NO: 6848

SEQ ID NO: 6851 - protein, 77 aa, Homo sapiens
MNDDPSMEENGVERVCPESLLQSREYSSLPLPRHTSSTDGTITSSDPGLEILNMASCDLDRNSLCKKEEDTRSASPT

SEQ ID NO: 6852 - protein, 8 aa, Homo sapiens
MNDDPSME

SEQ ID NO: 6853 - protein, 205 aa, Homo sapiens
MTPPERLFLPRVRGTTLHLLLLGLLLVLLPGAQGLPGVGLTPSAAQTARQHPKMHLAHSTLKPAAHLIGDPSKQNSLLWRANTDRAFLQDGFSLSNNSLLVPTSGIYFVYSQVVFSGKAYSPKATSSPLYLAHEVQLFSSQYPFHVPLLSSQKMVYPGLQEPWLHSMYHGAAFQLTQGDQLSTHTDGIPHLVLSPSTVFFGAFAL

SEQ ID NO: 6854 - protein, 205 aa, Homo sapiens; identical to SEQ ID NO: 6853

SEQ ID NO: 6855 - protein, 138 aa, Homo sapiens
MTPPERLFLPRVRGTTLHLLLLGLLLVLLPGAQGLPGVGLTPSAAQTARQHPKMHLAHSTLKPAAHLIGDPSKQNSLLWRANTDRAFLQDGFSLSNNSLLVPTSGIYFVYSQGSSPPLLWPFQQLKSSLIKSPELSKK

SEQ ID NO: 6856 - protein, 435 aa, Homo sapiens
MLLPWATSAPGLAWGPLVLGLFGLLAASQPQAVPPYASENQTCRDQEKEYYEPQHRICCSRCPPGTYVSAKCSRIRDTVCATCAENSYNEHWNYLTICQLCRPCDPVMGLEEIAPCTSKRKTQCRCQPGMFCAAWALECTHCELLSDCPPGTEAELKDEVGKGNNHCVPCKAGHFQNTSSPSARCQPHTRCENQGLVEAAPGTAQSDTTCKNPLEPLPPEMSGTMLMLAVLLPLAFFLLLATVFSCIWKSHPSLCRKLGSLLKRRPQGEGPNPVAGSWEPPKAHPYFPDLVQPLLPISGDVSPVSTGLPAAPVLEAGVPQQQSPLDLTREPQLEPGEQSQVAHGTNGIHVTGGSMTITGNIYIYNGPVLGGPPGPGDLPATPEPPYPIPEEGDPGPPGLSTPHQEDGKAWHLAETEHCGATPSNRGPRNQFITHD

SEQ ID NO: 6857 - protein, 328 aa, Homo sapiens
MGLEEIAPCTSKRKTQCRCQPGMFCAAWALECTHCELLSDCPPGTEAELKDEVGKGNNHCVPCKAGHFQNTSSPSARCQPHTRCENQGLVEAAPGTAQSDTTCKNPLEPLPPEMSGTMLMLAVLLPLAFFLLLATVFSCIWKSHPSLCRKLGSLLKRRPQGEGPNPVAGSWEPPKAHPYFPDLVQPLLPISGDVSPVSTGLPAAPVLEAGVPQQQSPLDLTREPQLEPGEQSQVAHGTNGIHVTGGSMTITGNIYIYNGPVLGGPPGPGDLPATPEPPYPIPEEGDPGPPGLSTPHQEDGKAWHLAETEHCGATPSNRGPRNQFITHD

SEQ ID NO: 6858 - protein, 574 aa, Homo sapiens
MALARGSRQLGALVWGACLCVLVHGQQAQPGQGSDPARWRQLIQWENNGQVYSLLNSGSEYVPAGPQRSESSSRVLLAGAPQAQQRRSHGSPRRRQAPSLPLPGRVGSDTVRGQARHPFGFGQVPDNWREVAVGDSTGMARARTSVSQQRHGGSASSVSASAFASTYRQQPSYPQQFPYPQAPFVSQYENYDPASRTYDQGFVYYRPAGGGVGAGAAAVASAGVIYPYQPRARYEEYGGGEELPEYPPQGFYPAPERPYVPPPPPPPDGLDRRYSHSLYSEGTPGFEQAYPDPGPEAAQAHGGDPRLGWYPPYANPPPEAYGPPRALEPPYLPVRSSDTPPPGGERNGAQQGRLSVGSVYRPNQNGRGLPDLVPDPNYVQASTYVQRAHLYSLRCAAEEKCLASTAYAPEATDYDVRVLLRFPQRVKNQGTADFLPNRPRHTWEWHSCHQHYHSMDEFSHYDLLDAATGKKVAEGHKASFCLEDSTCDFGNLKRYACTSHTQGLSPGCYDTYNADIDCQWIDITDVQPGNYILKVHVNPKYIVLESDFTNNVVRCNIHYTGRYVSATNCKIVQS

SEQ ID NO: 6859 - protein, 436 aa, Homo sapiens
MARARTSVSQQRHGGSASSVSASAFASTYRQQPSYPQQFPYPQAPFVSQYENYDPASRTYDQGFVYYRPAGGGVGAGAAAVASAGVIYPYQPRARYEEYGGGEELPEYPPQGFYPAPERPYVPPPPPPPDGLDRRYSHSLYSEGTPGFEQAYPDPGPEAAQAHGGDPRLGWYPPYANPPPEAYGPPRALEPPYLPVRSSDTPPPGGERNGAQQGRLSVGSVYRPNQNGRGLPDLVPDPNYVQASTYVQRAHLYSLRCAAEEKCLASTAYAPEATDYDVRVLLRFPQRVKNQGTADFLPNRPRHTWEWHSCHQHYHSMDEFSHYDLLDAATGKKVAEGHKASFCLEDSTCDFGNLKRYACTSHTQGLSPGCYDTYNADIDCQWIDITDVQPGNYILKVHVNPKYIVLESDFTNNVVRCNIHYTGRYVSATNCKIVQS

SEQ ID NO: 6860 - protein, 211 aa, Homo sapiens
MTTLTRQDLNFGQVVADVLCEFLEVAVHLILYVREVYPVGIFQKRKKYNVPVQMSCHPELNQYIQDTLHCVKPLLEKNDVEKVVVVILDKEHRPVEKFVFEITQPPLLSISSDSLLSHVEQLLRAFILKISVCDAVLDHNPPGCTFTVLVHTREAATRNMEKIQVIKDFPWILADEQDVHMHDPRLIPLKTMTSDILKMQLYVEERAHKGS

SEQ ID NO: 6861 - protein, 105 aa, Homo sapiens
MTTLTRQDLNFGQVVADVLCEFLEVAVHLILYVREVYPVGIFQKRKKYNVPVQMSCHPELNQYIQDTLHCVKPLLEKVRVHWAPQPSHPMLTPVPVCSQSNSGMG

SEQ ID NO: 6862 - protein, 176 aa, Homo sapiens
MTTLTRQDLNFGQVVADVLCEFLEVAVHLILYVREVYPVGIFQKRKKYNVPVQNDVEKVVVVILDKEHRPVEKFVFEITQPPLLSISSDSLLSHVEQLLRAFILKISVCDAVLDHNPPGVSTPHPLFPWHFHGYLGLVCVPRSMFGCSETHLFLTLRVHLLWEASLIDSTWLPSPY

SEQ ID NO: 6863 - protein, 211 aa, Homo sapiens; identical to SEQ ID NO: 6860

SEQ ID NO: 6864 - protein, 224 aa, Homo sapiens
MTTLTRQDLNFGQVVADVLCEFLEVAVHLILYVREVYPVGIFQKRKKYNVPVQMSCHPELNQYIQDTLHCVKPLLEKNDVEKVVVVILDKEHRPVEKFVFEITQPPLLSIRWAAPAPRPLAGISSDSLLSHVEQLLRAFILKISVCDAVLDHNPPGCTFTVLVHTREAATRNMEKIQVIKDFPWILADEQDVHMHDPRLIPLKTMTSDILKMQLYVEERAHKGS

SEQ ID NO: 6865 - protein, 224 aa, Homo sapiens; identical to SEQ ID NO: 6864

SEQ ID NO: 6866 - protein, 211 aa, Homo sapiens; identical to SEQ ID NO: 6860

SEQ ID NO: 6867 - protein, 198 aa, Homo sapiens [sequence omitted]

SEQ ID NO: 6868 - protein, 167 aa, Homo sapiens
MTTLTRQDLNFGQVVADVLCEFLEVAVHLILYVREVYPVGIFQKRKKYNVPVQMSCHPELNQYIQDTLHCVKPLLEKNDVEKVVVVILDKEHRPVEKFVFEITQPPLLSISSDSLLSHVEQLLRAFILKISVCDAVLDHNPPGCTFTVLVHTREAATRNMEKIQVIK

SEQ ID NO: 6869 - protein, 1052 aa, Homo sapiens
MAGMDSGNLKTARLWRDAALRARKLRSNLRQLTLTAAGACPGAGADALESPASPQLVLPANLGDIEALNLGNNGLEEVPEGLGSALGSLRVLVLRRNRFARLPPAVAELGHHLTELDVSHNRLTALGAEVVSALRELRKLNLSHNQLPALPAQLGALAHLEELDVSFNRLAHLPDSLSCLSRLRTLDVDHNQLTAFPRQLLQLVALEELDVSSNRLRGLPEDISALRALKILWLSGAELGTLPAGFCELASLESLMLDNNGLQALPAQFSCLQRLKMLNLSSNLFEEFPAALLPLAGLEELYLSRNQLTSVPSLISGLGRLLTLWLDNNRIRYLPDSIVELTGLEELVLQGNQIAVLPDHFGQLSRVGLWKIKDNPLIQPPYEVCMKGIPYIAAYQKELAHSQPAVQPRLKLLLMGHKAAGKTLLRHCLTEERVEGCPGGGDKEKCYPPSPPPVSKGIEVTSWTADASRGLRFIVYDLAGDESYEVIQPFFLSPGALYVLVVNLATYEPRHFPTTVGSFLHRVGARVPHAVVCIVGTHADLCGERELEEKCLDIHRQIALQEKHDAEGLSRLAKVVDEALARDFELRSASPHAAYYGVSDKNLRRRKAHFQYLLNHRLQILSPVLPVSCRDPRHLRRLRDKLLSVAEHREIFPNLHRVLPRSWQVLEELHFQPPQAQRLWLSWWDSARLGLQAGLTEDRLQSALSYLHESGKLLYFEDSPALKEHVFHNLTRLIDILNVFFQRDPSLLLHKLLLGTSGEGKAEGESSPPMARSTPSQELLRATQLHQYVEGFLLHGLLPAHVIRLLLKPHVQAQQDLQLLLELLEKMGLCYCLNKPKGKPLNGSTAWYKFPCYVQNEVPHAEAWINGTNLAGQSFVAEQLQIEYSFPFTFPLGLFARYSVQINSHVVHRSDGKFQIFAYRGKVPVVVSYRPARGVLQPDTLSIASHASLPNIWTAWQAITPLVEELNVLLQEWPGLHYTVHILCSKCLKRGSPNPHAFPGELLSQPRPEGVAEIICPKNGSERVNVALVYPPTPTVISPCSKKNVGEKHRNQ

SEQ ID NO: 6870 - protein, 182 aa, Homo sapiens
MGKGRFDEKENVSNCIQLKTSVIKGIKNQLIEQFPGIEPWLNQIMPKKDPVKIVRCHEHIEILTVNGELLFFRQREGPFYPTLRLLHKYPFILPHQQVDKGAIKFVLSGANIMCPGLTSPGAKLYPAAVDTIVAIMAEGKQHALCVGVMKMSAEDIEKVNKGIGIENIHYLNDGLWHMKTYK

SEQ ID NO: 6871 - protein, 181 aa, Homo sapiens
MFKKFDEKENVSNCIQLKTSVIKGIKNQLIEQFPGIEPWLNQIMPKKDPVKIVRCHEHIEILTVNGELLFFRQREGPFYPTLRLLHKYPFILPHQQVDKGAIKFVLSGANIMCPGLTSPGAKLYPAAVDTIVAIMAEGKQHALCVGVMKMSAEDIEKVNKGIGIENIHYLNDGLWHMKTYK

SEQ ID NO: 6872 - protein, 741 aa, Homo sapiens
MALFTPWKLSSQKLGFFLVTFGFIWGMMLLHFTIQQRTQPESSSMLREQILDLSKRYIKALAEENRNVVDGPYAGVMTAYDLKKTLAVLLDNILQRIGKLESKVDNLVVNGTGTNSTNSTTAVPSLVALEKINVADIINGAQEKCVLPPMDGYPHCEGKIKWMKDMWRSDPCYADYGVDGSTCSFFIYLSEVENWCPHLPWRAKNPYEEADHNSLAEIRTDFNILYSMMKKHEEFRWMRLRIRRMADAWIQAIKSLAEKQNLEKRKRKKVLVHLGLLTKESGFKIAETAFSGGPLGELVQWSDLITSLYLLGHDIRISASLAELKEIMKKVVGNRSGCPTVGDRIVELIYIDIVGLAQFKKTLGPSWVHYQCMLRVLDSFGTEPEFNHANYAQSKGHKTPWGKWNLNPQQFYTMFPHTPDNSFLGFVVEQHLNSSDIHHINEIKRQNQSLVYGKVDSFWKNKKIYLDIIHTYMEVHATVYGSSTKNIPSYVKNHGILSGRDLQFLLRETKLFVGLGFPYEGPAPLEAIANGCAFLNPKFNPPKSSKNTDFFIGKPTLRELTSQHPYAEVFIGRPHVWTVDLNNQEEVEDAVKAILNQKIEPYMPYEFTCEGMLQRINAFIEKQDFCHGQVMWPPLSALQVKLAEPGQSCKQVCQESQLICEPSFFQHLNKDKDMLKYKVTCQSSELAKDILVPSFDPKNKHCVFQGDLLLFSCAGAHPRHQRVCPCRDFIKGQVALCKDCL

SEQ ID NO: 6873 - protein, 741 aa, Homo sapiens; identical to SEQ ID NO: 6872

SEQ ID NO: 6874 - protein, 469 aa, Homo sapiens
MHSFPPLLLLLFWGVVSHSFPATLETQEQDVDLVQKYLEKYYNLKNDGRQVEKRRNSGPVVEKLKQMQEFFGLKVTGKPDAETLKVMKQPRCGVPDVAQFVLTEGNPRWEQTHLTYRIENYTPDLPRADVDHAIEKAFQLWSNVTPLTFTKVSEGQADIMISFVRGDHRDNSPFDGPGGNLAHAFQPGPGIGGDAHFDEDERWTNNFREYNLHRVAAHELGHSLGLSHSTDIGALMYPSYTFSGDVQLAQDDIDGIQAIYGRSQNPVQPIGPQTPKACDSKLTFDAITTIRGEVMFFKDRFYMRTNPFYPEVELNFISVFWPQLPNGLEAAYEFADRDEVRFFKGNKYWAVQGQNVLHGYPKDIYSSFGFPRTVKHIDAALSEENTGKTYFFVANKYWRYDEYKRSMDPGYPKMIAHDFPGIGHKVDAVFMKDGFFYFFHGTRQYKFDPKTKRILTLQKANSWFNCRKN

SEQ ID NO: 6875 - protein, 476 aa, Homo sapiens
MMHLAFLVLLCLPVCSAYPLSGAAKEEDSNKDLAQQYLEKYYNLEKDVKQFRRKDSNLIVKKIQGMQKFLGLEVTGKLDTDTLEVMRKPRCGVPDVGHFSSFPGMPKWRKTHLTYRIVNYTPDLPRDAVDSAIEKALKVWEEVTPLTFSRLYEGEADIMISFAVKEHGDFYSFDGPGHSLAHAYPPGPGLYGDIHFDDDEKWTEDASGTNLFLVAAHELGHSLGLFHSANTEALMYPLYNSFTELAQFRLSQDDVNGIQSLYGPPPASTEEPLVPTKSVPSGSEMPAKCDPALSFDAISTLRGEYLFFKDRYFWRRSHWNPEPEFHLISAFWPSLPSYLDAAYEVNSRDTVFIFKGNEFWAIRGNEVQAGYPRGIHTLGFPPTIRKIDAAVSDKEKKKTYFFAADKYWRFDENSQSMEQGFPRLIADDFPGVEPKVDAVLQAFGFFYFFSGSSQFEFDPNARMVTHILKSNSWLHC

SEQ ID NO: 6876 - protein, 488 aa, Homo sapiens
MAPAAWLRSAAARALLPPMLLLLLQPPPLLARALPPDAHHLHAERRGPQPWHAALPSSPAPAPATQEAPRPASSLRPPRCGVPDPSDGLSARNRQKRFVLSGGRWEKTDLTYRILRFPWQLVQEQVRQTMAEALKVWSDVTPLTFTEVHEGRADIMIDFARYWHGDDLPFDGPGGILAHAFFPKTHREGDVHFDYDETWTIGDDQGTDLLQVAAHEFGHVLGLQHTTAAKALMSAFYTFRYPLSLSPDDCRGVQHLYGQPWPTVTSRTPALGPQAGIDTNEIAPLEPDAPPDACEASFDAVSTIRGELFFFKAGFVWRLRGGQLQPGYPALASRHWQGLPSPVDAAFEDAQGHIWFFQGAQYWVYDGEKPVLGPAPLTELGLVRFPVHAALVWGPEKNKIYFFRGRDYWRFHPSTRRVDSPVPRRATDWRGVPSEIDAAFQDADGYAYFLRGRLYWKFDPVKVKALEGFPRLVGPDFFGCAEPANTFL

SEQ ID NO: 6877 - protein, 471 aa, Homo sapiens
MHPGVLAAFLFLSWTHCRALPLPSGGDEDDLSEEDLQFAERYLRSYYHPTNLAGILKENAASSMTERLREMQSFFGLEVTGKLDDNTLDVMKKPRCGVPDVGEYNVFPRTLKWSKMNLTYRIVNYTPDMTHSEVEKAFKKAFKVWSDVTPLNFTRLHDGIADIMISFGIKEHGDFYPFDGPSGLLAHAFPPGPNYGGDAHFDDDETWTSSSKGYNLFLVAAHEFGHSLGLDHSKDPGALMFPIYTYTGKSHFMLPDDDVQGIQSLYGPGDEDPNPKHPKTPDKCDPSLSLDAITSLRGETMIFKDRFFWRLHPQQVDAELFLTKSFWPELPNRIDAAYEHPSHDLIFIFRGRKFWALNGYDILEGYPKKISELGLPKEVKKISAAVHFEDTGKTLLFSGNQVWRYDDTNHIMDKDYPRLIEEDFPGIGDKVDAVYEKNGYIYFFNGPIQFEYSIWSNRIVRVMPANSILWC

SEQ ID NO: 6878 - protein, 489 aa, Homo sapiens
MHPGVLAAFLFLSWTHCRALPLPSGGDEDDLSEEDLQFAERYLRSYYHPTNLAGILKENAASSMTERLREMQSFFGLEVTGKLDDNTLDVMKKPRCGVPDVGEYNVFPRTLKWSKMNLTYRIVNYTPDMTHSEVEKAFKKAFKVWSDVTPLNFTRLHDGIADIMISFGIKEHGDFYPFDGPSGLLAHAFPPGPNYGGDAHFDDDETWTSSSKGYNLFLVAAHEFGHSLGLDHSKDPGALMFPIYTYTGKSHFMLPDDDVQGIQSLYGPGDEDPNPKHPKTPDKCDPSLSLDAITSLRGETMIFKDRFFWRLHPQQVDAELFLTKSFWPELPNRIDAAYEHPSHDLIFIFRGRKFWALNGYDILEGYPKKISELGLPKEVKKISAAVHFEDTGKTLLFSGNQVWRYDDTNHIMDKDYPRLIEEDFPGIGDKVDAVYEKNESHSVTQAGVHCRNLSSLQPPPPGFKRFSCLSLWSSWDYRLYLFFQRTHTV

SEQ ID NO: 6879 - protein, 383 aa, Homo sapiens [sequence omitted]

SEQ ID NO: 6880 - protein, 582 aa, Homo sapiens
MSPAPRPPRCLLLPLLTLGTALASLGSAQSSSFSPEAWLQQYGYLPPGDLRTHTQRSPQSLSAAIAAMQKFYGLQVTGKADADTMKAMRRPRCGVPDKFGAEIKANVRRKRYAIQGLKWQHNEITFCIQNYTPKVGEYATYEAIRKAFRVWESATPLRFREVPYAYIREGHEKQADIMIFFAEGFHGDSTPFDGEGGFLAHAYFPGPNIGGDTHFDSAEPWTVRNEDLNGNDIFLVAVHELGHALGLEHSSDPSAIMAPFYQWMDTENFVLPDDDRRGIQQLYGGESGFPTKMPPQPRTTSRPSVPDKPKNPTYGPNICDGNFDTVAMLRGEMFVFKERWFWRVRNNQVMDGYPMPIGQFWRGLPASINTAYERKDGKFVFFKGDKHWVFDEASLEPGYPKHIKELGRGLPTDKIDAALFWMPNGKTYFFRGNKYYRFNEELRAVDSEYPKNIKVWEGIPESPRGSFMGSDEVFTYFYKGNKYWKFNNQKLKVEPGYPKSALRDWMGCPSGGRPDEGTEEETEVIIIEVDEEGGGAVSAAAVVLPVLLLLLVLAVGLAVFFFRRHGTPRRLLYCQRSLLDKV

SEQ ID NO: 6881 - protein, 660 aa, Homo sapiens
MEALMARGALTGPLRALCLLGCLLSHAAAAPSPIIKFPGDVAPKTDKELAVQYLNTFYGCPKESCNLFVLKDTLKKMQKFFGLPQTGDLDQNTIETMRKPRCGNPDVANYNFFPRKPKWDKNQITYRIIGYTPDLDPETVDDAFARAFQVWSDVTPLRFSRIHDGEADIMINFGRWEHGDGYPFDGKDGLLAHAFAPGTGVGGDSHFDDDELWTLGEGQVVRVKYGNADGEYCKFPFLFNGKEYNSCTDTGRSDGFLWCSTTYNFEKDGKYGFCPHEALFTMGGNAEGQPCKFPFRFQGTSYDSCTTEGRTDGYRWCGTTEDYDRDKKYGFCPETAMSTVGGNSEGAPCVFPFTFLGNKYESCTSAGRSDGKMWCATTANYDDDRKWGFCPDQGYSLFLVAAHEFGHAMGLEHSQDPGALMAPIYTYTKNFRLSQDDIKGIQELYGASPDIDLGTGPTPTLGPVTPEICKQDIVFDGIAQIRGEIFFFKDRFIWRTVTPRDKPMGPLLVATFWPELPEKIDAVYEAPQEEKAVFFAGNEYWIYSASTLERGYPKPLTSLGLPPDVQRVDAAFNWSKNKKTYIFAGDKFWRYNEVKKKMDPGFPKLIADAWNAIPDNLDAVVDLQGGGHSYFFKGAYYLKLENQSLKSVKFGSIKSDWLGC

SEQ ID NO: 6882 - protein, 610 aa, Homo sapiens
MQYLNTFYGCPKESCNLFVLKDTLKKMQKFFGLPQTGDLDQNTIETMRKPRCGNPDVANYNFFPRKPKWDKNQITYRIIGYTPDLDPETVDDAFARAFQVWSDVTPLRFSRIHDGEADIMINFGRWEHGDGYPFDGKDGLLAHAFAPGTGVGGDSHFDDDELWTLGEGQVVRVKYGNADGEYCKFPFLFNGKEYNSCTDTGRSDGFLWCSTTYNFEKDGKYGFCPHEALFTMGGNAEGQPCKFPFRFQGTSYDSCTTEGRTDGYRWCGTTEDYDRDKKYGFCPETAMSTVGGNSEGAPCVFPFTFLGNKYESCTSAGRSDGKMWCATTANYDDDRKWGFCPDQGYSLFLVAAHEFGHAMGLEHSQDPGALMAPIYTYTKNFRLSQDDIKGIQELYGASPDIDLGTGPTPTLGPVTPEICKQDIVFDGIAQIRGEIFFFKDRFIWRTVTPRDKPMGPLLVATFWPELPEKIDAVYEAPQEEKAVFFAGNEYWIYSASTLERGYPKPLTSLGLPPDVQRVDAAFNWSKNKKTYIFAGDKFWRYNEVKKKMDPGFPKLIADAWNAIPDNLDAVVDLQGGGHSYFFKGAYYLKLENQSLKSVKFGSIKSDWLGC

SEQ ID NO: 6883 - protein, 584 aa, Homo sapiens
MQKFFGLPQTGDLDQNTIETMRKPRCGNPDVANYNFFPRKPKWDKNQITYRIIGYTPDLDPETVDDAFARAFQVWSDVTPLRFSRIHDGEADIMINFGRWEHGDGYPFDGKDGLLAHAFAPGTGVGGDSHFDDDELWTLGEGQVVRVKYGNADGEYCKFPFLFNGKEYNSCTDTGRSDGFLWCSTTYNFEKDGKYGFCPHEALFTMGGNAEGQPCKFPFRFQGTSYDSCTTEGRTDGYRWCGTTEDYDRDKKYGFCPETAMSTVGGNSEGAPCVFPFTFLGNKYESCTSAGRSDGKMWCATTANYDDDRKWGFCPDQGYSLFLVAAHEFGHAMGLEHSQDPGALMAPIYTYTKNFRLSQDDIKGIQELYGASPDIDLGTGPTPTLGPVTPEICKQDIVFDGIAQIRGEIFFFKDRFIWRTVTPRDKPMGPLLVATFWPELPEKIDAVYEAPQEEKAVFFAGNEYWIYSASTLERGYPKPLTSLGLPPDVQRVDAAFNWSKNKKTYIFAGDKFWRYNEVKKKMDPGFPKLIADAWNAIPDNLDAVVDLQGGGHSYFFKGAYYLKLENQSLKSVKFGSIKSDWLGC

SEQ ID NO: 6884 - protein, 477 aa, Homo sapiens
MKSLPILLLLCVAVCSAYPLDGAARGEDTSMNLVQKYLENYYDLKKDVKQFVRRKDSGPVVKKIREMQKFLGLEVTGKLDSDTLEVMRKPRCGVPDVGHFRTFPGIPKWRKTHLTYRIVNYTPDLPKDAVDSAVEKALKVWEEVTPLTFSRLYEGEADIMISFAVREHGDFYPFDGPGNVLAHAYAPGPGINGDAHFDDDEQWTKDTTGTNLFLVAAHEIGHSLGLFHSANTEALMYPLYHSLTDLTRFRLSQDDINGIQSLYGPPPDSPETPLVPTEPVPPEPGTPANCDPALSFDAVSTLRGEILIFKDRHFWRKSLRKLEPELHLISSFWPSLPSGVDAAYEVTSKDLVFIFKGNQFWAIRGNEVRAGYPRGIHTLGFPPTVRKIDAAISDKEKNKTYFFVEDKYWRFDEKRNSMEPGFPKQIAEDFPGIDSKIDAVFEEFGFFYFFTGSSQLEFDPNAKKVTHTLKSNSWLNC

SEQ ID NO: 6885 - protein, 267 aa, Homo sapiens
MRLTVLCAVCLLPGSLALPLPQEAGGMSELQWEQAQDYLKRFYLYDSETKNANSLEAKLKEMQKFFGLPITGMLNSRVIEIMQKPRCGVPDVAEYSLFPNSPKWTSKVVTYRIVSYTRDLPHITVDRLVSKALNMWGKEIPLHFRKVVWGTADIMIGFARGAHGDSYPFDGPGNTLAHAFAPGTGLGGDAHFDEDERWTDGSSLGINFLYAATHELGHSLGMGHSSDPNAVMYPTYGNGDPQNFKLSQDDIKGIQKLYGKRSNSRKK

SEQ ID NO: 6886 - protein, 707 aa, Homo sapiens
MSLWQPLVLVLLVLGCCFAAPRQRQSTLVLFPGDLRTNLTDRQLAEEYLYRYGYTRVAEMRGESKSLGPALLLLQKQLSLPETGELDSATLKAMRTPRCGVPDLGRFQTFEGDLKWHHHNITYWIQNYSEDLPRAVIDDAFARAFALWSAVTPLTFTRVYSRDADIVIQFGVAEHGDGYPFDGKDGLLAHAFPPGPGIQGDAHFDDDELWSLGKGVVVPTRFGNADGAACHFPFIFEGRSYSACTTDGRSDGLPWCSTTANYDTDDRFGFCPSERLYTQDGNADGKPCQFPFIFQGQSYSACTTDGRSDGYRWCATTANYDRDKLFGFCPTRADSTVMGGNSAGELCVFPFTFLGKEYSTCTSEGRGDGRLWCATTSNFDSDKKWGFCPDQGYSLFLVAAHEFGHALGLDHSSVPEALMYPMYRFTEGPPLHKDDVNGIRHLYGPRPEPEPRPPTTTTPQPTAPPTVCPTGPPTVHPSERPTAGPTGPPSAGPTGPPTAGPSTATTVPLSPVDDACNVNIFDAIAEIGNQLYLFKDGKYWRFSEGRGSRPQGPFLIADKWPALPRKLDSVFEERLSKKLFFFSGRQVWVYTGASVLGPRRLDKLGLGADVAQVTGALRSGRGKMLLFSGRRLWRFDVKAQMVDPRSASEVDRMFPGVPLDTHDVFQYREKAYFCQDRFYWRVSSRSELNQVDQVGYVTYDILQCPED

SEQ ID NO: 6887 - protein, 277 aa, Homo sapiens
MGGNSAGELCVFPFTFLGKEYSNFDSDKKWGFCPDQGYSLFLVAAHEFGHALGLDHSSVPEALMYPMYRFTEGPPLHKDDVNGIRHLYGPRPEPEPRPPTTTTPQPTAPPTVCPTGPPTVHPPFLIADKWPALPRKLDSVFEERLSKKLFFFSGRQVWVYTGASVLGPRRLDKLGLGADVAQVTGALRSGRGKMLLFSGRRLWRFDVKAQMVDPRSASEVDRMFPGVPLDTHDVFQYREKAYFCQDRFYWRVSSRSELNQVDQVGYVTYDILQCPED

SEQ ID NO: 6888 - protein, 107 aa, Homo sapiens
MAGEDVGAPPDHLWVHQEGIYRDEYQRTWVAVVEEETSFLRARVQQIQVPLGDAARPSHLLTSQLPLMWQLYPEERYMDNNSRLWQIQHHLMVRGVQELLLKLLPDD

SEQ ID NO: 6889 - protein, 107 aa, Homo sapiens; identical to SEQ ID NO: 6888

SEQ ID NO: 6890 - protein, 442 aa, Homo sapiens
MVRSRQMCNTNMSVPTDGAVTTSQIPASEQETLVRPKPLLLKLLKSVGAQKDTYTMKEVLFYLGQYIMTKRLYDEKQQHIVYCSNDLLGDLFGVPSFSVKEHRKIYTMIYRNLVVVNQQEENSDELSGERQRKRHKSDSISLSFDESLALCVIREICCERSSSSESTGTPSNPDLDAGVSEHSGDWLDQDSVSDQFSVEFEVESLDSEDYSLSEEGQELSDEDDEVYQVTVYQAGESDTDSFEEDPEISLADYWKCTSCNEMNPPLPSHCNRCWALRENWLPEDKGKDKGEISEKAKLENSTQAEEGFDVPDCKKTIVNDSRESCVEENDDKITQASQSQESEDYSQPSTSSSIIYSSQEDVKEFEREETQDKEESVESSLPLNAIEPCVICQGRPKNGCIVHGKTGHLMACFTCAKKLKKRNKPCPVCRQPIQMIVLTYFP

SEQ ID NO: 6891 - protein, 436 aa, Homo sapiens
MCNTNMSVPTDGAVTTSQIPASEQETLVRPKPLLLKLLKSVGAQKDTYTMKEVLFYLGQYIMTKRLYDEKQQHIVYCSNDLLGDLFGVPSFSVKEHRKIYTMIYRNLVVVNQQEENSDELSGERQRKRHKSDSISLSFDESLALCVIREICCERSSSSESTGTPSNPDLDAGVSEHSGDWLDQDSVSDQFSVEFEVESLDSEDYSLSEEGQELSDEDDEVYQVTVYQAGESDTDSFEEDPEISLADYWKCTSCNEMNPPLPSHCNRCWALRENWLPEDKGKDKGEISEKAKLENSTQAEEGFDVPDCKKTIVNDSRESCVEENDDKITQASQSQESEDYSQPSTSSSIIYSSQEDVKEFEREETQDKEESVESSLPLNAIEPCVICQGRPKNGCIVHGKTGHLMACFTCAKKLKKRNKPCPVCRQPIQMIVLTYFP

SEQ ID NO: 6892 - protein, 321 aa, Homo sapiens
MCNTNMSVPTDGAVTTSQIPASEQETLVRPKPLLLKLLKSVGAQKDTYTMKEDLDAGVSEHSGDWLDQDSVSDQFSVEFEVESLDSEDYSLSEEGQELSDEDDEVYQVTVYQAGESDTDSFEEDPEISLADYWKCTSCNEMNPPLPSHCNRCWALRENWLPEDKGKDKGEISEKAKLENSTQAEEGFDVPDCKKTIVNDSRESCVEENDDKITQASQSQESEDYSQPSTSSSIIYSSQEDVKEFEREETQDKEESVESSLPLNAIEPCVICQGRPKNGCIVHGKTGHLMACFTCAKKLKKRNKPCPVCRQPIQMIVLTYFP

SEQ ID NO: 6893 - protein, 452 aa, Homo sapiens
MVRSRQMCNTNMSVPTDGAVTTSQIPASEQETLVRPKPLLLKLLKSVGAQKDTYTMKEKIYTMIYRNLVVVNQQESSDSGTSVSENRCHLEGGSDQKDLVQELQEEKPSSSHLVSRPSTSSRRRAISETEENSDELSGERQRKRHKSDSISLSFDESLALCVIREICCERSSSSESTGTPSNPDLDAGVSEHSGDWLDQDSVSDQFSVEFEVESLDSEDYSLSEEGQELSDEDDEVYQVTVYQAGESDTDSFEEDPEISLADYWKCTSCNEMNPPLPSHCNRCWALRENWLPEDKGKDKGEISEKAKLENSTQAEEGFDVPDCKKTIVNDSRESCVEENDDKITQASQSQESEDYSQPSTSSSIIYSSQEDVKEFEREETQDKEESVESSLPLNAIEPCVICQGRPKNGCIVHGKTGHLMACFTCAKKLKKRNKPCPVCRQPIQMIVLTYFP

SEQ ID NO: 6894 - protein, 256 aa, Homo sapiens
MCNTNMSVPTDGAVTTSQIPASEQETLVRPKPLLLKLLKSVGAQKDTYTMKEVLFYLGQYIMTKRLYDEKQQHIVYCSNDLLGDLFGVPSFSVKEHRKIYTMIYRNLVVVNQQESSDSGTSVSENRCHLEGGSDQKDLVQELQEEKPSSSHLVSRPSTSSRRRAISETEENSDELSGERQRKRHKSDSISLSFDESLALCVIREICCERSSSSESTGTPSNPDLLLGVYQVTVYQAGESDTDSFEEDPEISLAHYL

SEQ ID NO: 6895 - protein, 265 aa, Homo sapiens
MSVPTDGAVTTSQIPASEQETLDLDAGVSEHSGDWLDQDSVSDQFSVEFEVESLDSEDYSLSEEGQELSDEDDEDYWKCTSCNEMNPPLPSHCNRCWALRENWLPEDKGKDKGEISEKAKLENSTQAEEGFDVPDCKKTIVNDSRESCVEENDDKITQASQSQESEDYSQPSTSSSIIYSSQEDVKEFEREETQDKEESVESSLPLNAIEPCVICQGRPKNGCIVHGKTGHLMACFTCAKKLKKRNKPCPVCRQPIQMIVLTYFP

SEQ ID NO: 6896 - protein, 466 aa, Homo sapiens
MCNTNMSVPTDGAVTTSQIPASEQETLVLFYLGQYIMTKRLYDEKQQHIVYCSNDLLGDLFGVPSFSVKEHRKIYTMIYRNLVVVNQQESSDSGTSVSENRCHLEGGSDQKDLVQELQEEKPSSSHLVSRPSTSSRRRAISETEENSDELSGERQRKRHKSDSISLSFDESLALCVIREICCERSSSSESTGTPSNPDLDAGVSEHSGDWLDQDSVSDQFSVEFEVESLDSEDYSLSEEGQELSDEDDEVYQVTVYQAGESDTDSFEEDPEISLADYWKCTSCNEMNPPLPSHCNRCWALRENWLPEDKGKDKGEISEKAKLENSTQAEEGFDVPDCKKTIVNDSRESCVEENDDKITQASQSQESEDYSQPSTSSSIIYSSQEDVKEFEREETQDKEESVESSLPLNAIEPCVICQGRPKNGCIVHGKTGHLMACFTCAKKLKKRNKPCPVCRQPIQMIVLTYFP

SEQ ID NO: 6897 - protein, 321 aa, Homo sapiens; identical to SEQ ID NO: 6892

SEQ ID NO: 6898 - protein, 159 aa, Homo sapiens
MCNTNMSVPTDGAVTTSQIPASEQETLVRPKPLLLKLLKSVGAQKDTYTMKEDLDAGVSEHSGDWLDQDSVSDQFSVEFEVESLDSEDYSLSEEGQELSDEDDEVYQVTVYQAGESDTDSFEEDPEISLADYWKCLKKRNKPCPVCRQPIQMIVLTYFP

SEQ ID NO: 6899 - protein, 296 aa, Homo sapiens
MCNTNMSVPTDGAVTTSQIPASEQETLDLDAGVSEHSGDWLDQDSVSDQFSVEFEVESLDSEDYSLSEEGQELSDEDDEVYQVTVYQAGESDTDSFEEDPEISLADYWKCTSCNEMNPPLPSHCNRCWALRENWLPEDKGKDKGEISEKAKLENSTQAEEGFDVPDCKKTIVNDSRESCVEENDDKITQASQSQESEDYSQPSTSSSIIYSSQEDVKEFEREETQDKEESVESSLPLNAIEPCVICQGRPKNGCIVHGKTGHLMACFTCAKKLKKRNKPCPVCRQPIQMIVLTYFP

SEQ ID NO: 6900 - protein, 243 aa, Homo sapiens
MCNTNMSVPTDGAVTTSQIPASEQETLVRPKPLLLKLLKSVGAQKDTYTMKEDYWKCTSCNEMNPPLPSHCNRCWALRENWLPEDKGKDKGEISEKAKLENSTQAEEGFDVPDCKKTIVNDSRESCVEENDDKITQASQSQESEDYSQPSTSSSIIYSSQEDVKEFEREETQDKEESVESSLPLNAIEPCVICQGRPKNGCIVHGKTGHLMACFTCAKKLKKRNKPCPVCRQPIQMIVLTYFP

SEQ ID NO: 6901 - protein, 218 aa, Homo sapiens
MCNTNMSVPTDGAVTTSQIPASEQETLDYWKCTSCNEMNPPLPSHCNRCWALRENWLPEDKGKDKGEISEKAKLENSTQAEEGFDVPDCKKTIVNDSRESCVEENDDKITQASQSQESEDYSQPSTSSSIIYSSQEDVKEFEREETQDKEESVESSLPLNAIEPCVICQGRPKNGCIVHGKTGHLMACFTCAKKLKKRNKPCPVCRQPIQMIVLTYFP

SEQ ID NO: 6902 - protein, 218 aa, Homo sapiens; identical to SEQ ID NO: 6901

SEQ ID NO: 6903 - protein, 256 aa, Homo sapiens
MCNTNMSVPTDGAVTTSQIPASEQETLVRPKPLLLKLLKSVGAQKDTYTMKEVLFYLGQYIMTKRLYDEKQQHIVYCSNDLLGDLFGVPSFSVKEHRKIYTMIYRNLVVVNQQESSDSGTSVSENRCHLEGGSDQKDLVQELQEEKPSSSHLVSRPSTSSRRRAISETEENSDELSGERQRKRHKSDSISLSFDESLALCVIREICCERSSSSESTGTPSNPDLDAGVYQVTVYQAGESDTDSFEEDPEISLADYW

SEQ ID NO: 6904 - protein, 270 aa, Homo sapiens
MCNTNMSVPTDGAVTTSQIPASEQETLDLDAGVSEHSGDWLDQDSVSDQFSVEFEVESLDSEDYSLSEEGQELSDEDDEDYWKCTSCNEMNPPLPSHCNRCWALRENWLPEDKGKDKGEISEKAKLENSTQAEEGFDVPDCKKTIVNDSRESCVEENDDKITQASQSQESEDYSQPSTSSSIIYSSQEDVKEFEREETQDKEESVESSLPLNAIEPCVICQGRPKNGCIVHGKTGHLMACFTCAKKLKKRNKPCPVCRQPIQMIVLTYFP

SEQ ID NO: 6905 - protein, 497 aa, Homo sapiens
MVRSRQMCNTNMSVPTDGAVTTSQIPASEQETLVRPKPLLLKLLKSVGAQKDTYTMKEVLFYLGQYIMTKRLYDEKQQHIVYCSNDLLGDLFGVPSFSVKEHRKIYTMIYRNLVVVNQQESSDSGTSVSENRCHLEGGSDQKDLVQELQEEKPSSSHLVSRPSTSSRRRAISETEENSDELSGERQRKRHKSDSISLSFDESLALCVIREICCERSSSSESTGTPSNPDLDAGVSEHSGDWLDQDSVSDQFSVEFEVESLDSEDYSLSEEGQELSDEDDEVYQVTVYQAGESDTDSFEEDPEISLADYWKCTSCNEMNPPLPSHCNRCWALRENWLPEDKGKDKGEISEKAKLENSTQAEEGFDVPDCKKTIVNDSRESCVEENDDKITQASQSQESEDYSQPSTSSSIIYSSQEDVKEFEREETQDKEESVESSLPLNAIEPCVICQGRPKNGCIVHGKTGHLMACFTCAKKLKKRNKPCPVCRQPIQMIVLTYFP

SEQ ID NO: 6906 - protein, 130 aa, Homo sapiens
MCNTNMSVPTDGAVTTSQIPASEQETLVRPKPLLLKLLKSVGAQKDTYTMKEFEREETQDKEESVESSLPLNAIEPCVICQGRPKNGCIVHGKTGHLMACFTCAKKLKKRNKPCPVCRQPIQMIVLTYFP

SEQ ID NO: 6907 - protein, 257 aa, Homo sapiens
MCNTNMSVPTDGAVTTSQIPASEQETLVRPKPLLLKLLKSVGAQKDTYTMKEVLFYLGQYIMTKRLYDEKQQHIVYCSNDLLGDLFGVPSFSVKEHRKIYTMIYRNLVVVNQQESSDSGTSVSENRCHLEGGSDQKDLVQELQEEKPSSSHLVSRPSTSSRRRAISETEENSDELSGERQRKRHKSDSISLSFDESLALCVIREICCERSSSSESTGTPSNPDLDAGVSEHSGDWLDQDSVSDQFSVEFEVESLDSE

SEQ ID NO: 6908 - protein, 296 aa, Homo sapiens; identical to SEQ ID NO: 6899

SEQ ID NO: 6909 - protein, 446 aa, Homo sapiens
MCNTNMSVPTDGAVTTSQIPASEQETLVRPKPLLLKLLKSVGAQKDTYTMKEKIYTMIYRNLVVVNQQESSDSGTSVSENRCHLEGGSDQKDLVQELQEEKPSSSHLVSRPSTSSRRRAISETEENSDELSGERQRKRHKSDSISLSFDESLALCVIREICCERSSSSESTGTPSNPDLDAGVSEHSGDWLDQDSVSDQFSVEFEVESLDSEDYSLSEEGQELSDEDDEVYQVTVYQAGESDTDSFEEDPEISLADYWKCTSCNEMNPPLPSHCNRCWALRENWLPEDKGKDKGEISEKAKLENSTQAEEGFDVPDCKKTIVNDSRESCVEENDDKITQASQSQESEDYSQPSTSSSIIYSSQEDVKEFEREETQDKEESVESSLPLNAIEPCVICQGRPKNGCIVHGKTGHLMACFTCAKKLKKRNKPCPVCRQPIQMIVLTYFP

SEQ ID NO: 6910 - protein, 213 aa, Homo sapiens
MPNFVVDWRVYTDSLFLTVDFGLCAEESSTSRKRTTEDDIPTLPTSEHKCIHSREDEDLIENLAQDETSRLDLGFEEWDVAGLPWWFLGNLRSNYTPRSNGSTDLQTNQDVGTAIVSDTTDDLWFLNESVSEQLGVGIKVEAADTEQTSEEVGKVSDKKVIEVGKNDDLEDSKSLSDDTDVEVTSEDEWQCTECKKFNSPSKRYCFRCWALRK

SEQ ID NO: 6911 - protein, 131 aa, Homo sapiens
MTSFSTSAQCSTSDSACRISPGQINQVRPKLPLLKILHAAGAQGEMFTVKEVMHYLGQYIMVKQLYDQQEQHMVYCGGDLLGELLGRQSFSVKDPSPLYDMLRKNLVTLATATTEMGHLFCRISHALELAD

SEQ ID NO: 6912 - protein, 490 aa, Homo sapiens
MTSFSTSAQCSTSDSACRISPGQINQVRPKLPLLKILHAAGAQGEMFTVKEVMHYLGQYIMVKQLYDQQEQHMVYCGGDLLGELLGRQSFSVKDPSPLYDMLRKNLVTLATATTDAAQTLALAQDHSMDIPSQDQLKQSAEESSTSRKRTTEDDIPTLPTSEHKCIHSREDEDLIENLAQDETSRLDLGFEEWDVAGLPWWFLGNLRSNYTPRSNGSTDLQTNQDVGTAIVSDTTDDLWFLNESVSEQLGVGIKVEAADTEQTSEEVGKVSDKKVIEVGKNDDLEDSKSLSDDTDVEVTSEDEWQCTECKKFNSPSKRYCFRCWALRKDWYSDCSKLTHSLSTSDITAIPEKENEGNDVPDCRRTISAPVVRPKDAYIKKENSKLFDPCNSVEFLDLAHSSESQETISSMGEQLDNLSEQRTDTENMEDCQNLLKPCSLCEKRPRDGNIIHGRTGHLVTCFHCARRLKKAGASCPICKKEIQLVIKVFIA

SEQ ID NO: 6913 - protein, 164 aa, Homo sapiens
MTSFSTSAQCSTSDSACRISPGQINQENEGNDVPDCRRTISAPVVRPKDAYIKKENSKLFDPCNSVEFLDLAHSSESQETISSMGEQLDNLSEQRTDTENMEDCQNLLKPCSLCEKRPRDGNIIHGRTGHLVTCFHCARRLKKAGASCPICKKEIQLVIKVFIA

SEQ ID NO: 6914 - protein, 140 aa, Homo sapiens
MTSFSTSAQCSTSDSACRISPGQINQVRPKLPLLKILHAAGAQGEMFTVKEVMHYLGQYIMVKQLYDQQEQHMVYCGGDLLGELLGRQSFSVKDPSPLYDMLRKNLVTLATATTAKCRGKFHFQKKNYRRRYPHTAYLRA

SEQ ID NO: 6915 - protein, 171 aa, Homo sapiens
DLIENLAQDETSRLDLGFEEWDVAGLPWWFLGNLRSNYTPRSNGSTDLQTNQVIEVGKNDDLEDSKSLSDDTDVEVTSEDEWQCTECKKFNSPSKRYCFRCWALRKDWYSDCSKLTHSLSTSDITAIPEKENEGNDVPDCRRTISAPVVRPKDAYIKKENSKLFDPCNSVE

SEQ ID NO: 6916 - protein, 440 aa, Homo sapiens
MTSFSTSAQCSTSDSACRISPGQINQVRPKLPLLKILHAAGAQGEMFTVKEVMHYLGQYIMVKQLYDQQEQHMVYCGGDLLGELLGRQSFSVKDPSPLYDMLRKNLVTLATATTDAAQTLALAQDHSMDIPSQDQLKQSAEESSTSRKRTTEDDIPTLPTSEHKCIHSREDEDLIENLAQDETSRLDLGFEEWDVAGLPWWFLGNLRSNYTPRSNGSTDLQTNQVIEVGKNDDLEDSKSLSDDTDVEVTSEDEWQCTECKKFNSPSKRYCFRCWALRKDWYSDCSKLTHSLSTSDITAIPEKENEGNDVPDCRRTISAPVVRPKDAYIKKENSKLFDPCNSVEFLDLAHSSESQETISSMGEQLDNLSEQRTDTENMEDCQNLLKPCSLCEKRPRDGNIIHGRTGHLVTCFHCARRLKKAGASCPICKKEIQLVIKVFIA

SEQ ID NO: 6917 - protein, 127 aa, Homo sapiens
MTSFSTSAQCSTSDSACRISPGQINQVRPKLPLLKILHAAGAQGEMFTVKEVMHYLGQYIMVKQLYDQQEQHMVYCGGDLLGELLGRQSFSVKDPSPLYDMLRKNLVTLATATTGCQRRVNGPQRAW

SEQ ID NO: 6918 - protein, 153 aa, Homo sapiens
MTSFSTSAQCSTSDSACRISPGQINQVRPKLPLLKILHAAGAQGEMFTVKEVMHYLGQYIMVKQLYDQQEQHMVYCGGDLLGELLGRQSFSVKDPSPLYDMLRKNLVTLATATTGSQYGYSKSRPTEAKCRGKFHFQKKNYRRRYPHTAYLRA

SEQ ID NO: 6919 - protein, 2549 aa, Homo sapiens
MLGTGPAAATTAATTSSNVSVLQQFASGLKSRNEETRAKAAKELQHYVTMELREMSQEESTRFYDQLNHHIFELVSSSDANERKGGILAIASLIGVEGGNATRIGRFANYLRNLLPSNDPVVMEMASKAIGRLAMAGDTFTAEYVEFEVKRALEWLGADRNEGRRHAAVLVLRELAISVPTFFFQQVQPFFDNIFVAVWDPKQAIREGAVAALRACLILTTQREPKEMQKPQWYRHTFEEAEKGFDETLAKEKGMNRDDRIHGALLILNELVRISSMEGERLREEMEEITQQQLVHDKYCKDLMGFGTKPRHITPFTSFQAVQPQQSNALVGLLGYSSHQGLMGFGTSPSPAKSTLVESRCCRDLMEEKFDQVCQWVLKCRNSKNSLIQMTILNLLPRLAAFRPSAFTDTQYLQDTMNHVLSCVKKEKERTAAFQALGLLSVAVRSEFKVYLPRVLDIIRAALPPKDFAHKRQKAMQVDATVFTCISMLARAMGPGIQQDIKELLEPMLAVGLSPALTAVLYDLSRQIPQLKKDIQDGLLKMLSLVLMHKPLRHPGMPKGLAHQLASPGLTTLPEASDVGSITLALRTLGSFEFEGHSLTQFVRHCADHFLNSEHKEIRMEAARTCSRLLTPSIHLISGHAHVVSQTAVQVVADVLSKLLVVGITDPDPDIRYCVLASLDERFDAHLAQAENLQALFVALNDQVFEIRELAICTVGRLSSMNPAFVMPFLRKMLIQILTELEHSGIGRIKEQSARMLGHLVSNAPRLIRPYMEPILKALILKLKDPDPDPNPGVINNVLATIGELAQVSGLEMRKWVDELFIIIMDMLQDSSLLAKRQVALWTLGQLVASTGYVVEPYRKYPTLLEVLLNFLKTEQNQGTRREAIRVLGLLGALDPYKHKVNIGMIDQSRDASAVSLSESKSSQDSSDYSTSEMLVNMGNLPLDEFYPAVSMVALMRIFRDQSLSHHHTMVVQAITFIFKSLGLKCVQFLPQVMPTFLNVIRVCDGAIREFLFQQLGMLVSFVKSHIRPYMDEIVTLMREFWVMNTSIQSTIILLIEQIVVALGGEFKLYLPQLIPHMLRVFMHDNSPGRIVSIKLLAAIQLFGANLDDYLHLLLPPIVKLFDAPEAPLPSRKAALETVDRLTESLDFTDYASRIIHPIVRTLDQSPELRSTAMDTLSSLVFQLGKKYQIFIPMVNKVLVRHRINHQRYDVLICRIVKGYTLADEEEDPLIYQHRMLRSGQGDALASGPVETGPMKKLHVSTINLQKAWGAARRVSKDDWLEWLRRLSLELLKDSSSPSLRSCWALAQAYNPMARDLFNAAFVSCWSELNEDQQDELIRSIELALTSQDIAEVTQTLLNLAEFMEHSDKGPLPLRDDNGIVLLGERAAKCRAYAKALHYKELEFQKGPTPAILESLISINNKLQQPEAAAGVLEYAMKHFGELEIQATWYEKLHEWEDALVAYDKKMDTNKDDPELMLGRMRCLEALGEWGQLHQQCCEKWTLVNDETQAKMARMAAAAAWGLGQWDSMEEYTCMIPRDTHDGAFYRAVLALHQDLFSLAQQCIDKARDLLDAELTAMAGESYSRAYGAMVSCHMLSELEEVIQYKLVPERREIIRQIWWERLQGCQRIVEDWQKILMVRSLVVSPHEDMRTWLKYASLCGKSGRLALAHKTLVLLLGVDPSRQLDHPLPTVHPQVTYAYMKNMWKSARKIDAFQHMQHFVQTMQQQAQHAIATEDQQHKQELHKLMARCFLKLGEWQLNLQGINESTIPKVLQYYSAATEHDRSWYKAWHAWAVMNFEAVLHYKHQNQARDEKKKLRHASGANITNATTAATTAATATTTASTEGSNSESEAESTENSPTPSPLQKKVTEDLSKTLLMYTVPAVQGFFRSISLSRGNNLQDTLRVLTLWFDYGHWPDVNEALVEGVKAIQIDTWLQVIPQLIARIDTPRPLVGRLIHQLLTDIGRYHPQALIYPLTVASKSTTTARHNAANKILKNMCEHSNTLVQQAMMVSEELIRVAILWHEMWHEGLEEASRLYFGERNVKGMFEVLEPLHAMMERGPQTLKETSFNQAYGRDLMEAQEWCRKYMKSGNVKDLTQAWDLYYHVFRRISKQLPQLTSLELQYVSPKLLMCRDLELAVPGTYDPNQPIIRIQSIAPSLQVITSKQRPRKLTLMGSNGHEFVFLLKGHEDLRQDERVMQLFGLVNTLLANDPTSLRKNLSIQRYAVIPLSTNSGLIGWVPHCDTLHALIRDYREKKKILLNIEHRIMLRMAPDYDHLTLMQKVEVFEHAVNNTAGDDLAKLLWLKSPSSEVWFDRRTNYTRSLAVMSMVGYILGLGDRHPSNLMLDRLSGKILHIDFGDCFEVAMTREKFPEKIPFRLTRMLTNAMEVTGLDGNYRITCHTVMEVLREHKDSVMAVLEAFVYDPLLNWRLMDTNTKGNKRSRTRTDSYSAGQSVEILDGVELGEPAHKKTGTTVPESIHSFIGDGLVKPEALNKKAIQIINRVRDKLTGRDFSHDDTLDVPTQVELLIKQATSHENLCQCYIGWCPFW

SEQ ID NO: 6920 - protein, 754 aa, Homo sapiens
MNFEAVLHYKHQNQARDEKKKLRHASGANITNATTAATTAATATTTASTEGSNSESEAESTENSPTPSPLQKKVTEDLSKTLLMYTVPAVQGFFRSISLSRGNNLQDTLRVLTLWFDYGHWPDVNEALVEGVKAIQIDTWLQVIPQLIARIDTPRPLVGRLIHQLLTDIGRYHPQALIYPLTVASKSTTTARHNAANKILKNMCEHSNTLVQQAMMVSEELIRVAILWHEMWHEGLEEASRLYFGERNVKGMFEVLEPLHAMMERGPQTLKETSFNQAYGRDLMEAQEWCRKYMKSGNVKDLTQAWDLYYHVFRRISKQLPQLTSLELQYVSPKLLMCRDLELAVPGTYDPNQPIIRIQSIAPSLQVITSKQRPRKLTLMGSNGHEFVFLLKGHEDLRQDERVMQLFGLVNTLLANDPTSLRKNLSIQRYAVIPLSTNSGLIGWVPHCDTLHALIRDYREKKKILLNIEHRIMLRMAPDYDHLTLMQKVEVFEHAVNNTAGDDLAKLLWLKSPSSEVWFDRRTNYTRSLAVMSMVGYILGLGDRHPSNLMLDRLSGKILHIDFGDCFEVAMTREKFPEKIPFRLTRMLTNAMEVTGLDGNYRITCHTVMEVLREHKDSVMAVLEAFVYDPLLNWRLMDTNTKGNKRSRTRTDSYSAGQSVEILDGVELGEPAHKKTGTTVPESIHSFIGDGLVKPEALNKKAIQIINRVRDKLTGRDFSHDDTLDVPTQVELLIKQATSHENLCQCYIGWCPFW

SEQ ID NO: 6921 - protein, 161 aa, Homo sapiens
MLDRLSGKILHIDFGDCFEVAMTREKFPEKIPFRLTRMLTNAMEVTGLDGNYRITCHTVMEVLREHKDSVMAVLEAFVYDPLLNWRLMDTNTKGNKRSRTRTDSYSAGQSVEILDGVELGEPAHKKTGTTVPESIHSFIGDGLVKPEALNKKAIQIINRVR

SEQ ID NO: 6922 - protein, 1728 aa, Homo sapiens
MLGTGPAAATTAATTSSNVSVLQQFASGLKSRNEETRAKAAKELQHYVTMELREMSQEESTRFYDQLNHHIFELVSSSDANERKGGILAIASLIGVEGGNATRIGRFANYLRNLLPSNDPVVMEMASKAIGRLAMAGDTFTAEYVEFEVKRALEWLGADRNEGRRHAAVLVLRELAISVPTFFFQQVQPFFDNIFVAVWDPKQAIREGAVAALRACLILTTQREPKEMQKPQWYRHTFEEAEKGFDETLAKEKGMNRDDRIHGALLILNELVRISSMEGERLREEMEEITQQQLVHDKYCKDLMGFGTKPRHITPFTSFQAVQPQQSNALVGLLGYSSHQGLMGFGTSPSPAKSTLVESRCCRDLMEEKFDQVCQWVLKCRNSKNSLIQMTILNLLPRLAAFRPSAFTDTQYLQDTMNHVLSCVKKEKERTAAFQALGLLSVAVRSEFKVYLPRVLDIIRAALPPKDFAHKRQKAMQVDATVFTCISMLARAMGPGIQQDIKELLEPMLAVGLSPALTAVLYDLSRQIPQLKKDIQDGLLKMLSLVLMHKPLRHPGMPKGLAHQLASPGLTTLPEASDVGSITLALRTLGSFEFEGHSLTQFVRHCADHFLNSEHKEIRMEAARTCSRLLTPSIHLISGHAHVVSQTAVQVVADVLSKLLVVGITDPDPDIRYCVLASLDERFDAHLAQAENLQALFVALNDQVFEIRELAICTVGRLSSMNPAFVMPFLRKMLIQILTELEHSGIGRIKEQSARMLGHLVSNAPRLIRPYMEPILKALILKLKDPDPDPNPGVINNVLATIGELAQVSGLEMRKWVDELFIIIMDMLQDSSLLAKRQVALWTLGQLVASTGYVVEPYRKYPTLLEVLLNFLKTEQNQGTRREAIRVLGLLGALDPYKHKVNIGMIDQSRDASAVSLSESKSSQDSSDYSTSEMLVNMGNLPLDEFYPAVSMVALMRIFRDQSLSHHHTMVVQAITFIFKSLGLKCVQFLPQVMPTFLNVIRVCDGAIREFLFQQLGMLVSFVKSHIRPYMDEIVTLMREFWVMNTSIQSTIILLIEQIVVALGGEFKLYLPQLIPHMLRVFMHDNSPGRIVSIKLLAAIQLFGANLDDYLHLLLPPIVKLFDAPEAPLPSRKAALETVDRLTESLDFTDYASRIIHPIVRTLDQSPELRSTAMDTLSSLVFQLGKKYQIFIPMVNKVLVRHRINHQRYDVLICRIVKGYTLADEEEDPLIYQHRMLRSGQGDALASGPVETGPMKKLHVSTINLQKAWGAARRVSKDDWLEWLRRLSLELLKDSSSPSLRSCWALAQAYNPMARDLFNAAFVSCWSELNEDQQDELIRSIELALTSQDIAEVTQTLLNLAEFMEHSDKGPLPLRDDNGIVLLGERAAKCRAYAKALHYKELEFQKGPTPAILESLISINNKLQQPEAAAGVLEYAMKHFGELEIQATWYEKLHEWEDALVAYDKKMDTNKDDPELMLGRMRCLEALGEWGQLHQQCCEKWTLVNDETQAKMARMAAAAAWGLGQWDSMEEYTCMIPRDTHDGAFYRAVLALHQDLFSLAQQCIDKARDLLDAELTAMAGESYSRAYGAMVSCHMLSELEEVIQYKLVPERREIIRQIWWERLQGCQRIVEDWQKILMVRSLVVSPHEDMRTWLKYASLCGKSGRLAIAPLNMGTANSAQPRSLRSWRTWIRILDCKDTEDADLTPATYPKTSLVCGQQQKCLQDRPK

SEQ ID NO: 6923 - protein, 2089 aa, Homo sapiens
MEDTQAIDWDVEEEEETEQSSESLRCNVEPVGRLHIFSGAHGPEKDFPLHLGKNVVGRMPDCSVALPFPSISKQHAEIEILAWDKAPILRDCGSLNGTQILRPPKVLSPGVSHRLRDQELILFADLLCQYHRLDVSLPFVSRGPLTVEETPRVQGETQPQRLLLAEDSEEEVDFLSERRMVKKSRTTSSSVIVPESDEEGHSPVLGGLGPPFAFNLNSDTDVEEGQQPATEEASSAARRGATVEAKQSEAEVVTEIQLEKDQPLVKEKDNDTKVKRGAGNGVVPAGVILERSQPPGEDSDTDVDDDSRPPGRPAEVHLERAQPFGFIDSDTDAEEERIPATPVVIPMKKRKIFHGVGTRGPGAPGLAHLQESQAGSDTDVEEGKAPQAVPLEKSQASMVINSDTDDEEEVSAALTLAHLKESQPAIWNRDAEEDMPQRVVLLQRSQTTTERDSDTDVEEEELPVENREAVLKDHTKIRALVRAHSEKDQPPFGDSDDSVEADKSSPGIHLERSQASTTVDINTQVEKEVPPGSAIIHIKKHQVSVEGTNQTDVKAVGGPAKLLVVSLEEAWPLHGDCETDAEEGTSLTASVVADVRKSQLPAEGDAGAEWAAAVLKQERAHEVGAQGGPPVAQVEQDLPISRENLTDLVVDTDTLGESTQPQREGAQVPTGREREQHVGGTKDSEDNYGDSEDLDLQATQCFLENQGLEAVQSMEDEPTQAFMLTPPQELGPSHCSFQTTGTLDEPWEVLATQPFCLRESEDSETQPFDTHLEAYGPCLSPPRAIPGDQHPESPVHTEPMGIQGRGRQTVDKVMGIPKETAERVGPERGPLERETEKLLPERQTDVTGEEELTKGKQDREQKQLLARDTQRQESDKNGESASPERDRESLKVEIETSEEIQEKQVQKQTLPSKAFEREVERPVANRECDPAELEEKVPKVILERDTQRGEPEGGSQDQKGQASSPTPEPGVGAGDLPGPTSAPVPSGSQSGGRGSPVSPRRHQKGLLNCKMPPAEKASRIRAAEKVSRGDQESPDACLPPTVPEAPAPPQKPLNSQSQKHLAPPPLLSPLLPSIKPTVRKTRQDGSQEAPEAPLSSELEPFHPKPKIRTRKSSRMTPFPATSAAPEPHPSTSTAQPVTPKPTSQATRSRTNRSSVKTPEPVVPTAPELQPSTSTDQPVTSEPTSQVTRGRKSRSSVKTPETVVPTALELQPSTSTDRPVTSEPTSQATRGRKNRSSVKTPEPVVPTAPELQPSTSTDQPVTSEPTYQATRGRKNRSSVKTPEPVVPTAPELRPSTSTDRPVTPKPTSRTTRSRTNMSSVKTPETVVPTAPELQISTSTDQPVTPKPTSRTTRSRTNMSSVKNPESTVPIAPELPPSTSTEQPVTPEPTSRATRGRKNRSSGKTPETLVPTAPKLEPSTSTDQPVTPEPTSQATRGRTNRSSVKTPETVVPTAPELQPSTSTDQPVTPEPTSQATRGRTDRSSVKTPETVVPTAPELQASASTDQPVTSEPTSRTTRGRKNRSSVKTPETVVPAAPELQPSTSTDQPVTPEPTSRATRGRTNRSSVKTPESIVPIAPELQPSTSRNQLVTPEPTSRATRCRTNRSSVKTPEPVVPTAPEPHPTTSTDQPVTPKLTSRATRRKTNRSSVKTPKPVEPAASDLEPFTPTDQSVTPEAIAQGGQSKTLRSSTVRAMPVPTTPEFQSPVTTDQPISPEPITQPSCIKRQRAAGNPGSLAAPIDHKPCSAPLEPKSQASRNQRWGAVRAAESLTAIPEPASPQLLETPIHASQIQKVEPAGRSRFTPELQPKASQSRKRSLATMDSPPHQKQPQRGEVSQKTVIIKEEEEDTAEKPGKEEDVVTPKPGKRKRDQAEEEPNRIPSRSLRRTKLNQESTAPKVLFTGVVDARGERAVLALGGSLAGSAAEASHLVTDRIRRTVKFLCALGRGIPILSLDWLHQSRKAGFFLPPDEYVVTDPEQEKNFGFSLQDALSRARERRLLEGYEIYVTPGVQPPPPQMGEIISCCGGTYLPSMPRSYKPQRVVITCPQDFPHCSIPLRVGLPLLSPEFLLTGVLKQEAKPEAFVLSPLEMSST

SEQ ID NO: 6924 - protein, 162 aa, Homo sapiens
MEDTQAIDWDVEEEEETEQSSESLRCNVEPVGRLHIFSGAHGPEKDFPLHLGKNVVGRMPDCSVALPFPSISKQHAEIEILAWDKAPILRDCGSLNGTQILRPPKVLSPGVSHRLRDQELILFADLLCQYHRLDVSLPFVSRGPLTVEETPRVQGETQPQRL

SEQ ID NO: 6925 - protein, 127 aa, Homo sapiens
MEDTQAIDWDVEEEEETEQSSESLRCNVEPVGRLHIFSGAHGPEKDFPLHLGKNVVGRMPDCSVALPFPSISKQHAEIEILAWDKAPILRDCGSLNGTQILRPPKVLSPGVSHRLRDQELILFADLL

SEQ ID NO: 6926 - protein, 306 aa, Homo sapiens
  VARIANT 1: note = MOD_RES - Any amino acid
XHVGGTKDSEDNYGDSEDLDLQATQCFLENQGLEAVQSMEDEPTQAFMLTPPQELGPSHCSFQTTGLLNCKMPPAEKASRIRAAEKVSRGDQESPDACLPPTVPEAPAPPQKPLNSQSQKHLAPPPLLSPLLPSIKPTVRKTRQDGSQEAPEAPLSSELEPFHPKPKIRTRKSSRMTPFPATSAAPEPHPSTSTAQPVTPKPTSQATRSRTNRSSVKTPEPVVPTAPELQPSTSTDQPVTSEPTSQVTRGRKSRSSVKTPETVVPTALELQPSTSTDRPVTSEPTSQATRGRKNRSSVKTPEPVVP

SEQ ID NO: 6927 - protein, 113 aa, Homo sapiens
MEDTQAIDWDVEEEEETEQSSESLRCNVEPVGRLHIFSGAHGPEKDFPLHLGKNVVGRMPDCSVALPFPSISKQHAEIEILAWDKAPILRDCGSLNGTQILRPPKVLSPGVSH

SEQ ID NO: 6928 - protein, 1802 aa, Homo sapiens
MEDTQAIDWDVEEEEETEQSSESLRCNVEPVGRLHIFSGAHGPEKDFPLHLGKNVVGRMPDCSVALPFPSISKQHAEIEILAWDKAPILRDCGSLNGTQILRPPKVLSPGVSHRLRDQELILFADLLCQYHRLDVSLPFVSRGPLTVEETPRVQGETQPQRLLLAEDSEEEVDFLSERRMVKKSRTTSSSVIVPESDEEGHSPVLGGLGPPFAFNLNSDTDVEEGQQPATEEASSAARRGATVEAKQSEAEVVTEIQLEKDQPLVKEKDNDTKVKRGAGNGVVPAGVILERSQPPGEDSDTDVDDDSRPPGRPAEVHLERAQPFGFIDSDTDAEEERIPATPVVIPMKKRKIFHGVGTRGPGAPGLAHLQESQAGSDTDVEEGKAPQAVPLEKSQASMVINSDTDDEEEVSAALTLAHLKESQPAIWNRDAEEDMPQRVVLLQRSQTTTERDSDTDVEEEELPVENREAVLKDHTKIRALVRAHSEKDQPPFGDSDDSVEADKSSPGIHLERSQASTTVDINTQVEKEVPPGSAIIHIKKHQVSVEGTNQTDVKAVGGPAKLLVVSLEEAWPLHGDCETDAEEGTSLTASVVADVRKSQLPAEGDAGAEWAAAVLKQERAHEVGAQGGPPVAQVEQDLPISRENLTDLVVDTDTLGESTQPQREGAQVPTGREREQHVGGTKDSEDNYGDSEDLDLQATQCFLENQGLEAVQSMEDEPTQAFMLTPPQELGPSHCSFQTTGTLDEPWEVLATQPFCLRESEDSETQPFDTHLEAYGPCLSPPRAIPGDQHPESPVHTEPMGIQGRGRQTVDKVMGIPKETAERVGPERGPLERETEKLLPERQTDVTGEEELTKGKQDREQKQLLARDTQRQESDKNGESASPERDRESLKVEIETSEEIQEKQVQKQTLPSKAFEREVERPVANRECDPAELEEKVPKVILERDTQRGEPEGGSQDQKGQASSPTPEPGVGAGDLPGPTSAPVPSGSQSGGRGSPVSPRRHQKGLLNCKMPPAEKASRIRAAEKVSRGDQESPDACLPPTVPEAPAPPQKPLNSQSQKHLAPPPLLSPLLPSIKPTVRKTRQDGSQEAPEAPLSSELEPFHPKPKIRTRKSSRMTPFPATSAAPKLEPSTSTDQPVTPEPTSQATRGRTNRSSVKTPETVVPTAPELQPSTSTDQPVTPEPTSQATRGRTDRSSVKTPETVVPTAPELQASASTDQPVTSEPTSRTTRGRKNRSSVKTPETVVPAAPELQPSTSTDQPVTPEPTSRATRGRTNRSSVKTPESIVPIAPELQPSTSRNQLVTPEPTSRATRCRTNRSSVKTPEPVVPTAPEPHPTTSTDQPVTPKLTSRATRRKTNRSSVKTPKPVEPAASDLEPFTPTDQSVTPEAIAQGGQSKTLRSSTVRAMPVPTTPEFQSPVTTDQPISPEPITQPSCIKRQRAAGNPGSLAAPIDHKPCSAPLEPKSQASRNQRWGAVRAAESLTAIPEPASPQLLETPIHASQIQKVEPAGRSRFTPELQPKASQSRKRSLATMDSPPHQKQPQRGEVSQKTVIIKEEEEDTAEKPGKEEDVVTPKPGKRKRDQAEEEPNRIPSRSLRRTKLNQESTAPKVLFTGVVDARGERAVLALGGSLAGSAAEASHLVTDRIRRTVKFLCALGRGIPILSLDWLHQSRKAGFFLPPDEYVVTDPEQEKNFGFSLQDALSRARERRLLEGYEIYVTPGVQPPPPQMGEIISCCGGTYLPSMPRSYKPQRVVITCPQDFPHCSIPLRVGLPLLSPEFLLTGVLKQEAKPEAFVLSPLEMSST

SEQ ID NO: 6929 - protein, 221 aa, Homo sapiens
MEDTQAIDWDVEEEEETEQSSESLRCNVEPVGRLHIFSGAHGPEKDFPLHLGKNVVGRMPDCSVALPFPSISKQHAEIEILAWDKAPILRDCGSLNGTQILSSSLPPPQTSLLPLSLRLRLLGEEQIDPLSRLLKQLSPQPLSYRLPPPQTSLSPLSPHLGPLGEEKIGPLSRPLKQLCPQPLSSSLPPPQTNLSPLSPHLGPLGAGQIGPLSRPLNQLSL

SEQ ID NO: 6930 - protein, 245 aa, Homo sapiens
MEDTQAIDWDVEEEEETEQSSESLRCNVEPVGRLHIFSGAHGPEKDFPLHLGKNVVGRMPDCSVALPFPSISKQHAEIEILAWDKAPILRDCGSLNGTQILRPPKVLSPGVSHRLRDQELILFADLLCQYHRLDVSLPFVSRGPLTVEETPRVQGETQPQRLLLAEDSEEEVDFLSERRMVKKSRTTSSSVIVPESDEEGHSPVLGGLGPPFAFNLNSDTDVEEGQQPATEEASSAARRGATVEA

SEQ ID NO: 6931 - protein, 244 aa, Homo sapiens
MEDTQAIDWDVEEEEETEQSSESLRCNVEPVGRLHIFSGAHGPEKDFPLHLGKNVVGRMPDCSVALPFPSISKQHAEIEILAWDKAPILRDCGSLNGTQILRPPKVLSPGVSHRLRDQELILFADLLCQYHRLDVSLPFVSRGPLTVEETPRVQGETQPQRLLLAEDSEEEVDFLSERRMVKKSRTTSSSVIVPESDEEGHSPVLGGLGPPFAFNLNSDTDVEEGQQPHRGGLLSCQKRCHCRG

SEQ ID NO: 6932 - protein, 1825 aa, Homo sapiens
MEDTQAIDWDVEEEEETEQSSESLRCNVEPVGRLHIFSGAHGPEKDFPLHLGKNVVGRMPDCSVALPFPSISKQHAEIEILAWDKAPILRDCGSLNGTQILRPPKVLSPGVSHRLRDQELILFADLLCQYHRLDVSLPFVSRGPLTVEETPRVQGETQPQRLLLAEDSEEEVDFLSERRMVKKSRTTSSSVIVPESDEEGHSPVLGGLGPPFAFNLNSDTDVEEGQQPATEEASSAARRGATVEAKQSEAEVVTEIQLEKDQPLVKEKDNDTKVKRGAGNGVVPAGVILERSQPPGEDSDTDVDDDSRPPGRPAEVHLERAQPFGFIDSDTDAEEERIPATPVVIPMKKRKIFHGVGTRGPGAPGLAHLQESQAGSDTDVEEGKAPQAVPLEKSQASMVINSDTDDEEEVSAALTLAHLKESQPAIWNRDAEEDMPQRVVLLQRSQTTTERDSDTDVEEEELPVENREAVLKDHTKIRALVRAHSEKDQPPFGDSDDSVEADKSSPGIHLERSQASTTVDINTQVEKEVPPGSAIIHIKKHQVSVEGTNQTDVKAVGGPAKLLVVSLEEAWPLHGDCETDAEEGTSLTASVVADVRKSQLPAEGDAGAEWAAAVLKQERAHEVGAQGGPPVAQVEQDLPISRENLTDLVVDTDTLGESTQPQREGAQVPTGREREQHVGGTKDSEDNYGDSEDLDLQATQCFLENQGLEAVQSMEDEPTQAFMLTPPQELGPSHCSFQTTGLLNCKMPPAEKASRIRAAEKVSRGDQESPDACLPPTVPEAPAPPQKPLNSQSQKHLAPPPLLSPLLPSIKPTVRKTRQDGSQEAPEAPLSSELEPFHPKPKIRTRKSSRMTPFPATSAAPEPHPSTSTAQPVTPKPTSQATRSRTNRSSVKTPEPVVPTAPELQPSTSTDQPVTSEPTSQVTRGRKSRSSVKTPETVVPTALELQPSTSTDRPVTSEPTSQATRGRKNRSSVKTPEPVVPTAPELQPSTSTDQPVTSEPTYQATRGRKNRSSVKTPEPVVPTAPELRPSTSTDRPVTPKPTSRTTRSRTNMSSVKTPETVVPTAPELQISTSTDQPVTPKPTSRTTRSRTNMSSVKNPESTVPIAPELPPSTSTEQPVTPEPTSRATRGRKNRSSGKTPETLVPTAPKLEPSTSTDQPVTPEPTSQATRGRTNRSSVKTPETVVPTAPELQPSTSTDQPVTPEPTSQATRGRTDRSSVKTPETVVPTAPELQASASTDQPVTSEPTSRTTRGRKNRSSVKTPETVVPAAPELQPSTSTDQPVTPEPTSRATRGRTNRSSVKTPESIVPIAPELQPSTSRNQLVTPEPTSRATRCRTNRSSVKTPEPVVPTAPEPHPTTSTDQPVTPKLTSRATRRKTNRSSVKTPKPVEPAASDLEPFTPTDQSVTPEAIAQGGQSKTLRSSTVRAMPVPTTPEFQSPVTTDQPISPEPITQPSCIKRQRAAGNPGSLAAPIDHKPCSAPLEPKSQASRNQRWGAVRAAESLTAIPEPASPQLLETPIHASQIQKVEPAGRSRFTPELQPKASQSRKRSLATMDSPPHQKQPQRGEVSQKTVIIKEEEEDTAEKPGKEEDVVTPKPGKRKRDQAEEEPNRIPSRSLRRTKLNQESTAPKVLFTGVVDARGERAVLALGGSLAGSAAEASHLVTDRIRRTVKFLCALGRGIPILSLDWLHQSRKAGFFLPPDEYVVTDPEQEKNFGFSLQDALSRARERRLLEGYEIYVTPGVQPPPPQMGEIISCCGGTYLPSMPRSYKPQRVVITCPQDFPHCSIPLRVGLPLLSPEFLLTGVLKQEAKPEAFVLSPLEMSST

SEQ ID NO: 6933 - protein, 1655 aa, Homo sapiens
MYHRLDVSLPFVSRGPLTVEETPRVQGETQPQRLLLAEDSEEEVDFLSERRMVKKSRTTSSSVIVPESDEEGHSPVLGGLGPPFAFNLNSDTDVEEGQQPATEEASSAARRGATVEAKQSEAEVVTEIQLEKDQPLVKEKDNDTKVKRGAGNGVVPAGVILERSQPPGEDSDTDVDDDSRPPGRPAEVHLERAQPFGFIDSDTDAEEERIPATPVVIPMKKRKIFHGVGTRGPGAPGLAHLQESQAGSDTDVEEGKAPQAVPLEKSQASMVINSDTDDEEEVSAALTLAHLKESQPAIWNRDAEEDMPQRVVLLQRSQTTTERDSDTDVEEEELPVENREAVLKDHTKIRALVRAHSEKDQPPFGDSDDSVEADKSSPGIHLERSQASTTVDINTQVEKEVPPGSAIIHIKKHQVSVEGTNQTDVKAVGGPAKLLVVSLEEAWPLHGDCETDAEEGTSLTASVVADVRKSQLPAEGDAGAEWAAAVLKQERAHEVGAQGGPPVAQVEQDLPISRENLTDLVVDTDTLGESTQPQREGAQVPTGREREQHVGGTKDSEDNYGDSEDLDLQATQCFLENQGLEVQSMEDEPTQAFMLTPPQELGPSHCSFQTTGLLNCKMPPAEKASRIRAAEKVSRGDQESPDACLPPTVPEAPAPPQKPLNSQSQKHLAPPPLLSPLLPSIKPTVRKTRQDGSQEAPEAPLSSELEPFHPKPKIRTRKSSRMTPFPATSAAPEPHPSTSTAQPVTPKPTSQATRSRTNRSSVKTPEPVVPTAPELQPSTSTDQPVTSEPTSQVTRGRKSRSSVKTPETVVPTALELQPSTSTDRPVTSEPTSQATRGRKNRSSVKTPEPVVPTAPELQPSTSTDQPVTSEPTYQATRGRKNRSSVKTPEPVVPTAPELRPSTSTDRPVTPKPTSRTTRSRTNMSSVKNPESTVPIAPELPPSTSTEQPVTPEPTSRATRGRKNRSSGKTPETLVPTAPKLEPSTSTDQPVTPEPTSQATRGRTNRSSVKTPETVVPTAPELQPSTSTDQPVTPEPTSQATRGRTDRSSVKTPETVVPTAPELQASASTDQPVTSEPTSRTTRGRKNRSSVKTPETVVPAAPELQPSTSTDQPVTPEPTSRATRGRTNRSSVKTPESIVPIAPELQPSTSRNQLVTPEPTSRATRCRTNRSSVKTPEPVVPTAPEPHPTTSTDQPVTPKLTSRATRRKTNRSSVKTPKPVEPAASDLEPFTPTDQSVTPEAIAQGGQSKTLRSSTVRAMPVPTTPEFQSPVTTDQPISPEPITQPSCIKRQRAAGNPGSLAAPIDHKPCSAPLEPKSQASRNQRWGAVRAAESLTAIPEPASPQLLETPIHASQIQKVEPAGRSRFTPELQPKASQSRKRSLATMDSPPHQKQPQRGEVSQKTVIIKEEEEDTAEKPGKEEDVVTPKPGKRKRDQAEEEPNRIPSRSLRRTKLNQESTAPKVLFTGVVDARGERAVLALGGSLAGSAAEASHLVTDRIRRTVKFLCALGRGIPILSLDWLHQSRKAGFFLPPDEYVVTDPEQEKNFGFSLQDALSRARERRLLEGYEIYVTPGVQPPPPQMGEIISCCGGTYLPSMPRSYKPQRVVITCPQDFPHCSIPLRVGLPLLSPEFLLTGVLKQEAKPEAFVLSPLEMSST

SEQ ID NO: 6934 - protein, 646 aa, Homo sapiens
MGLPRLVCAFLLAACCCCPRVAGVPGEAEQPAPELVEVEVGSTALLKCGLSQSQGNLSHVDWFSVHKEKRTLIFRVRQGQGQSEPGEYEQRLSLQDRGATLALTQVTPQDERIFLCQGKRPRSQEYRIQLRVYKAPEEPNIQVNPLGIPVNSKEPEEVATCVGRNGYPIPQVIWYKNGRPLKEEKNRVHIQSSQTVESSGLYTLQSILKAQLVKEDKDAQFYCELNYRLPSGNHMKESREVTVPVFYPTEKVWLEVEPVGMLKEGDRVEIRCLADGNPPPHFSISKQNPSTREAEEETTNDNGVLVLEPARKEHSGRYECQGLDLDTMISLLSEPQELLVNYVSDVRVSPAAPERQEGSSLTLTCEAESSQDLEFQWLREETGQVLERGPVLQLHDLKREAGGGYRCVASVPSIPGLNRTQLVNVAIFGPPWMAFKERKVWVKENMVLNLSCEASGHPRPTISWNVNGTASEQDQDPQRVLSTLNVLVTPELLETGVECTASNDLGKNTSILFLELVNLTTLTPDSNTTTGLSTSTASPHTRANSTSTERKLPEPESRGVVIVAVIVCILVLAVLGAVLYFLYKKGKLPCRRSGKQEITLPPSRKSELVVEVKSDKLPEEMGLLQGSSGDKRAPGDQGEKYIDLRH

SEQ ID NO: 6935 - protein, 527 aa, Homo sapiens
MVYIVRQFLLYNVSGSVYLDQLIVLLTAKFSILRIAGSRVHHSPFSGHLDGCSFLSLQHSLHTSLDMSRHENVFLGLTLSSKSAGLKGFQLAFVPGLLQGTGGYLDGPLPTPVDNPRVGLEVGLRLSLPPLPPCPGVHIQSSQTVESSGLYTLQSILKAQLVKEDKDAQFYCELNYRLPSGNHMKESREVTVPVFYPTEKVWLEVEPVGMLKEGDRVEIRCLADGNPPPHFSISKQNPSTREAEEETTNDNGVLVLEPARKEHSGRYECQGLDLDTMISLLSEPQELLVNYVSDVRVSPAAPERQEGSSLTLTCEAESSQDLEFQWLREETGQVLERGPVLQLHDLKREAGGGYRCVASVPSIPGLNRTQLVNVAIFGPPWMAFKERKVWVKENMVLNLSCEASGHPRPTISWNVNGTASEQDQDPQRVLSTLNVLVTPELLETGVECTASNDLGKNTSILFLELVNLTTLTPDSNTTTGLSTSTASPHTRANSTSTGKPGLAREQGCARASFLPCPSPESPVQKGE

SEQ ID NO: 6936 - protein, 46 aa, Homo sapiens
GVVIVAVIVCILVLAVLGAVLYFLYKKGKLPCRRSGKQEMERNTSI

SEQ ID NO: 6937 - protein, 750 aa, Homo sapiens
MGKSESQMDITDINTPKPKKKQRWTPLEISLSVLVLLLTIIAVTMIALYATYDDGICKSSDCIKSAARLIQNMDATTEPCTDFFKYACGGWLKRNVIPETSSRYGNFDILRDELEVVLKDVLQEPKTEDIVAVQKAKALYRSCINESAIDSRGGEPLLKLLPDIYGWPVATENWEQKYGASWTAEKAIAQLNSKYGKKVLINLFVGTDDKNSVNHVIHIDQPRLGLPSRDYYECTGIYKEACTAYVDFMISVARLIRQEERLPIDENQLALEMNKVMELEKEIANATAKPEDRNDPMLLYNKMTLAQIQNNFSLEINGKPFSWLNFTNEIMSTVNISITNEEDVVVYAPEYLTKLKPILTKYSARDLQNLMSWRFIMDLVSSLSRTYKESRNAFRKALYGTTSETATWRRCANYVNGNMENAVGRLYVEAAFAGESKHVVEDLIAQIREVFIQTLDDLTWMDAETKKRAEEKALAIKERIGYPDDIVSNDNKLNNEYLELNYKEDEYFENIIQNLKFSQSKQLKKLREKVDKDEWISGAAVVNAFYSSGRNQIVFPAGILQPPFFSAQQSNSLNYGGIGMVIGHEITHGFDDNGRNFNKDGDLVDWWTQQSASNFKEQSQCMVYQYGNFSWDLAGGQHLNGINTLGENIADNGGLGQAYRAYQNYIKKNGEEKLLPGLDLNHKQLFFLNFAQVWCGTYRPEYAVNSIKTDVHSPGNFRIIGTLQNSAEFSEAFHCRKNSYMNPEKKCRVW

SEQ ID NO: 6938 - protein, 750 aa, Homo sapiens; identical to SEQ ID NO: 6937

SEQ ID NO: 6939 - protein, 750 aa, Homo sapiens; identical to SEQ ID NO: 6937

SEQ ID NO: 6940 - protein, 161 aa, Homo sapiens
MGKSESQMDITDINTPKPKKKQRWTPLEISLSVLVLLLTIIAVTMIALYATYDDGICKSSDCIKSAARLIQNMDATTEPCTDFFKYACGGWLKRNVIPETSSRYGNFDILRDELEVVLKDVLQEPKTEDIVAVQKAKALYRSCINESAIDSRGGEPLLKLL

SEQ ID NO: 6941 - protein, 93 aa, Homo sapiens
MGKSESQMDITDINTPKPKKKQRWTPLEISLSVLVLLLTIIAVTMIALYATYDDGICKSSDCIKSAARLIQNMDATTEPCTDFFKYACGGWLK

SEQ ID NO: 6942 - protein, 233 aa, Homo sapiens
MGKSESQMDITDINTPKPKKKQRWTPLEISLSVLVLLLTIIAVTMIALYATYDDGICKSSDCIKSAARLIQNMDATTEPCTDFFKYACGGWLKRNVIPETSSRYGNFDILRDELEVVLKDVLQEPKTEDIVAVQKAKALYRSCINESAIDSRGGEPLLKLLPDIYGWPVATENWEQKYGASWTAEKAIAQLNSKYGKKVLINLFVGTDDKNSVNHVIHIDQPRLGLPSRDYYE

SEQ ID NO: 6943 - protein, 119 aa, Homo sapiens
MGKSESQMDITDINTPKPKKKQRWTPLEISLSVLVLLLTIIAVTMIALYATYDDGICKSSDCIKSAARLIQNMDATTEPCTDFFKYACGGWLKRNVIPETSSRYGNFDILRDELEVVLK

SEQ ID NO: 6944 - protein, 750 aa, Homo sapiens; identical to SEQ ID NO: 6937

SEQ ID NO: 6945 - protein, 750 aa, Homo sapiens; identical to SEQ ID NO: 6937

SEQ ID NO: 6946 - protein, 15 aa, Homo sapiens
MGKSESQMDITDINT

SEQ ID NO: 6947 - protein, 297 aa, Homo sapiens
MTTPRNSVNGTFPAEPMKGPIAMQSGPKPLFRRMSSLVGPTQSFFMRESKTLGAVQIMNGLFHIALGGLLMIPAGIYAPICVTVWYPLWGGIMYIISGSLLAATEKNSRKCLVKGKMIMNSLSLFAAISGMILSIMDILNIKISHFLKMESLNFIRAHTPYINIYNCEPANPSEKNSPSTQYCYSIQSLFLGILSVMLIFAFFQELVIAGIVENEWKRTCSRPKSNIVLLSAEEKKEQTIEIKEEVVGLTETSSQPKNEEDIEIIPIQEEEEEETETNFPEPPQDQESSPIENDSSP

SEQ ID NO: 6948 - protein, 297 aa, Homo sapiens; identical to SEQ ID NO: 6947

SEQ ID NO: 6949 - protein, 7 aa, Homo sapiens
MTTPRNS

SEQ ID NO: 6950 - protein, 284 aa, Homo sapiens
MTTPRNSVNGTFPAEPMKGPIAMQSGPKPLFRRMSSLVGPTQSFFMRESKTLGAVQIMNGLFHIALGGLLMIPAGIYAPICVTVWYPLWGGIMYIISGSLLAATEKNSRKCLVKGKMIMNSLSLFAAISGMILSIMDILNIKISHFLKMESLNFIRAHTPYINIYNCEPANPSEKNSPSTQYCYSIQSLFLELVIAGIVENEWKRTCSRPKSNIVLLSAEEKKEQTIEIKEEVVGLTETSSQPKNEEDIEIIPIQEEEEEETETNFPEPPQDQESSPIENDSSP

SEQ ID NO: 6951 - protein, 6 aa, Homo sapiens
MTTPRN

SEQ ID NO: 6952 - protein, 297 aa, Homo sapiens; identical to SEQ ID NO: 6947

SEQ ID NO: 6953 - protein, 309 aa, Homo sapiens
MDDQGCPRCKTTKYRNPSLKLMVNVCGHTLCESCVDLLFVRGAGNCPECGTPLRKSNFRVQLFEDPTVDKEVEIRKKVLKIYNKREEDFPSLREYNDFLEEVEEIVFNLTNNVDLDNTKKKMEIYQKENKDVIQKNKLKLTREQEELEEALEVERQENEQRRLFIQKEEQLQQILKRKNKQAFLDELESSDLPVALLLAQHKDRSTQLEMQLEKPKPVKPVTFSTGIKMGQHISLAPIHKLEEALYEYQPLQIETYGPHVPELEMLGRLGYLNHVRAASPQDLAGGYTSSLACHRALQDAFSGLFWQPS

SEQ ID NO: 6954 - protein, 267 aa, Homo sapiens
MDDQGCPRCKTTKYRNPSLKLMVNVCGHTLCESCVDLLFVRGAGNCPECGTPLRKSNFRVQLFEDPTVDKEVEIRKKVLKIYNKREEDFPSLREYNDFLEEVEEIVFNLTNNVDLDNTKKKMEIYQKENKDVIQKNKLKLTREQEELEEALEVERQENEQRRLFIQKEEQLQQILKRKNKQAFLDELGQHISLAPIHKLEEALYEYQPLQIETYGPHVPELEMLGRLGYLNHVRAASPQDLAGGYTSSLACHRALQDAFSGLFWQPS

SEQ ID NO: 6955 - protein, 169 aa, Homo sapiens
TREQEELEEALEVERQENEQRRLFIQKEEQLQQILKRKNKQAFLDELESSDLPVALLLAQHKDRSTQLEMQLEKPKPVKPVTFSTGIKMGQHISLAPIHKLEEALYEYQPLQIETYGPHVPELEMLGRLGYLNHVRAASPQDLAGGYTSSLACHRALQDAFSGLFWQPS

SEQ ID NO: 6956 - protein, 1320 aa, Homo sapiens
MFGLDQFEPQVNSRNAGQGERNFNETGLSMNTHFKAPAFHTGGPPGPVDPAMSALGEPPILGMNMEPYGFHARGHSELHAGGLQAQPVHGFFGGQQPHHGHPGSHHPHQHHPHFGGNFGGPDPGASCLHGGRLLGYGGAAGGLGSQPPFAEGYEHMAESQGPESFGPQRPGNLPDFHSSGASSHAVPAPCLPLDQSPNRAASFHGLPSSSGSDSHSLEPRRVTNQGAVDSLEYNYPGEAPSGHFDMFSPSDSEGQLPHYAAGRQVPGGAFPGASAMPRAAGMVGLSKMHAQPPQQQPQQQQQPQQQQQQHGVFFERFSGARKMPVGLEPSVGSRHPLMQPPQQAPPPPQQQPPQQPPQQQPPPPPGLLVRQNSCPPALPRPQQGEAGTPSGGLQDGGPMLPSQHAQFEYPIHRLENRSMHPYSEPVFSMQHPPPQQAPNQRLQHFDAPPYMNVAKRPRFDFPGSAGVDRCASWNGSMHNGALDNHLSPSAYPGLPGEFTPPVPDSFPSGPPLQHPAPDHQSLQQQQQQQQQQQQQQQQQQQQQQQQQQQQRQNAALMIKQMASRNQQQRLRQPNLAQLGHPGDVGQGGLVHGGPVGGLAQPNFEREGGSTGAGRLGTFEQQAPHLAQESAWFSGPHPPPGDLLPRRMGGSGLPADCGPHDPSLAPPPPPGGSGVLFRGPLQEPMRMPGEGHVPALPSPGLQFGGSLGGLGQLQSPGAGVGLPSAASERRPPPPDFATSALGGQPGFPFGAAGRQSTPHSGPGVNSPPSAGGGGGSSGGGGGGGAYPPQPDFQPSQRTSASKLGALSLGSFNKPSSKDNLFGQSCLAALSTACQNMIASLGAPNLNVTFNKKNPPEGKRKLSQNETDGAAVAGNPGSDYFPGGTAPGAPGPGGPSGTSSSGSKASGPPNPPAQGDGTSLSPNYTLESTSGNDGKPVSGGGGRGRGRRKRDSGHVSPGTFFDKYSAAPDSGGAPGVSPGQQQASGAAVGGSSAGETRGAPTPHEKALTSPSWGKGAELLLGDQPDLIGSLDGGAKSDSSSPNVGEFASDEVSTSYANEDEVSSSSDNPQALVKASRSPLVTGSPKLPPRGVGAGEHGPKAPPPALGLGIMSNSTSTPDSYGGGGGPGHPGTPGLEQVRTPTSSSGAPPPDEIHPLEILQAQIQLQRQQFSISEDQPLGLKGGKKGECAVGASGAQNGDSELGSCCSEAVKSAMSTIDLDSLMAEHSAAWYMPADKALVDSADDDKTLAPWEKAKPQNPNSKEAHDLPANKASASQPGSHLQCLSVHCTDDVGDAKARASVPTWRSLHSDISNRFGTFVAALT

SEQ ID NO: 6957 - protein, 1408 aa, Homo sapiens
MKAPAVLAPGILVLLFTLVQRSNGECKEALAKSEMNVNMKYQLPNFTAETPIQNVILHEHHIFLGATNYIYVLNEEDLQKVAEYKTGPVLEHPDCFPCQDCSSKANLSGGVWKDNINMALVVDTYYDDQLISCGSVNRGTCQRHVFPHNHTADIQSEVHCIFSPQIEEPSQCPDCVVSALGAKVLSSVKDRFINFFVGNTINSSYFPDHPLHSISVRRLKETKDGFMFLTDQSYIDVLPEFRDSYPIKYVHAFESNNFIYFLTVQRETLDAQTFHTRIIRFCSINSGLHSYMEMPLECILTEKRKKRSTKKEVFNILQAAYVSKPGAQLARQIGASLNDDILFGVFAQSKPDSAEPMDRSAMCAFPIKYVNDFFNKIVNKNNVRCLQHFYGPNHEHCFNRTLLRNSSGCEARRDEYRTEFTTALQRVDLFMGQFSEVLLTSISTFIKGDLTIANLGTSEGRFMQVVVSRSGPSTPHVNFLLDSHPVSPEVIVEHTLNQNGYTLVITGKKITKIPLNGLGCRHFQSCSQCLSAPPFVQCGWCHDKCVRSEECLSGTWTQQICLPAIYKVFPNSAPLEGGTRLTICGWDFGFRRNNKFDLKKTRVLLGNESCTLTLSESTMNTLKCTVGPAMNKHFNMSIIISNGHGTTQYSTFSYVDPVITSISPKYGPMAGGTLLTLTGNYLNSGNSRHISIGGKTCTLKSVSNSILECYTPAQTISTEFAVKLKIDLANRETSIFSYREDPIVYEIHPTKSFISTWWKEPLNIVSFLFCFASGGSTITGVGKNLNSVSVPRMVINVHEAGRNFTVACQHRSNSEIICCTTPSLQQLNLQLPLKTKAFFMLDGILSKYFDLIYVHNPVFKPFEKPVMISMGNENVLEIKGNDIDPEAVKGEVLKVGNKSCENIHLHSEAVLCTVPNDLLKLNSELNIEWKQAISSTVLGKVIVQPDQNFTGLIAGVVSISTALLLLLGFFLWLKKRKQIKDLGSELVRYDARVHTPHLDRLVSARSVSPTTEMVSNESVDYRATFPEDQFPNSSQNGSCRQVQYPLTDMSPILTSGDSDISSPLLQNTVHIDLSALNPELVQAVQHVVIGPSSLIVHFNEVIGRGHFGCVYHGTLLDNDGKKIHCAVKSLNRITDIGEVSQFLTEGIIMKDFSHPNVLSLLGICLRSEGSPLVVLPYMKHGDLRNFIRNETHNPTVKDLIGFGLQVAKGMKYLASKKFVHRDLAARNCMLDEKFTVKVADFGLARDMYDKEYYSVHNKTGAKLPVKWMALESLQTQKFTTKSDVWSFGVLLWELMTRGAPPYPDVNTFDITVYLLQGRRLLQPEYCPDPLYEVMLKCWHPKAEMRPSFSELVSRISAIFSTFIGEHYVHVNATYVNVKCVAPYPSLLSSEDNADDEVDTRPASFWETS

SEQ ID NO: 6958 - protein, 1390 aa, Homo sapiens
MKAPAVLAPGILVLLFTLVQRSNGECKEALAKSEMNVNMKYQLPNFTAETPIQNVILHEHHIFLGATNYIYVLNEEDLQKVAEYKTGPVLEHPDCFPCQDCSSKANLSGGVWKDNINMALVVDTYYDDQLISCGSVNRGTCQRHVFPHNHTADIQSEVHCIFSPQIEEPSQCPDCVVSALGAKVLSSVKDRFINFFVGNTINSSYFPDHPLHSISVRRLKETKDGFMFLTDQSYIDVLPEFRDSYPIKYVHAFESNNFIYFLTVQRETLDAQTFHTRIIRFCSINSGLHSYMEMPLECILTEKRKKRSTKKEVFNILQAAYVSKPGAQLARQIGASLNDDILFGVFAQSKPDSAEPMDRSAMCAFPIKYVNDFFNKIVNKNNVRCLQHFYGPNHEHCFNRTLLRNSSGCEARRDEYRTEFTTALQRVDLFMGQFSEVLLTSISTFIKGDLTIANLGTSEGRFMQVVVSRSGPSTPHVNFLLDSHPVSPEVIVEHTLNQNGYTLVITGKKITKIPLNGLGCRHFQSCSQCLSAPPFVQCGWCHDKCVRSEECLSGTWTQQICLPAIYKVFPNSAPLEGGTRLTICGWDFGFRRNNKFDLKKTRVLLGNESCTLTLSESTMNTLKCTVGPAMNKHFNMSIIISNGHGTTQYSTFSYVDPVITSISPKYGPMAGGTLLTLTGNYLNSGNSRHISIGGKTCTLKSVSNSILECYTPAQTISTEFAVKLKIDLANRETSIFSYREDPIVYEIHPTKSFISGGSTITGVGKNLNSVSVPRMVINVHEAGRNFTVACQHRSNSEIICCTTPSLQQLNLQLPLKTKAFFMLDGILSKYFDLIYVHNPVFKPFEKPVMISMGNENVLEIKGNDIDPEAVKGEVLKVGNKSCENIHLHSEAVLCTVPNDLLKLNSELNIEWKQAISSTVLGKVIVQPDQNFTGLIAGVVSISTALLLLLGFFLWLKKRKQIKDLGSELVRYDARVHTPHLDRLVSARSVSPTTEMVSNESVDYRATFPEDQFPNSSQNGSCRQVQYPLTDMSPILTSGDSDISSPLLQNTVHIDLSALNPELVQAVQHVVIGPSSLIVHFNEVIGRGHFGCVYHGTLLDNDGKKIHCAVKSLNRITDIGEVSQFLTEGIIMKDFSHPNVLSLLGICLRSEGSPLVVLPYMKHGDLRNFIRNETHNPTVKDLIGFGLQVAKGMKYLASKKFVHRDLAARNCMLDEKFTVKVADFGLARDMYDKEYYSVHNKTGAKLPVKWMALESLQTQKFTTKSDVWSFGVLLWELMTRGAPPYPDVNTFDITVYLLQGRRLLQPEYCPDPLYEVMLKCWHPKAEMRPSFSELVSRISAIFSTFIGEHYVHVNATYVNVKCVAPYPSLLSSEDNADDEVDTRPASFWETS

SEQ ID NO: 6959 - protein, 764 aa, Homo sapiens
MKAPAVLAPGILVLLFTLVQRSNGECKEALAKSEMNVNMKYQLPNFTAETPIQNVILHEHHIFLGATNYIYVLNEEDLQKVAEYKTGPVLEHPDCFPCQDCSSKANLSGGVWKDNINMALVVDTYYDDQLISCGSVNRGTCQRHVFPHNHTADIQSEVHCIFSPQIEEPSQCPDCVVSALGAKVLSSVKDRFINFFVGNTINSSYFPDHPLHSISVRRLKETKDGFMFLTDQSYIDVLPEFRDSYPIKYVHAFESNNFIYFLTVQRETLDAQTFHTRIIRFCSINSGLHSYMEMPLECILTEKRKKRSTKKEVFNILQAAYVSKPGAQLARQIGASLNDDILFGVFAQSKPDSAEPMDRSAMCAFPIKYVNDFFNKIVNKNNVRCLQHFYGPNHEHCFNRTLLRNSSGCEARRDEYRTEFTTALQRVDLFMGQFSEVLLTSISTFIKGDLTIANLGTSEGRFMQVVVSRSGPSTPHVNFLLDSHPVSPEVIVEHTLNQNGYTLVITGKKITKIPLNGLGCRHFQSCSQCLSAPPFVQCGWCHDKCVRSEECLSGTWTQQICLPAIYKVFPNSAPLEGGTRLTICGWDFGFRRNNKFDLKKTRVLLGNESCTLTLSESTMNTLKCTVGPAMNKHFNMSIIISNGHGTTQYSTFSYVDPVITSISPKYGPMAGGTLLTLTGNYLNSGNSRHISIGGKTCTLKSVSNSILECYTPAQTISTEFAVKLKIDLANRETSIFSYREDPIVYEIHPTKSFIRHVNIALIQR

SEQ ID NO: 6960 - protein, 260 aa, Homo sapiens
MKDFSHPNVLSLLGICLRSEGSPLVVLPYMKHGDLRNFIRNETHNPTVKDLIGFGLQVAKGMKYLASKKFVHRDLAARNCMLDEKFTVKVADFGLARDMYDKEYYSVHNKTGAKLPVKWMALESLQTQKFTTKSDVWSFGVLLWELMTRGAPPYPDVNTFDITVYLLQGRRLLQPEYCPDPLYEVMLKCWHPKAEMRPSFSELVSRISAIFSTFIGEHYVHVNATYVNVKCVAPYPSLLSSEDNADDEVDTRPASFWETS

SEQ ID NO: 6961 - protein, 582 aa, Homo sapiens
MAARSWQDELAQQAEEGSARLREMLSVGLGFLRTELGLDLGLEPKRYPGWVILVGTGALGLLLLFLLGYGWAAACAGARKKRRSPPRKREEAAAVPAAAPDDLALLKNLRSEEQKKKNRKKLSEKPKPNGRTVEVAEGEAVRTPQSVTAKQPPEIDKKNEKSKKNKKKSKSDAKAVQNSSRHDGKEVDEGAWETKISHREKRQQRKRDKVLTDSGSLDSTIPGIENTITVTTEQLTTASFPVGSKKNKGDSHLNVQVSNFKSGKGDSTLQVSSGLNENLTVNGGGWNEKSVKLSSQISAGEEKWNSVSPASAGKRKTEPSAWSQDTGDANTNGKDWGRSWSDRSIFSGIGSTAEPVSQSTTSDYQWDVSRNQPYIDDEWSGLNGLSSADPNSDWNAPAEEWGNWVDEERASLLKSQEPIPDDQKVSDDDKEKGEGALPTGKSKKKKKKKKKQGEDNSTAQDTEELEKEIREDLPVNTSKTRPKQEKAFSLKTISTSDPAEVLVKNSQPIKTLPPATSTEPSVILSKSDSDKSSSQVPPILQETDKSKSNTKQNSVPPSQTKSETSWESPKQIKKKKKARRET

SEQ ID NO: 6962 - protein, 715 aa, Homo sapiens
MAANMYRVGDYVYFENSSSNPYLIRRIEELNKTANGNVEAKVVCFYRRRDISSTLIALADKHATLSVCYKAGPGADNGEEGEIEEEMENPEMVDLPEKLKHQLRHRELFLSRQLESLPATHIRGKCSVTLLNETESLKSYLEREDFFFYSLVYDPQQKTLLADKGEIRVGNRYQADITDLLKEGEEDGRDQSRLETQVWEAHNPLTDKQIDQFLVVARSVGTFARALDCSSSVRQPSLHMSAAAASRDITLFHAMDTLHKNIYDISKAISALVPQGGPVLCRDEMEEWSASEANLFEEALEKYGKDFTDIQQDFLPWKSLTSIIEYYYMWKTTDRYVQQKRLKAAEAESKLKQVYIPNYNKPNPNQISVNNVKAGVVNGTGAPGQSPGAGRACESCYTTQSYQWYSWGPPNMQCRLCASCWTYWKKYGGLKMPTRLDGERPGPNRSNMSPHGLPARSSGSPKFAMKTRQAFYLHTTKLTRIARRLCREILRPWHAARHPYLPINSAAIKAECTARLPEASQSPLVLKQAVRKPLEAVLRYLETHPRPPKPDPVKSVSSVLSSLTPAKVAPVINNGSPTILGKRSYEQHNGVDGNMKKRLLMPSRGLANHGQARHMGPSRNLLLNGKSYPTKVRLIRGGSLPPVKRRRMNWIDAPDDVFYMATEETRKIRKLLSSSETKRAARRPYKPIALRQSQALPPRPPPPAPVNDEPIVIED

SEQ ID NO: 6963 - protein, 628 aa, Homo sapiens
MVDLPEKLKHQLRHRELFLSRQLESLPATHIRGKCSVTLLNETESLKSYLEREDFFFYSLVYDPQQKTLLADKGEIRVGNRYQADITDLLKEGEEDGRDQSRLETQVWEAHNPLTDKQIDQFLVVARSVGTFARALDCSSSVRQPSLHMSAAAASRDITLFHAMDTLHKNIYDISKAISALVPQGGPVLCRDEMEEWSASEANLFEEALEKYGKDFTDIQQDFLPWKSLTSIIEYYYMWKTTDRYVQQKRLKAAEAESKLKQVYIPNYNKPNPNQISVNNVKAGVVNGTGAPGQSPGAGRACESCYTTQSYQWYSWGPPNMQCRLCASCWTYWKKYGGLKMPTRLDGERPGPNRSNMSPHGLPARSSGSPKFAMKTRQAFYLHTTKLTRIARRLCREILRPWHAARHPYLPINSAAIKAECTARLPEASQSPLVLKQAVRKPLEAVLRYLETHPRPPKPDPVKSVSSVLSSLTPAKVAPVINNGSPTILGKRSYEQHNGVDGNMKKRLLMPSRGTSSGLANHGQARHMGPSRNLLLNGKSYPTKVRLIRGGSLPPVKRRRMNWIDAPDDVFYMATEETRKIRKLLSSSETKRAARRPYKPIALRQSQALPPRPPPPAPVNDEPIVIED

SEQ ID NO: 6964 - protein, 255 aa, Homo sapiens
MKTRQAFYLHTTKLTRIARRLCREILRPWHAARHPYLPINSAAIKAECTARLPEASQSPLVLKQAVRKPLEAVLRYLETHPRPPKPDPVKSVSSVLSSLTPAKVAPVINNGSPTILGKRSYEQHNGVDGNMKKRLLMPSRGTYLGLANHGQARHMGPSRNLLLNGKSYPTKVRLIRGGSLPPVKRRRMNWIDAPDDVFYMATEETRKIRKLLSSSETKRAARRPYKPIALRQSQALPPRPPPPAPVNDEPIVIED

SEQ ID NO: 6965 - protein, 430 aa, Homo sapiens
MAANMYRVGDYVYFENSSSNPYLIRRIEELNKTANGNVEAKVVCFYRRRDISSTLIALADKHATLSVCYKAGPGADNGEEGEIEEEMENPEMVDLPEKLKHQLRHRELFLSRQLESLPATHIRGKCSVTLLNETESLKSYLEREDFFFYSLVYDPQQKTLLADKGEIRVGNRYQADITDLLKEGEEDGRDQSRLETQVWEAHNPLTDKQIDQFLVVARSVGTFARALDCSSSVRQPSLHMSAAAASRDITLFHAMDTLHKNIYDISKAISALVPQGGPVLCRDEMEEWSASEANLFEEALEKYGKDFTDIQQDFLPWKSLTSIIEYYYMWKTTDRYVQQKRLKAAEAESKLKQVYIPNYNKPNPNQISVNNVKAGVVNGTGAPGQSPGAGRACESCYMSSLRILLDILEEIWWLENANPVRWREARTKPQ

SEQ ID NO: 6966 - protein, 473 aa, Homo sapiens
MLRPVIEEEISMLGEITHLQTISEDLKSLTMDPHKLPSSSEQVILDLKGSDYSWSYQTPPSSPSTTMSRKSSVCSSLNSVNSSDSRSSGSHSHSPSSHYRYRSSNLAQQAPVRLSSVSSHDSGFISQDAFQSKSPSPMPPEAPNQRRKEKREPDPNGGGPTTASGPPAAAEEAQRPRSMTVSAATRPGEEMEACEELALALSRGLQLDTQRSSRDSLQCSSGYSTQTTTPCCSEDTIPSQVSDYDYFSVSGDQEADQQEFDKSSTIPRNSDISQSYRRMFQAKRPASTAGLPTTLGPAMVTPGVATIRRTPSTKPSVRRGTIGAGPIPIKTPVIPVKTPTVPDLPGVLPAPPDGPEERGEHSPESPSVGEGPQGVTSMPSSMWSGQASVNPPLPGPKPSIPEEHRQAIPESEAEDQEREPPSATVSPGQIPESDPADLSPRDTPQGEDMLNAIRRGVKLKKTTTNDRSAPRFS

SEQ ID NO: 6967 - protein, 730 aa, Homo sapiens
MEAVIEKECSALGGLFQTIISDMKGSYPVWEDFINKAGKLQSQLRTTVVAAAAFLDAFQKVADMATNTRGGTREIGSALTRMCMRHRSIEAKLRQFSSALIDCLINPLQEQMEEWKKVANQLDKDHAKEYKKARQEIKKKSSDTLKLQKKAKKGRGDIQPQLDSALQDVNDKYLLLEETEKQAVRKALIEERGRFCTFISMLRPVIEEEISMLGEITHLQTISEDLKSLTMDPHKLPSSSEQVILDLKGSDYSWSYQTPPSSPSTTMSRKSSVCSSLNSVNSSDSRSSGSHSHSPSSHYRYRSSNLAQQAPVRLSSVSSHDSGFISQDAFQSKSPSPMPPEAPNQNSSSSASSEASETCQSVSECSSPTSVSSGSTMGAWVSTEKDWAKPGPYDQPLVNTLQRRKEKREPDPNGGGPTTASGPPAAAEEAQRPRSMTVSAATRPGEEMEACEELALALSRGLQLDTQRSSRDSLQCSSGYSTQTTTPCCSEDTIPSQVSDYDYFSVSGDQEADQQEFDKSSTIPRNSDISQSYRRMFQAKRPASTAGLPTTLGPAMVTPGVATIRRTPSTKPSVRRGTIGAGPIPIKTPVIPVKTPTVPDLPGVLPAPPDGPEERGEHSPESPSVGEGPQGVTSMPSSMWSGQASVNPPLPGPKPSIPEEHRQAIPESEAEDQEREPPSATVSPGQIPESDPADLSPRDTPQGEDMLNAIRRGVKLKKTTTNDRSAPRFS

SEQ ID NO: 6968 - protein, 529 aa, Homo sapiens
MSRKSSVCSSLNSVNSSDSRSSGSHSHSPSSHYRYRSSNLAQQAPVRLSSVSSHDSGFISQDAFQSKSPSPMPPEAPNQNSSSSASSEASETCQSVSECSSPTSVSSGSTMGAWVSTEKLSNGFSHYSLSSESHVGPTGAGLFPHCLPASRLLPRVTSVHLPDYAHYYTIGPGMFPSSQIPSWKDWAKPGPYDQPLVNTLQRRKEKREPDPNGGGPTTASGPPAAAEEAQRPRSMTVSAATRPGEEMEACEELALALSRGLQLDTQRSSRDSLQCSSGYSTQTTTPCCSEDTIPSQVSDYDYFSVSGDQEADQQEFDKSSTIPRNSDISQSYRRMFQAKRPASTAGLPTTLGPAMVTPGVATIRRTPSTKPSVRRGTIGAGPIPIKTPVIPVKTPTVPDLPGVLPAPPDGPEERGEHSPESPSVGEGPQGVTSMPSSMWSGQASVNPPLPGPKPSIPEEHRQAIPESEAEDQEREPPSATVSPGQIPESDPADLSPRDTPQGEDMLNAIRRGVKLKKTTTNDRSAPRFS

SEQ ID NO: 6969 - protein, 755 aa, Homo sapiens
MEAVIEKECSALGGLFQTIISDMKGSYPVWEDFINKAGKLQSQLRTTVVAAAAFLDAFQKVADMATNTRGGTREIGSALTRMCMRHRSIEAKLRQFSSALIDCLINPLQEQMEEWKKVANQLDKDHAKEYKKARQEIKKKSSDTLKLQKKAKKGRGDIQPQLDSALQDVNDKYLLLEETEKQAVRKALIEERGRFCTFISMLRPVIEEEISMLGEITHLQTISEDLKSLTMDPHKLPSSSEQVILDLKGSDYSWSYQTPPSSPSTTMSRKSSVCSSLNSVNSSDSRSSGSHSHSPSSHYRYRSSNLAQQAPVRLSSVSSHDSGFISQDAFQSKSPSPMPPEAPNQLSNGFSHYSLSSESHVGPTGAGLFPHCLPASRLLPRVTSVHLPDYAHYYTIGPGMFPSSQIPSWKDWAKPGPYDQPLVNTLQRRKEKREPDPNGGGPTTASGPPAAAEEAQRPRSMTVSAATRPGEEMEACEELALALSRGLQLDTQRSSRDSLQCSSGYSTQTTTPCCSEDTIPSQVSDYDYFSVSGDQEADQQEFDKSSTIPRNSDISQSYRRMFQAKRPASTAGLPTTLGPAMVTPGVATIRRTPSTKPSVRRGTIGAGPIPIKTPVIPVKTPTVPDLPGVLPAPPDGPEERGEHSPESPSVGEGPQGVTSMPSSMWSGQASVNPPLPGPKPSIPEEHRQAIPESEAEDQEREPPSATVSPGQIPESDPADLSPRDTPQGEDMLNAIRRGVKLKKTTTNDRSAPRFS

SEQ ID NO: 6970 - protein, 478 aa, Homo sapiens
MAGVEEVAASGSHLNGDLDPDDREEGAASTAEEAAKKKRRKKKKSKGPSAAGEQEPDKESGASVDEVARQLERSALEDKERDEDDEDGDGDGDGATGKKKKKKKKKRGPKVQTDPPSVPICDLYPNGVFPKGQECEYPPTQDGRTAAWRTTSEEKKALDQASEEIWNDFREAAEAHRQVRKYVMSWIKPGMTMIEICEKLEDCSRKLIKENGLNAGLAFPTGCSLNNCAAHYTPNAGDTTVLQYDDICKIDFGTHISGRIIDCAFTVTFNPKYDTLLKAVKDATNTGIKCAGIDVRLCDVGEAIQEVMESYEVEIDGKTYQVKPIRNLNGHSIGQYRIHAGKTVPIVKGGEATRMEEGEVYAIETFGSTGKGVVHDDMECSHYMKNFDVGHVPIRLPRTKHLLNVINENFGTLAFCRRWLDRLGESKYLMALKNLCDLGIVDPYPPLCDIKGSYTAQFEHTILLRPTCKEVVSRGDDY

SEQ ID NO: 6971 - protein, 580 aa, Homo sapiens
MGTTGLESLSLGDRGAAPTVTSSERLVPDPPNDLRKEDVAMELERVGEDEEQMMIKRSSECNPLLQEPIASAQFGATAGTECRKSVPCGWERVVKQRLFGKTAGRFDVYFISPQGLKFRSKSSLANYLHKNGETSLKPEDFDFTVLSKRGIKSRYKDCSMAALTSHLQNQSNNSNWNLRTRSKCKKDVFMPPSSSSELQESRGLSNFTSTHLLLKEDEGVDDVNFRKVRKPKGKVTILKGIPIKKTKKGCRKSCSGFVQSDSKRESVCNKADAESEPVAQKSQLDRTVCISDAGACGETLSVTSEENSLVKKKERSLSSGSNFCSEQKTSGIINKFCSAKDSEHNEKYEDTFLESEEIGTKVEVVERKEHLHTDILKRGSEMDNNCSPTRKDFTGEKIFQEDTIPRTQIERRKTSLYFSSKYNKEALSPPRRKAFKKWTPPRSPFNLVQETLFHDPWKLLIATIFLNRTSGKMAIPVLWKFLEKYPSAEVARTADWRDVSELLKPLGLYDLRAKTIVKFSDEYLTKQWKYPIELHGIGKYGNDSYRIFCVNEWKQVHPEDHKLNKYHDWLWENHEKLSLS

SEQ ID NO: 6972 - protein, 262 aa, Homo sapiens
MGTTGLESLSLGDRGAAPTVTSSERLVPDPPNDLRKEDVAMELERVGEDEEQMMIKRSSECNPLLQEPIASAQFGATAGTECQDTIPRTQIERRKTSLYFSSKYNKEALSPPRRKAFKKWTPPRSPFNLVQETLFHDPWKLLIATIFLNRTSGKMAIPVLWKFLEKYPSAEVARTADWRDVSELLKPLGLYDLRAKTIVKFSDEYLTKQWKYPIELHGIGKYGNDSYRIFCVNEWKQVHPEDHKLNKYHDWLWENHEKLSLS

SEQ ID NO: 6973 - protein, 574 aa, Homo sapiens
MGTTGLESLSLGDRGAAPTVTSSERLVPDPPNDLRKEDVAMELERVGEDEEQMMIKRSSECNPLLQEPIASAQFGATAGTECRKSVPCGWERVVKQRLFGKTAGRFDVYFISPQGLKFRSKSSLANYLHKNGETSLKPEDFDFTVLSKRGIKSRYKDCSMAALTSHLQNQSNNSNWNLRTRSKCKKDVFMPPSSSSELQESRGLSNFTSTHLLLKEDEGVDDVNFRKVRKPKGKVTILKGIPIKKTKKGCRKSCSGFVQSDSKRESVCNKADAESEPVAQKSQLDRTVCISDAGACGETLSVTSEENSLVKKKERSLSSGSNFCSEQKTSGIINKFCSAKDSEHNEKYEDTFLESEEIGTKVEVVERKEHLHTDILKRGSEMDNNCSPTRKDFTEDTIPRTQIERRKTSLYFSSKYNKEALSPPRRKAFKKWTPPRSPFNLVQETLFHDPWKLLIATIFLNRTSGKMAIPVLWKFLEKYPSAEVARTADWRDVSELLKPLGLYDLRAKTIVKFSDEYLTKQWKYPIELHGIGKYGNDSYRIFCVNEWKQVHPEDHKLNKYHDWLWENHEKLSLS

SEQ ID NO: 6974 - protein, 30 aa, Homo sapiens
MVNEARGNSSLNPCLEGSASSGSESSKDSS

SEQ ID NO: 6975 - protein, 697 aa, Homo sapiens
MDHRKARVLPAGHYCPSLGIWASQVGSVRSSVPPSISRNPAMVNEARGNSSLNPCLEGSASSGSESSKDSSRCSTPGLDPERHERLREKMRRRLESGDKWFSLEFFPPRTAEGAVNLISRFDRMAAGGPLYIDVTWHPAGDPGSDKETSSMMIASTAVNYCGLETILHMTCCRQRLEEITGHLHKAKQLGLKNIMALRGDPIGDQWEEEEGGFNYAVDLVKHIRSEFGDYFDICVAGYPKGHPEAGSFEADLKHLKEKVSAGADFIITQLFFEADTFFRFVKACTDMGITCPIVPGIFPIQGYHSLRQLVKLSKLEVPQEIKDVIEPIKDNDAAIRNYGIELAVSLCQELLASGLVPGLHFYTLNREMATTEVLKRLGMWTEDPRRPLPWALSAHPKRREEDVRPIFWASRPKSYIYRTQEWDEFPNGRWGNSSSPAFGELKDYYLFYLKSKSPKEELLKMWGEELTSEESVFEVFVLYLSGEPNRNGHKVTCLPWNDEPLAAETSLLKEELLRVNRQGILTINSQPNINGKPSSDPIVGWGPSGGYVFQKAYLEFFTSRETAEALLQVLKKYELRVNYHLVNVKGENITNAPELQPNAVTWGIFPGREIIQPTVVDPVSFMFWKDEAFALWIERWGKLYEEESPSRTIIQYIHDNYFLVNLVDNDFPLDNCLWQVVEDTLELLNRPTQNARETEAP

SEQ ID NO: 6976 - protein, 697 aa, Homo sapiens; identical to SEQ ID NO: 6975

SEQ ID NO: 6977 - protein, 656 aa, Homo sapiens [sequence omitted]

SEQ ID NO: 6978 - protein, 656 aa, Homo sapiens [sequence omitted]

SEQ ID NO: 6979 - protein, 30 aa, Homo sapiens; identical to SEQ ID NO: 6974

SEQ ID NO: 6980 - protein, 143 aa, Homo sapiens
MVNEARGNSSLNPCLEGSASSGSESSKDSSRCSTPGLDPERHERLREKMRRRLESGDKWFSLEFFPPRTAEGAVNLISRFDRMAAGGPLYIDVTWHPAGDPGSDKETSSMMIASTAVNYCGLETILHMTCCRQRLEEITGHLH

SEQ ID NO: 6981 - protein, 53 aa, Homo sapiens
MCRGCGCLPPDAPCPTLCSRNPAMVNEARGNSSLNPCLEGSASSGSESSKDSS

SEQ ID NO: 6982 - protein, 30 aa, Homo sapiens; identical to SEQ ID NO: 6974

SEQ ID NO: 6983 - protein, 835 aa, Homo sapiens
MAAPILKDVVAYVEVWSSNGTENYSKTFTTQLVDMGAKVSKTFNKQVTHVIFKDGYQSTWDKAQKRGVKLVSVLWVEKCRTAGAHIDESLFPAANMNEHLSSLIKKKRKCMQPKDFNFKTPENDKRFQKKFEKMAKELQRQKTNLDDDVPILLFESNGSLIYTPTIEINSRHHSAMEKRLQEMKEKRENLSPTSSQMIQQSHDNPSNSLCEAPLNISRDTLCSDEYFAGGLHSSFDDLCGNSGCGNQERKLEGSINDIKSDVCISSLVLKANNIHSSPSFTHLDKSSPQKFLSNLSKEEINLQRNIAGKVVTPDQKQAAGMSQETFEEKYRLSPTLSSTKGHLLIHSRPRSSSVKRKRVSHGSHSPPKEKCKRKRSTRRSIMPRLQLCRSEDRLQHVAGPALEALSCGESSYDDYFSPDNLKERYSENLPPESQLPSSPAQLSCRSLSKKERTSIFEMSDFSCVGKKTRTVDITNFTAKTISSPRKTGNGEGRATSSCVTSAPEEALRCCRQAGKEDACPEGNGFSYTIEDPALPKGHDDDLTPLEGSLEEMKEAVGLKSTQNKGTTSKISNSSEGEAQSEHEPCFIVDCNMETSTEEKENLPGGYSGSVKNRPTRHDVLDDSCDGFKDLIKPHEELKKSGRGKKPTRTLVMTSMPSEKQNVVIQVVDKLKGFSIAPDVCETTTHVLSGKPLRTLNVLLGIARGCWVLSYDWVLWSLELGHWISEEPFELSHHFPAAPLCRSECHLSAGPYRGTLFADQPAMFVSPASSPPVAKLCELVHLCGGRVSQVPRQASIVIGPYSGKKKATVKYLSEKWVLDSITQHKVCAPENYLLSQ

SEQ ID NO: 6984 - protein, 610 aa, Homo sapiens
MAAPILKDVVAYVEVWSSNGTENYSKTFTTQLVDMGAKVSKTFNKQVTHVIFKDGYQSTWDKAQKRGVKLVSVLWVEKCRTAGAHIDESLFPAANMNEHLSSLIKKKRKCMQPKDFNFKTPENDKRFQKKFEKMAKELQRQKTNLDDDVPILLFESNGSLIYTPTIEINSRHHSAMEKRLQEMKEKRENLSPTSSQMIQQSHDNPSNSLCEAPLNISRDTLCSDEYFAGGLHSSFDDLCGNSGCGNQERKLEGSINDIKSDVCISSLVLKANNIHSSPSFTHLDKSSPQKFLSNLSKEEINLQRNIAGKVVTPDQKQAAGMSQETFEEKYRLSPTLSSTKGHLLIHSRPRSSSVKRKRVSHGSHSPPKEKCKRKRSTRRSIMPRLQLCRSEDRLQHVAGPALEALSCGESSYDDYFSPDNLKERYSENLPPESQLPSSPAQLSCRSLSKKERTSIFEMSDFSCVGKKTRTVDITNFTAKTISSPRKTGNGEGRATSSCVTSAPEEALRCCRQAGKEDACPEGNGFSYTIEDPALPKGHDDDLTPLEGSLEEMKEAVGLKSTQNKGTTSKISNSSEGEAQSEHEPCFIVDCNMETSTEEKENLPGGYSGSM

SEQ ID NO: 6985 - protein, 562 aa, Homo sapiens
MAAPILKDVVAYVEVWSSNGTENYSKTFTTQLVDMGAKVSKTFNKQVTHVIFKDGYQSTWDKAQKRGVKLVSVLWVEKCRTAGAHIDESLFPAANMNEHLSSLIKKKRKCMQPKDFNFKTPENDKRFQKKFEKMAKELQRQKTNLASQMIQQSHDNPSNSLCEAPLNISRDTLCSDEYFAGGLHSSFDDLCGNSGCGNQERKLEGSINDIKSDVCISSLVLKANNIHSSPSFTHLDKSSPQKFLSNLSKEEINLQRNIAGKVVTPDQKQAAGMSQETFEEKYRLSPTLSSTKGHLLIHSRPRSSSVKRKRVSHGSHSPPKEKCKRKRSTRRSIMPRLQLCRSEDRLQHVAGPALEALSCGESSYDDYFSPDNLKERYSENLPPESQLPSSPAQLSCRSLSKKERTSIFEMSDFSCVGKKTRTVDITNFTAKTISSPRKTGNGEGRATSSCVTSAPEEALRCCRQAGKEDACPEGNGFSYTIEDPALPKGHDDDLTPLEGSLEEMKEAVGLKSTQNKGTTSKISNSSEGEAQSEHEPCFIVDCNMETSTEEKENLPGGYSGSM

SEQ ID NO: 6986 - protein, 77 aa, Homo sapiens
MNVLLGSVVIFATFVTLCNASCYFIPNEGVPGDSTRMFLHLWVMTKTTAKESSRRRTASISWWRRRTQKRPVLSVNG

SEQ ID NO: 6987 - protein, 114 aa, Homo sapiens
MNVLLGSVVIFATFVTLCNASCYFIPNEGVPGDSTRKCMDLKGNKHPINSEWQTDNCETCTCYETEISCCTLVSTPVGYDKDNCQRIFKKEDCKYIVVEKKDPKKTCSVSEWII

SEQ ID NO: 6988 - protein, 1270 aa, Homo sapiens
MTDDNSDDKIEDELQTFFTSDKDGNTHAYNPKSPPTQNSSASSVNWNSANPDDMVVDYETDPAVVTGENISLSLQGVEVFGHEKSSSDFISKQVLDMHKDSICQCPALVGTEKPKYLQHSCHSLEAVEGQSVEPSLPFVWKPNDNLNCAGYCDALELNQTFDMTVDKVNCTFISHHAIGKSQSFHTAGSLPPTGRRSGSTSSLSYSTWTSSHSDKTHARETTYDRESFENPQVTPSEAQDMTYTAFSDVVMQSEVFVSDIGNQCACSSGKVTSEYTDGSQQRLVGEKETQALTPVSDGMEVPNDSALQEFFCLSHDESNSEPHSQSSYRHKEMGQNLRETVSYCLIDDECPLMVPAFDKSEAQVLNPEHKVTETEDTQMVSKGKDLGTQNHTSELILSSPPGQKVGSSFGLTWDANDMVISTDKTMCMSTPVLEPTKVTFSVSPIEATEKCKKVEKGNRGLKNIPDSKEAPVNLCKPSLGKSTIKTNTPIGCKVRKTEIISYPRPNFKNVKAKVMSRAVLQPKDAALSKVTPRPQQTSASSPSSVNSRQQTVLSRTPRSDLNADKKAEILINKTHKQQFNKLITSQAVHVTTHSKNASHRVPRTTSAVKSNQEDVDKASSSNSACETGSVSALFQKIKGILPVKMESAECLEMTYVPNIDRISPEKKGEKENGTSMEKQELKQEIMNETFEYGSLFLGSASKTTTTSGRNISKPDSCGLRQIAAPKAKVGPPVSCLRRNSDNRNPSADRAVSPQRIRRVSSSGKPTSLKTAQSSWVNLPRPLPKSKASLKSPALRRTGSTPSIASTHSELSTYSNNSGNAAVIKYEEKPPKPAFQNGSSGSFYLKPLVSRAHVHLMKTPPKGPSRKNLFTALNAVEKSRQKNPRSLCIQPQTAPDALPPEKTLELTQYKTKCENQSGFILQLKQLLACGNTKFEALTVVIQHLLSEREEALKQHKTLSQELVNLRGELVTASTTCEKLEKARNELQTVYEAFVQQHQAEKTERENRLKEFYTREYEKLRDTYIEEAEKYKMQLQEQFDNLNAAHETSKLEIEASHSEKLELLKKAYEASLSEIKKGHEIEKKSLEDLLSEKQESLEKQINDLKSENDALNEKLKSEEQKRRAREKANLKNPQIMYLEQELESLKAVLEIKNEKLHQQDIKLMKMEKLVDNNTALVDKLKRFQQENEELKARMDKHMAISRQLSTEQAVLQESLEKESKVNKRLSMENEELLWKLHNGDLCSPKRSPTSSAIPLQSPRNSGSFPSPSISPR

SEQ ID NO: 6989 - protein, 436 aa, Homo sapiens
MLLSPKFSLSTIHIRLTAKGLLRNLRLPSGFRRSTVVFHTVEKSRQKNPRSLCIQPQTAPDALPPEKTLELTQYKTKCENQSGFILQLKQLLACGNTKFEALTVVIQHLLSEREEALKQHKTLSQELVNLRGELVTASTTCEKLEKARNELQTVYEAFVQQHQAEKTERENRLKEFYTREYEKLRDTYIEEAEKYKMQLQEQFDNLNAAHETSKLEIEASHSEKLELLKKAYEASLSEIKKGHEIEKKSLEDLLSEKQESLEKQINDLKSENDALNEKLKSEEQKRRAREKANLKNPQIMYLEQELESLKAVLEIKNEKLHQQDIKLMKMEKLVDNNTALVDKLKRFQQENEELKARMDKHMAISRQLSTEQAVLQESLEKESKVNKRLSMENEELLWKLHNGDLCSPKRSPTSSAIPLQSPRNSGSFPSPSISPR

SEQ ID NO: 6990 - protein, 517 aa, Homo sapiens
MTVPGGFRSCTETDISSKIFINSTLTPPAGSERHYDATLLTLLVVGSYSLCIIPLLATFTGKKTGNAAVIKYEEKPPKPAFQNGSSGSFYLKPLVSRAHVHLMKTPPKGPSRKNLFTALNAVEKSRQKNPRSLCIQPQTAPDALPPEKTLELTQYKTKCENQSGFILQLKQLLACGNTKFEALTVVIQHLLSEREEALKQHKTLSQELVNLRGELVTASTTCEKLEKARNELQTVYEAFVQQHQAEKTERENRLKEFYTREYEKLRDTYIEEAEKYKMQLQEQFDNLNAAHETSKLEIEASHSEKLELLKKAYEASLSEIKKGHEIEKKSLEDLLSEKQESLEKQINDLKSENDALNEKLKSEEQKRRAREKANLKNPQIMYLEQELESLKAVLEIKNEKLHQQDIKLMKMEKLVDNNTALVDKLKRFQQENEELKARMDKHMAISRQLSTEQAVLQESLEKESKVNKRLSMENEELLWKLHNGDLCSPKRSPTSSAIPLQSPRNSGSFPSPSISPR

SEQ ID NO: 6991 - protein, 770 aa, Homo sapiens
MTDDNSDDKIEDELQTFFTSDKDGNTHAYNPKSPPTQNSSASSVNWNSANPDDMVVDYETDPAVVTGENISLSLQGVEVFGHEKSSSDFISKQVLDMHKDSICQCPALVGTEKPKYLQHSCHSLEAVEGQSVEPSLPFVWKPNDNLNCAGYCDALELNQTFDMTVDKVNCTFISHHAIGKSQSFHTAGSLPPTGRRSGSTSSLSYSTWTSSHSDKTHARETTYDRESFENPQVTPSEAQDMTYTAFSDVVMQSEVFVSDIGNQCACSSGKVTSEYTDGSQQRLVGEKETQALTPVSDGMEVPNDSALQEFFCLSHDESNSEPHSQSSYRHKEMGQNLRETVSYCLIDDECPLMVPAFDKSEAQVLNPEHKVTETEDTQMVSKGKDLGTQNHTSELILSSPPGQKVGSSFGLTWDANDMVISTDKTMCMSTPVLEPTKVTFSVSPIEATEKCKKVEKGNRGLKNIPDSKEAPVNLCKPSLGKSTIKTNTPIGCKVRKTEIISYPRPNFKNVKAKVMSRAVLQPKDAALSKVTPRPQQTSASSPSSVNSRQQTVLSRTPRSDLNADKKAEILINKTHKQQFNKLITSQAVHVTTHSKNASHRVPRTTSAVKSNQEDVDKASSSNSACETGSVSALFQKIKGILPVKMESAECLEMTYVPNIDRISPEKKGEKENGTSMEKQELKQEIMNETFEYGSLFLGSASKTTTTSGRNISKPDSCGLRQIAAPKAKVGPPVSCLRRNSDNRNPSADRAVSPQRIRRVSSSVLPKAAFS

SEQ ID NO: 6992 - protein, 1216 aa, Homo sapiens
MTDDNSDDKIEDELQTFFTSDKDGNTHAYNPKSPPTQNSSASSVNWNSANPDDMVVDYETDPAVVTGENISLSLQGVEVFGHEKSSSDFISKQVLDMHKDSICQCPALVGTEKPKYLQHSCHSLEAVEGQSVEPSLPFVWKPNDNLNCAGYCDALELNQTFDMTVDKVNCTFISHHAIGKSQSFHTAGSLPPTGRRSGSTSSLSYSTWTSSHSDKTHARETTYDRESFENPQVTPSEAQDMTYTAFSDVVMQSEVFVSDIGNQCACSSGKVTSEYTDGSQQRLVGEKETQALTPVSDGMEVPNDSALQEFFCLSHDESNSEPHSQSSYRHKEMGQNLRETVSYCLIDDECPLMVPAFDKSEAQVLNPEHKVTETEDTQMVSKGKDLGTQNHTSELILSSPPGQKVGSSFGLTWDANDMVISTDKTMCMSTPVLEPTKVTFSVSPIEATEKCKKVEKGNRGLKNIPDSKEAPVNLCKPSLGKSTIKTNTPIGCKVRKTEIISYPRPNFKNVKAKVMSRAVLQPKDAALSKVTPRPQQTSASSPSSVNSRQQTVLSRTPRSDLNADKKAEILINKTHKQQFNKLITSQAVHVTTHSKNASHRVPRTTSAVKSNQEDVDKASSSNSACETGSVSALFQKIKGILPVKMESAECLEMTYVPNIDRISPEKKGEKENGTSMEKQELKQEIMNETFEYGSLFLGSASKTTTTSGRNISKPDSCGLRQIAAPKAKVGPPVSCLRRNSDNRNPSADRAVSPQRIRRVSSSAGNAAVIKYEEKPPKPAFQNGSSGSFYLKPLVSRAHVHLMKTPPKGPSRKNLFTALNAVEKSRQKNPRSLCIQPQTAPDALPPEKTLELTQYKTKCENQSGFILQLKQLLACGNTKFEALTVVIQHLLSEREEALKQHKTLSQELVNLRGELVTASTTCEKLEKARNELQTVYEAFVQQHQAEKTERENRLKEFYTREYEKLRDTYIEEAEKYKMQLQEQFDNLNAAHETSKLEIEASHSEKLELLKKAYEASLSEIKKGHEIEKKSLEDLLSEKQESLEKQINDLKSENDALNEKLKSEEQKRRAREKANLKNPQIMYLEQELESLKAVLEIKNEKLHQQDIKLMKMEKLVDNNTALVDKLKRFQQENEELKARMDKHMAISRQLSTEQAVLQESLEKESKVNKRLSMENEELLWKLHNGDLCSPKRSPTSSAIPLQSPRNSGSFPSPSISPR

SEQ ID NO: 6993 - protein, 342 aa, Homo sapiens
MGCPSSKLCLYSPCAATRREEALKQHKTLSQELVNLRGELVTASTTCEKLEKARNELQTVYEAFVQQHQAEKTERENRLKEFYTREYEKLRDTYIEEAEKYKMQLQEQFDNLNAAHETSKLEIEASHSEKLELLKKAYEASLSEIKKGHEIEKKSLEDLLSEKQESLEKQINDLKSENDALNEKLKSEEQKRRAREKANLKNPQIMYLEQELESLKAVLEIKNEKLHQQDIKLMKMEKLVDNNTALVDKLKRFQQENEELKARMDKHMAISRQLSTEQAVLQESLEKESKVNKRLSMENEELLWKLHNGDLCSPKRSPTSSAIPLQSPRNSGSFPSPSISPR

SEQ ID NO: 6994 - protein, 1216 aa, Homo sapiens; identical to SEQ ID NO: 6992

SEQ ID NO: 6995 - protein, 415 aa, Homo sapiens
MKTPPKGPSRKNLFTALNAVEKSRQKNPRSLCIQPQTAPDALPPEKTLELTQYKTKCENQSGFILQLKQLLACGNTKFEALTVVIQHLLSEREEALKQHKTLSQELVNLRGELVTASTTCEKLEKARNELQTVYEAFVQQHQAEKTERENRLKEFYTREYEKLRDTYIEEAEKYKMQLQEQFDNLNAAHETSKLEIEASHSEKLELLKKAYEASLSEIKKGHEIEKKSLEDLLSEKQESLEKQINDLKSENDALNEKLKSEEQKRRAREKANLKNPQIMYLEQELESLKAVLEIKNEKLHQQDIKLMKMEKLVDNNTALVDKLKRFQQENEELKARMDKHMAISRQLSTEQAVLQESLEKESKVNKRLSMENEELLWKLHNGDLCSPKRSPTSSAIPLQSPRNSGSFPSPSISPR

SEQ ID NO: 6996 - protein, 2468 aa, Homo sapiens
MATVVVEATEPEPSGSIANPAASTSPSLSHRFLDSKFYLLVVVGEIVTEEHLRRAIGNIELGIRSWDTNLIECNLDQELKLFVSRHSARFSPEVPGQKILHHRSDVLETVVLINPSDEAVSTEVRLMITDAARHKLLVLTGQCFENTGELILQSGSFSFQNFIEIFTDQEIGELLSTTHPANKASLTLFCPEEGDWKNSNLDRHNLQDFINIKLNSASILPEMEGLSEFTEYLSESVEVPSPFDILEPPTSGGFLKLSKPCCYIFPGGRGDSALFAVNGFNMLINGGSERKSCFWKLIRHLDRVDSILLTHIGDDNLPGINSMLQRKIAELEEEQSQGSTTNSDWMKNLISPDLGVVFLNVPENLKNPEPNIKMKRSIEEACFTLQYLNKLSMKPEPLFRSVGNTIDPVILFQKMGVGKLEMYVLNPVKSSKEMQYFMQQWTGTNKDKAEFILPNGQEVDLPISYLTSVSSLIVWHPANPAEKIIRVLFPGNSTQYNILEGLEKLKHLDFLKQPLATQKDLTGQVPTPVVKQTKLKQRADSRESLKPAAKPLPSKSVRKESKEETPEVTKVNHVEKPPKVESKEKVMVKKDKPIKTETKPSVTEKEVPSKEEPSPVKAEVAEKQATDVKPKAAKEKTVKKETKVKPEDKKEEKEKPKKEVAKKEDKTPIKKEEKPKKEEVKKEVKKEIKKEEKKEPKKEVKKETPPKEVKKEVKKEEKKEVKKEEKEPKKEIKKLPKDAKKSSTPLSEAKKPAALKPKVPKKEESVKKDSVAAGKPKEKGKIKVIKKEGKAAEAVAAAVGTGATTAAVMAAAGIAAIGPAKELEAERSLMSSPEDLTKDFEELKAEEVDVTKDIKPQLELIEDEEKLKETEPVEAYVIQKEREVTKGPAESPDEGITTTEGEGECEQTPEELEPVEKQGVDDIEKFEDEGAGFEESSETGDYEEKAETEEAEEPEEDGEEHVCVSASKHSPTEDEESAKAEADAYIREKRESVASGDDRAEEDMDEAIEKGEAEQSEEEADEEDKAEDAREEEYEPEKMEAEDYVMAVVDKAAEAGGAEEQYGFLTTPTKQLGAQSPGREPASSIHDETLPGGSESEATASDEENREDQPEEFTATSGYTQSTIEISSEPTPMDEMSTPRDVMSDETNNEETESPSQEFVNITKYESSLYSQEYSKPADVTPLNGFSEGSKTDATDGKDYNASASTISPPSSMEEDKFSRSALRDAYCSEVKASTTLDIKDSISAVSSEKVSPSKSPSLSPSPPSPLEKTPLGERSVNFSLTPNEIKVSAEAEVAPVSPEVTQEVVEEHCASPEDKTLEVVSPSQSVTGSAGHTPYYQSPTDEKSSHLPTEVIEKPPAVPVSFEFSDAKDENERASVSPMDEPVPDSESPIEKVLSPLRSPPLIGSESAYESFLSADDKASGRGAESPFEEKSGKQGSPDQVSPVSEMTSTSLYQDKQEGKSTDFAPIKEDFGQEKKTDDVEAMSSQPALALDERKLGDVSPTQIDVSQFGSFKEDTKMSISEGTVSDKSATPVDEGVAEDTYSHMEGVASVSTASVATSSFPEPTTDDVSPSLHAEVGSPHSTEVDDSLSVSVVQTPTTFQETEMSPSKEECPRPMSISPPDFSPKTAKSRTPVQDHRSEQSSMSIEFGQESPEQSLAMDFSRQSPDHPTVGAGVLHITENGPTEVDYSPSDMQDSSLSHKIPPMEEPSYTQDNDLSELISVSQVEASPSTSSAHTPSQIASPLQEDTLSDVAPPRDMSLYASLTSEKVQSLEGEKLSPKSDISPLTPRESSPLYSPTFSDSTSAVKEKTATCHSSSSPPIDAASAEPYGFRASVLFDTMQHHLALNRDLSTPGLEKDSGGKTPGDFSYAYQKPEETTRSPDEEDYDYESYEKTTRTSDVGGYYYEKIERTTKSPSDSGYSYETIGKTTKTPEDGDYSYEIIEKTTRTPEEGGYSYDISEKTTSPPEVSGYSYEKTERSRRLLDDISNGYDDSEDGGHTLGDPSYSYETTEKITSFPESEGYSYETSTKTTRTPDTSTYCYETAEKITRTPQASTYSYETSDLCYTAEKKSPSEARQDVDLCLVSSCEYKHPKTELSPSFINPNPLEWFASEEPTEESEKPLTQSGGAPPPPGGKQQGRQCDETPPTSVSESAPSQTDSDVPPETEECPSITADANIDSEDESETIPTDKTVTYKHMDPPPAPVQDRSPSPRHPDVSMVDPEALAIEQNLGKALKKDLKEKTKTKKPGTKTKSSSPVKKSDGKSKPLAASPKPAGLKESSDKVSRVASPKKKESVEKAAKPTTTPEVKAARGEEKDKETKNAANASASKSAKTATAGPGTTKTTKSSAVPPGLPVYLDLCYIPNHSNSKNVDVEFFKRVRSSYYVVSGNDPAAEEPSRAVLDALLEGKAQWGSNMQVTLIPTHDSEVMREWYQETHEKQQDLNIMVLASSSTVVMQDESFPACKIEL

SEQ ID NO: 6997 - protein, 143 aa, Homo sapiens
MQHRGFLLLTLLALLALTSAVAKKKDKVKKGGPGSECAEWAWGPCTPSSKDCGVGFREGTCGAQTQRIRCRVPCNWKKEFGADCKYKFENWGACDGGTGTKVRQGTLKKARYNAQCQETIRVTKPCTPKTKAKAKAKKGKGKD

SEQ ID NO: 6998 - protein, 143 aa, Homo sapiens; identical to SEQ ID NO: 6997

SEQ ID NO: 6999 - protein, 143 aa, Homo sapiens; identical to SEQ ID NO: 6997

SEQ ID NO: 7000 - protein, 152 aa, Homo sapiens
MQHRGFLLLTLLALLALTSAVAKKKEEGALQCSVPGDHPRHQALHPQDQSKGQSQEREGKGLDAKPGCQGAPGVTWGLAHALPLPGPRCDPPVPSVCSLALINHALPCPSHSPAPPLSAQSGEGQGILGSLSLPQSNVSPRARFCSSPQFHY

SEQ ID NO: 7001 - protein, 143 aa, Homo sapiens; identical to SEQ ID NO: 6997

SEQ ID NO: 7002 - protein, 143 aa, Homo sapiens; identical to SEQ ID NO: 6997

SEQ ID NO: 7003 - protein, 143 aa, Homo sapiens; identical to SEQ ID NO: 6997

SEQ ID NO: 7004 - protein, 49 aa, Homo sapiens
MQHRGFLLLTLLALLALTSAVAKKKDKVKKGGPGSECAEWAWGPCTPSS

SEQ ID NO: 7005 - protein, 131 aa, Homo sapiens
MQHRGFLLLTLLALLALTSAVAKKKDKVKKGGPGSECAEWAWGPCTPSSKDCGVGFREGTCGAQTQRIRCRVPCNWKKEFGADCKYKFENWGACDGGTGTKVRQGTLKKARYNAQCQETIRVTKPCTPKTK

SEQ ID NO: 7006 - protein, 87 aa, Homo sapiens
MQHRGFLLLTLLALLALTSAVAKKKADCKYKFENWGACDGGTGTKVRQGTLKKARYNAQCQETIRVTKPCTPKTKAKAKAKKGKGKD

SEQ ID NO: 7007 - protein, 904 aa, Homo sapiens
MAESSESFTMASSPAQRRRGNDPLTSSPGRSSRRTDALTSSPGRDLPPFEDESEGLLGTEGPLEEEEDGEELIGDGMERDYRAIPELDAYEAEGLALDDEDVEELTASQREAAERAMRQRDREAGRGLGRMRRGLLYDSDEEDEERPARKRRQVERATEDGEEDEEMIESIENLEDLKGHSVREWVSMAGPRLEIHHRFKNFLRTHVDSHGHNVFKERISDMCKENRESLVVNYEDLAAREHVLAYFLPEAPAELLQIFDEAALEVVLAMYPKYDRITNHIHVRISHLPLVEELRSLRQLHLNQLIRTSGVVTSCTGVLPQLSMVKYNCNKCNFVLGPFCQSQNQEVKPGSCPECQSAGPFEVNMEETIYQNYQRIRIQESPGKVAAGRLPRSKDAILLADLVDSCKPGDEIELTGIYHNNYDGSLNTANGFPVFATVILANHVAKKDNKVAVGELTDEDVKMITSLSKDQQIGEKIFASIAPSIYGHEDIKRGLALALFGGEPKNPGGKHKVRGDINVLLCGDPGTAKSQFLKYIEKVSSRAIFTTGQGASAVGLTAYVQRHPVSREWTLEAGALVLADRGVCLIDEFDKMNDQDRTSIHEAMEQQSISISKAGIVTSLQARCTVIAAANPIGGRYDPSLTFSENVDLTEPIISRFDILCVVRDTVDPVQDEMLARFVVGSHVRHHPSNKEEEGLANGSAAEPAMPNTYGVEPLPQEVLKKYIIYAKERVHPKLNQMDQDKVAKMYSDLRKESMATGSIPITVRHIESMIRMAEAHARIHLRDYVIEDDVNMAIRVMLESFIDTQKFSVMRSMRKTFARYLSFRRDNNELLLFILKQLVAEQVTYQRNRFGAQQDTIEVPEKDLVDKARQINIHNLSAFYDSELFRMNKFSHDLKRKMILQQF

SEQ ID NO: 7008 - protein, 808 aa, Homo sapiens
MAESSESFTMASSPAQRRRGNDPLTSSPGWGLGRMRRGLLYDSDEEDEERPARKRRQVERATEDGEEDEEMIESIENLEDLKGHSVREWVSMAGPRLEIHHRFKNFLRTHVDSHGHNVFKERISDMCKENRESLVVNYEDLAAREHVLAYFLPEAPAELLQIFDEAALEVVLAMYPKYDRITNHIHVRISHLPLVEELRSLRQLHLNQLIRTSGVVTSCTGVLPQLSMVKYNCNKCNFVLGPFCQSQNQEVKPGSCPECQSAGPFEVNMEETIYQNYQRIRIQESPGKVAAGRLPRSKDAILLADLVDSCKPGDEIELTGIYHNNYDGSLNTANGFPVFATVILANHVAKKDNKVAVGELTDEDVKMITSLSKDQQIGEKIFASIAPSIYGHEDIKRGLALALFGGEPKNPGGKHKVRGDINVLLCGDPGTAKSQFLKYIEKVSSRAIFTTGQGASAVGLTAYVQRHPVSREWTLEAGALVLADRGVCLIDEFDKMNDQDRTSIHEAMEQQSISISKAGIVTSLQARCTVIAAANPIGGRYDPSLTFSENVDLTEPIISRFDILCVVRDTVDPVQDEMLARFVVGSHVRHHPSNKEEEGLANGSAAEPAMPNTYGVEPLPQEVLKKYIIYAKERVHPKLNQMDQDKVAKMYSDLRKESMATGSIPITVRHIESMIRMAEAHARIHLRDYVIEDDVNMAIRVMLESFIDTQKFSVMRSMRKTFARYLSFRRDNNELLLFILKQLVAEQVTYQRNRFGAQQDTIEVPEKDLVDKARQINIHNLSAFYDSELFRMNKFSHDLKRKMILQQF

SEQ ID NO: 7009 - protein, 954 aa, Homo sapiens
MAESSESFTMASSPAQRRRGNDPLTSSPGRSSRRTDALTSSPGRDLPPFEDESEGLLGTEGPLEEEEDGEELIGDGMERDYRAIPELDAYEAEGLALDDEDVEELTASQREAGRGLLYDSDEEDEERPARKRRQVERATEDGEEDEEMIESIENLEDLKGHSVREWVSMAGPRLEIHHRFKNFLRTHVDSHGHNVFKERISDMCKENRESLVVNYEDLAAREHVLAYFLPEAPAELLQIFDEAALEVVLAMYPKYDRITNHIHVRISHLPLVEELRSLRQLHLNQLIRTSGVVTSCTGVLPQLSMVKYNCNKCNFVLGPFCQSQNQEVKPGSCPECQSAGPFEVNMEETIYQNYQRIRIQESPGKVAAGRLPRSKDAILLADLVDSCKPGDEIELTGIYHNNYDGSLNTANGFPVFATVILANHVAKKDNKVAVGELTDEDVKMITSLSKDQQIGEKESSRNASLAEAGIGAIPSQLLAIEPSLRRSGVPIGEVGVSQRQEARSFSSANTHWFLEDLLGPSCRDTMIFASIAPSIYGHEDIKRGLALALFGGEPKNPGGKHKVRGDINVLLCGDPGTAKSQFLKYIEKVSSRAIFTTGQGASAVGLTAYVQRHPVSREWTLEAGALVLADRGVCLIDEFDKMNDQDRTSIHEAMEQQSISISKAGIVTSLQARCTVIAAANPIGGRYDPSLTFSENVDLTEPIISRFDILCVVRDTVDPVQDEMLARFVVGSHVRHHPSNKEEEGLANGSAAEPAMPNTYGVEPLPQEVLKKYIIYAKERVHPKLNQMDQDKVAKMYSDLRKESMATGSIPITVRHIESMIRMAEAHARIHLRDYVIEDDVNMAIRVMLESFIDTQKFSVMRSMRKTFARYLSFRRDNNELLLFILKQLVAEQVTYQRNRFGAQQDTIEVPEKDLVDKARQINIHNLSAFYDSELFRMNKFSHDLKRKMILQQF

SEQ ID NO: 7010 - protein, 808 aa, Homo sapiens
MAGTVVLDDVELREAQRDYLDFLDDEEDQGIYQSKVRELISDNQYRLIVNVNDLRRKNEKRANRLLNNAFEELVAFQRALKDFVASIDATYAKQYEEFYVGLEGSFGSKHVSPRTLTSCFLSCVVCVEGIVTKCSLVRPKVVRSVHYCPATKKTIERRYSDLTTLVAFPSSSVYPTKDEENNPLETEYGLSVYKDHQTITIQEMPEKAPAGQLPRSVDVILDDDLVDKAKPGDRVQVVGTYRCLPGKKGGYTSGTFRTVLIACNVKQMSKDAQPSFSAEDIAKIKKFSKTRSKDIFDQLAKSLAPSIHGHDYVKKAILCLLLGGVERDLENGSHIRGDINILLIGDPSVAKSQLLRYVLCTAPRAIPTTGRGSSGVGLTAAVTTDQETGERRLEAGAMVLADRGVVCIDEFDKMSDMDRTAIHEVMEQGRVTIAKAGIHARLNARCSVLAAANPVYGRYDQYKTPMENIGLQDSLLSRFDLLFIMLDQMDPEQDREISDHVLRMHRYRAPGEQDGDAMPLGSAVDILATDDPNFSQEDQQDTQIYEKHDNLLHGTKKKKEKMVSAAFMKKYIHVAKIIKPVLTQESATYIAEEYSRLRSQDSMSSDTARTSPVTARTLETLIRLATAHAKARMSKTVDLQDAEEAVELVQYAYFKKVLEKEKKRKKRSEDESETEDEEEKSQEDQEQKRKRRKTRQPDAKDGDSYDPYDFSDTEEEMPQVHTPKTADSQETKESQKVELSESRLKAFKVALLDVFREAHAQSIGMNRLTESINRDSEEPFSSVEIQAALSKMQDDNQVMVSEGIIFLI

SEQ ID NO: 7011 - protein, 330 aa, Homo sapiens
MHRYRAPGEQDGDAMPLGSAVDILATDDPNFSQEDQQDTQIYEKHDNLLHGTKKKKEKMVSAAFMKKYIHVAKIIKPVLTQESATYIAEEYSRLRSQDSMSSDTARTSPVTARTLETLIRLATAHAKARMSKTVDLQDAEEAVELVQYAYFKKVLEKEKKRKKRSEDESETEDEEEKSQEDQEQKRKRRKTRQPDAKDGDSYDPYDFSDTEEEMPQVHTPKTADSQETKESQKVELSESRDGISPCCPGWSWTPGLKQSFYLSLPKGWDYRHKPLCLFDLILFNDCRVSMVEGIQGGPLGCVPGSSCAVNRHESPHRIHQPGQRRALLFS

SEQ ID NO: 7012 - protein, 762 aa, Homo sapiens
MWSCGRLREITWTSWTTRLLNNAFEELVAFQRALKDFVASIDATYAKQYEEFYVGLEGSFGSKHVSPRTLTSCFLSCVVCVEGIVTKCSLVRPKVVRSVHYCPATKKTIERRYSDLTTLVAFPSSSVYPTKDEENNPLETEYGLSVYKDHQTITIQEMPEKAPAGQLPRSVDVILDDDLVDKAKPGDRVQVVGTYRCLPGKKGGYTSGTFRTVLIACNVKQMSKDAQPSFSAEDIAKIKKFSKTRSKDIFDQLAKSLAPSIHGHDYVKKAILCLLLGGVERDLENGSHIRGDINILLIGDPSVAKSQLLRYVLCTAPRAIPTTGRGSSGVGLTAAVTTDQETGERRLEAGAMVLADRGVVCIDEFDKMSDMDRTAIHEVMEQGRVTIAKAGIHARLNARCSVLAAANPVYGRYDQYKTPMENIGLQDSLLSRFDLLFIMLDQMDPEQDREISDHVLRMHRYRAPGEQDGDAMPLGSAVDILATDDPNFSQEDQQDTQIYEKHDNLLHGTKKKKEKMVSAAFMKKYIHVAKIIKPVLTQESATYIAEEYSRLRSQDSMSSDTARTSPVTARTLETLIRLATAHAKARMSKTVDLQDAEEAVELVQYAYFKKVLEKEKKRKKRSEDESETEDEEEKSQEDQEQKRKRRKTRQPDAKDGDSYDPYDFSDTEEEMPQVHTPKTADSQETKESQKVELSESRLKAFKVALLDVFREAHAQSIGMNRLTESINRDSEEPFSSVEIQAALSKMQDDNQVMVSEGIIFLI

SEQ ID NO: 7013 - protein, 328 aa, Homo sapiens
RYRAPGEQDGDAMPLGSAVDILATDDPNFSQEDQQDTQIYEKHDNLLHGTKKKKEKMVSAAFMKKYIHVAKIIKPVLTQESATYIAEEYSRLRSQDSMSSDTARTSPVTARTLETLIRLATAHAKARMSKTVDLQDAEEAVELVQYAYFKKVLEKEKKRKKRSEDESETEDEEEKSQEDQEQKRKRRKTRQPDAKDGDSYDPYDFSDTEEEMPQVHTPKTADSQETKESQKVELSESRDGISPCCPGWSWTPGLKQSFYLSLPKGWDYRHKPLCLFDLILFNDCRVSMVEGIQGGPLGCVPGSSCAVNRHESPHRIHQPGQRRALLFS

SEQ ID NO: 7014 - protein, 853 aa, Homo sapiens
MLPRSPPLPRGNLWWREEFGSFRAGVESSWEPPRDFGGGSSLAAGMAGTVVLDDVELREAQRDYLDFLDDEEDQGIYQSKVRELISDNQYRLIVNVNDLRRKNEKRANRLLNNAFEELVAFQRALKDFVASIDATYAKQYEEFYVGLEGSFGSKHVSPRTLTSCFLSCVVCVEGIVTKCSLVRPKVVRSVHYCPATKKTIERRYSDLTTLVAFPSSSVYPTKDEENNPLETEYGLSVYKDHQTITIQEMPEKAPAGQLPRSVDVILDDDLVDKAKPGDRVQVVGTYRCLPGKKGGYTSGTFRTVLIACNVKQMSKDAQPSFSAEDIAKIKKFSKTRSKDIFDQLAKSLAPSIHGHDYVKKAILCLLLGGVERDLENGSHIRGDINILLIGDPSVAKSQLLRYVLCTAPRAIPTTGRGSSGVGLTAAVTTDQETGERRLEAGAMVLADRGVVCIDEFDKMSDMDRTAIHEVMEQGRVTIAKAGIHARLNARCSVLAAANPVYGRYDQYKTPMENIGLQDSLLSRFDLLFIMLDQMDPEQDREISDHVLRMHRYRAPGEQDGDAMPLGSAVDILATDDPNFSQEDQQDTQIYEKHDNLLHGTKKKKEKMVSAAFMKKYIHVAKIIKPVLTQESATYIAEEYSRLRSQDSMSSDTARTSPVTARTLETLIRLATAHAKARMSKTVDLQDAEEAVELVQYAYFKKVLEKEKKRKKRSEDESETEDEEEKSQEDQEQKRKRRKTRQPDAKDGDSYDPYDFSDTEEEMPQVHTPKTADSQETKESQKVELSESRLKAFKVALLDVFREAHAQSIGMNRLTESINRDSEEPFSSVEIQAALSKMQDDNQVMVSEGIIFLI

SEQ ID NO: 7015 - protein, 863 aa, Homo sapiens
MSSPASTPSRRGSRRGRATPAQTPRSEDARSSPSQRRRGEDSTSTGELQPMPTSPGVDLQSPAAQDVLFSSPPQMHSSAIPLDFDVSSPLTYGTPSSRVEGTPRSGVRGTPVRQRPDLGSAQKGLQVDLQSDGAAAEDIVASEQSLGQKLVIWGTDVNVAACKENFQRFLQRFIDPLAKEEENVGIDITEPLYMQRLGEINVIGEPFLNVNCEHIKSFDKNLYRQLISYPQEVIPTFDMAVNEIFFDRYPDSILEHQIQVRPFNALKTKNMRNLNPEDIDQLITISGMVIRTSQLIPEMQEAFFQCQVCAHTTRVEMDRGRIAEPSVCGRCHTTHSMALIHNRSLFSDKQMIKLQESPEDMPAGQTPHTVILFAHNDLVDKVQPGDRVNVTGIYRAVPIRVNPRVSNVKSVYKTHIDVIHYRKTDAKRLHGLDEEAEQKLFSEKRVELLKELSRKPDIYERLASALAPSIYEHEDIKKGILLQLFGGTRKDFSHTGRGKFRAEINILLCGDPGTSKSQLLQYVYNLVPRGQYTSGKGSSAVGLTAYVMKDPETRQLVLQTGALVLSDNGICCIDEFDKMNESTRSVLHEVMEQQTLSIAKAGIICQLNARTSVLAAANPIESQWNPKKTTIENIQLPHTLLSRFDLIFLLLDPQDEAYDRRLAHHLVALYYQSEEQAEEELLDMAVLKDYIAYAHSTIMPRLSEEASQALIEAYVDMRKIGSSRGMVSAYPRQLESLIRLAEAHAKVRLSNKVEAIDVEEAKRLHREALKQSATDPRTGIVDISILTTGMSATSRKRKEELAEALKKLILSKGKTPALKYQQLFEDIRGQSDIAITKDMFEEALRALADDDFLTVTGKTVRLL

SEQ ID NO: 7016 - protein, 823 aa, Homo sapiens
MPGHLPLRDVEARIPPPRGSCSRCQPRLEWTCRALLRRTCCFPALPKCILQLSLLTLMLEGTPRSGVRGTPVRQRPDLGSAQKGLQVDLQSDGAAAEDIVASEQSLGQKLVIWGTDVNVAACKENFQRFLQRFIDPLAKEEENVGIDITEPLYMQRLGEINVIGEPFLNVNCEHIKSFDKNLYRQLISYPQEVIPTFDMAVNEIFFDRYPDSILEHQIQVRPFNALKTKNMRNLNPEDIDQLITISGMVIRTSQLIPEMQEAFFQCQVCAHTTRVEMDRGRIAEPSVCGRCHTTHSMALIHNRSLFSDKQMIKLQESPEDMPAGQTPHTVILFAHNDLVDKVQPGDRVNVTGIYRAVPIRVNPRVSNVKSVYKTHIDVIHYRKTDAKRLHGLDEEAEQKLFSEKRVELLKELSRKPDIYERLASALAPSIYEHEDIKKGILLQLFGGTRKDFSHTGRGKFRAEINILLCGDPGTSKSQLLQYVYNLVPRGQYTSGKGSSAVGLTAYVMKDPETRQLVLQTGALVLSDNGICCIDEFDKMNESTRSVLHEVMEQQTLSIAKAGIICQLNARTSVLAAANPIESQWNPKKTTIENIQLPHTLLSRFDLIFLLLDPQDEAYDRRLAHHLVALYYQSEEQAEEELLDMAVLKDYIAYAHSTIMPRLSEEASQALIEAYVDMRKIGSSRGMVSAYPRQLESLIRLAEAHAKVRLSNKVEAIDVEEAKRLHREALKQSATDPRTGIVDISILTTGMSATSRKRKEELAEALKKLILSKGKTPALKYQQLFEDIRGQSDIAITKDMFEEALRALADDDFLTVTGKTVRLL

SEQ ID NO: 7017 - protein, 863 aa, Homo sapiens; identical to SEQ ID NO: 7015

SEQ ID NO: 7018 - protein, 734 aa, Homo sapiens
MSGFDDPGIFYSDSFGGDAQADEGQARKSQLQRRFKEFLRQYRVGTDRTGFTFKYRDELKRHYNLGEYWIEVEMEDLASFDEDLADYLYKQPAEHLQLLEEAAKEVADEVTRPRPSGEEVLQDIQVMLKSDASPSSIRSLKSDMMSHLVKIPGIIIAASAVRAKATRISIQCRSCRNTLTNIAMRPGLEGYALPRKCNTDQAGRPKCPLDPYFIMPDKCKCVDFQTLKLQELPDAVPHGEMPRHMQLYCDRYLCDKVVPGNRVTIMGIYSIKKFGLTTSRGRDRVGVGIRSSYIRVLGIQVDTDGSGRSFAGAVSPQEEEEFRRLAALPNVYEVISKSIAPSIFGGTDMKKAIACLLFGGSRKRLPDGLTRRGDINLLMLGDPGTAKSQLLKFVEKCSPIGVYTSGKGSSAAGLTASVMRDPSSRNFIMEGGAMVLADGGVVCIDEFDKMREDDRVAIHEAMEQQTISIAKAGITTTLNSRCSVLAAANSVFGRWDETKGEDNIDFMPTILSRFDMIFIVKDEHNEERDVMLAKHVITLHVSALTQTQAVEGEIDLAKLKKFIAYCRVKCGPRLSAEAAEKLKNRYIIMRSGARQHERDSDRRSSIPITVRQLEAIVRIAEALSKMKLQPFATEADVEEALRLFQVSTLDAALSGTLSGVEGFTSQEDQEMLSRIEKQLKRRFAIGSQVSEHSIIKDFTKQKYPEHAIHKVLQLMLRRGEIQHRMQRKVLYRLK

SEQ ID NO: 7019 - protein, 691 aa, Homo sapiens
MSGFDDPGIFYSDSFGGDAQADEGQARKSQLQRRFKEFLRQYRVGTDRTGFTFKYRDELKRHYNLGEYWIEVEMEDLASFDEDLADYLYKQPAEHLQLSDMMSHLVKIPGIIIAASAVRAKATRISIQCRSCRNTLTNIAMRPGLEGYALPRKCNTDQAGRPKCPLDPYFIMPDKCKCVDFQTLKLQELPDAVPHGEMPRHMQLYCDRYLCDKVVPGNRVTIMGIYSIKKFGLTTSRGRDRVGVGIRSSYIRVLGIQVDTDGSGRSFAGAVSPQEEEEFRRLAALPNVYEVISKSIAPSIFGGTDMKKAIACLLFGGSRKRLPDGLTRRGDINLLMLGDPGTAKSQLLKFVEKCSPIGVYTSGKGSSAAGLTASVMRDPSSRNFIMEGGAMVLADGGVVCIDEFDKMREDDRVAIHEAMEQQTISIAKAGITTTLNSRCSVLAAANSVFGRWDETKGEDNIDFMPTILSRFDMIFIVKDEHNEERDVMLAKHVITLHVSALTQTQAVEGEIDLAKLKKFIAYCRVKCGPRLSAEAAEKLKNRYIIMRSGARQHERDSDRRSSIPITVRQLEAIVRIAEALSKMKLQPFATEADVEEALRLFQVSTLDAALSGTLSGVEGFTSQEDQEMLSRIEKQLKRRFAIGSQVSEHSIIKDFTKQKYPEHAIHKVLQLMLRRGEIQHRMQRKVLYRLK

SEQ ID NO: 7020 - protein, 231 aa, Homo sapiens [sequence omitted]

SEQ ID NO: 7021 - protein, 374 aa, Homo sapiens
MNSSGITTWGSTGLRWRWRTRPRPSGEEVLQDIQVMLKSDASPSSIRSLKSDMMSHLVKIPGIIIAASAVRAKATRISIQCRSCRNTLTNIAMRPGLEGYALPRKCNTDQAGRPKCPLDPYFIMPDKCKCVDFQTLKLQELPDAVPHGEMPRHMQLYCDRYLCDKVVPGNRVTIMGIYSIKKFGLTTSRGRDRVGVGIRSSYIRVLGIQVDTDGSGRSFAGAVSPQEEEEFRRLAALPNVYEVISKSIAPSIFGGTDMKKAIACLLFGGSRKRLPDGLTRRGDINLLMLGDPGTAKSQLLKFVEKCSPIGVYTSGKGSSAAGLTASVMRDPSSRNFIMEGGAMVLADGGVVCIDEFDKHREAAQAPLCHWLPGV

SEQ ID NO: 7022 - protein, 595 aa, Homo sapiens
MFYFRGCGRWVAVSFTKQQFPLARLSSDSAAPRTPHFDVIVIGGGHAGTEAATAAARCGSRTLLLTHRVDTIGQMSCNPSFGGIGKGHLMREVDALDGLCSRICDQSGVHYKVLNRRKGPAVWGLRAQIDRKLYKQNMQKEILNTPLLTVQEGAVEDLILTEPEPEHTGKCRVSGVVLPEDQLPCYLTHTNPRVDEIVLKNLHLNSHVKETTRGPRYCPSIESKVLRFPNRLHQVWLEPEGMDSDLIYPQGLSMTLPAELQEKMITCIRGLEKAKVIQPGYGVQYDYLDPRQITPSLETHLVQRLFFAGQINGTTGYEEAAAQGVIAGINASLRVSRKPPFVVSRTEGYIGVLIDDLTTLGTSEPYRMFTSRVEFRLSLRPDNADSRLTLRGYKDAGCVSQQRYERACWMKSSLEEGISVLKSIEFLSSKWKKLIPEASISTSRSLPVRALDVLKYEEVDMDSLAKAVPEPLKKYTKCRELAERLKIEATYESVLFHQLQEIKGVQQDEALQLPKDLDYLTIRDVSLSHEVREKLHFSRPQTIGAASRIPGVTPAAIINLLRFVKTTQRRQSAMNESSKTDQYLCDADRLQEREL

SEQ ID NO: 7023 - protein, 717 aa, Homo sapiens
MFYFRGCGRWVAVSFTKQQFPLARLSSDSAAPRTPHFDVIVIGGGHAGTEAATAAARCGSRTLLLTHRVDTIGQMSCNPSFGGIGKGHLMREVDALDGLCSRICDQSGVHYKVLNRRKGPAVWGLRAQIDRKLYKQNMQKEILNTPLLTVQEGAVEDLILTEPEPEHTGKCRVSGVVLVDGSTVYAESVILTTGTFLRGMIVIGLETHPAGRLGDQPSIGLAQTLEKLGFVVGRLKTGTPPRIAKESINFSILNKHIPDNPSIPFSFTNETVWIKPEDQLPCYLTHTNPRVDEIVLKNLHLNSHVKETTRGPRYCPSIESKVLRFPNRLHQVWLEPEGMDSDLIYPQGLSMTLPAELQEKMITCIRGLEKAKVIQPDGVLLLLPRMECNGAISAHHNLPLPGYGVQYDYLDPRQITPSLETHLVQRLFFAGQINGTTGYEEAAAQGVIAGINASLRVSRKPPFVVSRTEGYIGVLIDDLTTLGTSEPYRMFTSRVEFRLSLRPDNADSRLTLRGYKDAGCVSQQRYERACWMKSSLEEGISVLKSIEFLSSKWKKLIPEASISTSRSLPVRALDVLKYEEVDMDSLAKAVPEPLKKYTKCRELAERLKIEATYESVLFHQLQEIKGVQQDEALQLPKDLDYLTIRDVSLSHEVREKLHFSRPQTIGAASRIPGVTPAAIINLLRFVKTTQRRQSAMNESSKTDQYLCDADRLQEREL

SEQ ID NO: 7024 - protein, 643 aa, Homo sapiens
MSCNPSFGGIGKGHLMREVDALDGLCSRICDQSGVHYKVLNRRKGPAVWGLRAQIDRKLYKQNMQKEILNTPLLTVQEGAVEDLILTEPEPEHTGKCRVSGVVLVDGSTVYAESVILTTGTFLRGMIVIGLETHPAGRLGDQPSIGLAQTLEKLGFVVGRLKTGTPPRIAKESINFSILNKHIPDNPSIPFSFTNETVWIKPEDQLPCYLTHTNPRVDEIVLKNLHLNSHVKETTRGPRYCPSIESKVLRFPNRLHQVWLEPEGMDSDLIYPQGLSMTLPAELQEKMITCIRGLEKAKVIQPDGVLLLLPRMECNGAISAHHNLPLPGYGVQYDYLDPRQITPSLETHLVQRLFFAGQINGTTGYEEAAAQGVIAGINASLRVSRKPPFVVSRTEGYIGVLIDDLTTLGTSEPYRMFTSRVEFRLSLRPDNADSRLTLRGYKDAGCVSQQRYERACWMKSSLEEGISVLKSIEFLSSKWKKLIPEASISTSRSLPVRALDVLKYEEVDMDSLAKAVPEPLKKYTKCRELAERLKIEATYESVLFHQLQEIKGVQQDEALQLPKDLDYLTIRDVSLSHEVREKLHFSRPQTIGAASRIPGVTPAAIINLLRFVKTTQRRQSAMNESSKTDQYLCDADRLQEREL

SEQ ID NO: 7025 - protein, 732 aa, Homo sapiens
MFYFRGCGRWVAVSFTKQQFPLARLSSDSAAPRTPHFDVIVIGGGHAGTEAATAAARCGSRTLLLTHRVDTIGQMSCNPSFGGIGKGHLMREVDALDGLCSRICDQSGVHYKVLNRRKGPAVWGLRAQIDRKLYKQNMQKEILNTPLLTVQEGAVEDLILTEPEPEHTGKCRVSGVVLVDGSTVYAESVILTTGTFLRGMIVIGLETHPAGRLGDQPSIGLAQTLEKLGFVVGRLKTGTPPRIAKESINFSILNKHIPDNPSIPFSFTNETVWIKPEDQLPCYLTHTNPRVDEIVLKNLHLNSHVKETTRGPRYCPSIESKVLRFPNRLHQVWLEPEGMDSDLIYPQGLSMTLPAELQEKMITCIRGLEKAKVIQPGYGVQYDYLDPRQITPSLETHLVQRLFFAGQINGTTGYEEAAAQTECCSVARLECSDMISQLQAILLPQPSLVAGTAGMHHNTQGVIAGINASLRVSRKPPFVVSRTEGYIGVLIDDLTTLGTSEPYRMFTSRVEFRLSLRPDNADSRLTLRGYKDAGCVSQQRYERACWMKSSLEEGISVLKSIEFLSSKWKKLIPEASISTSRSLPVRALDVLKYEEVDMDSLAKAVPEPLKKYTKCRELAERLKIEATYESVLFHQLQEIKGVQQDEALQLPKDLDYLTIRDVSLSHEVREKLHFSRPQTIGAASRIPGVTPAAIINLLRFVKTTQRRQSAMNESSKTDQYLCDADRLQEREL

SEQ ID NO: 7026 - protein, 692 aa, Homo sapiens
MFYFRGCGRWVAVSFTKQQFPLARLSSDSAAPRTPHFDVIVIGGGHAGTEAATAAARCGSRTLLLTHRVDTIGQMSCNPSFGGIGKGHLMREVDALDGLCSRICDQSGVHYKVLNRRKGPAVWGLRAQIDRKLYKQNMQKEILNTPLLTVQEGAVEDLILTEPEPEHTGKCRVSGVVLVDGSTVYAESVILTTGTFLRGMIVIGLETHPAGRLGDQPSIGLAQTLEKLGFVVGRLKTGTPPRIAKESINFSILNKHIPDNPSIPFSFTNETVWIKPEDQLPCYLTHTNPRVDEIVLKNLHLNSHVKETTRGPRYCPSIESKVLRFPNRLHQVWLEPEGMDSDLIYPQGLSMTLPAELQEKMITCIRGLEKAKVIQPGYGVQYDYLDPRQITPSLETHLVQRLFFAGQINGTTGYEEAAAQGVIAGINASLRVSRKPPFVVSRTEGYIGVLIDDLTTLGTSEPYRMFTSRVEFRLSLRPDNADSRLTLRGYKDAGCVSQQRYERACWMKSSLEEGISVLKSIEFLSSKWKKLIPEASISTSRSLPVRALDVLKYEEVDMDSLAKAVPEPLKKYTKCRELAERLKIEATYESVLFHQLQEIKGVQQDEALQLPKDLDYLTIRDVSLSHEVREKLHFSRPQTIGAASRIPGVTPAAIINLLRFVKTTQRRQSAMNESSKTDQYLCDADRLQEREL

SEQ ID NO: 7027 - protein, 360 aa, Homo sapiens [sequence omitted]

SEQ ID NO: 7028 - protein, 360 aa, Homo sapiens [sequence omitted]

SEQ ID NO: 7029 - protein, 348 aa, Homo sapiens
MVRGQVFDVGPRYTNLSYIGEGAYGMVCSAYDNVNKVRVAIKKISPFEHQTYCQRTLREIKILLRFRHENIIGINDIIRAPTIEQMKDVYIVQDLMETDLYKLLKTQHLSNDHICYFLYQILRGLKYIHSANVLHRDLKPSNLLLNTTCDLKICDFGLARVADPDHDHTGFLTEYVATRWYRAPEIMLNSKGYTKSIDIWSVGCILAEMLSNRPIFPGKHYLDQLNHILGILGSPSQEDLNCIINLKARNYLLSLPHKNKVPWNRLFPNADSKALDLLDKMLTFNPHKRIEVEQALAHPYLEQYYDPSDEPIAEAPFKFDMELDDLPKEKLKELIFEETARFQPGYRS

SEQ ID NO: 7030 - protein, 316 aa, Homo sapiens
MAAAAAAGAGPEMVRGQVFDVGPRYTNLSYIGEGAYGMVCSAYDNVNKVRVAIKKISPFEHQTYCQRTLREIKILLRFRHENIIGINDIIRAPTIEQMKDVYIVQDLMETDLYKLLKTQHLSNDHICYFLYQILRGLKYIHSANVLHRDLKPSNLLLNTTCDLKICDFGLARVADPDHDHTGFLTEYVATRWYRAPEIMLNSKGYTKSIDIWSVGCILAEMLSNRPIFPGKHYLDQLNHILALDLLDKMLTFNPHKRIEVEQALAHPYLEQYYDPSDEPIAEAPFKFDMELDDLPKEKLKELIFEETARFQPGYRS

SEQ ID NO: 7031 - protein, 364 aa, Homo sapiens
MSGPRAGFYRQELNKTVWEVPQRLQGLRPVGSGAYGSVCSAYDARLRQKVAVKKLSRPFQSLIHARRTYRELRLLKHLKHENVIGLLDVFTPATSIEDFSEVYLVTTLMGADLNNIVKCQALSDEHVQFLVYQLLRGLKYIHSAGIIHRDLKPSNVAVNEDCELRILDFGLARQADEEMTGYVATRWYRAPEIMLNWMHYNQTVDIWSVGCIMAELLQGKALFPGSDYIDQLKRIMEVVGTPSPEVLAKISSEHARTYIQSLPPMPQKDLSSIFRGANPLAIDLLGRMLVLDSDQRVSAAEALAHAYFSQYHDPEDEPEAEPYDESVEAKERTLEEWKELTYQEVLSFKPPEPPKPPGSLEIEQ

SEQ ID NO: 7032 - protein, 364 aa, Homo sapiens; identical to SEQ ID NO: 7031

SEQ ID NO: 7033 - protein, 213 aa, Homo sapiens
MGADLNNIVKCQALSDEHVQFLVYQLLRGLKYIHSAGIIHRDLKPSNVAVNEDCELRILDFGLARQADEEMTGYVATRWYRAPEIMLNWMHYNQTGAGGRPWGDEGQGPRLALDWLCMPGLRGQARSPRMWDPHSKVALQRPLEHDGCWPPLAVQLWTSPCLGGLGMAEEGVCPSWGLDVTVGLLEEGRGVGTLMEVPSPSHSGYLVRGLHHG

SEQ ID NO: 7034 - protein, 367 aa, Homo sapiens
MSSPPPARSGFYRQEVTKTAWEVRAVYRDLQPVGSGAYGAVCSAVDGRTGAKVAIKKLYRPFQSELFAKRAYRELRLLKHMRHENVIGLLDVFTPDETLDDFTDFYLVMPFMGTDLGKLMKHEKLGEDRIQFLVYQMLKGLRYIHAAGIIHRDLKPGNLAVNEDCELKILDFGLARQADSEMTGYVVTRWYRAPEVILNWMRYTQTVDIWSVGCIMAEMITGKTLFKGSDHLDQLKEIMKVTGTPPAEFVQRLQSDEAKNYMKGLPELEKKDFASILTNASPLAVNLLEKMLVLDAEQRVTAGEALAHPYFESLHDTEDEPQVQKYDDSFDDVDRTLDEWKRVTYKEVLSFKPPRQLGARVSKETPL

SEQ ID NO: 7035 - protein, 357 aa, Homo sapiens
MSSPPPARSGFYRQEVTKTAWEVRAVYRDLQPVGSGAYGAVCSAVDGRTGAKVAIKKLYRPFQSELFAKRAYRELRLLKHMRHENVIGLLDVFTPDETLDDFTDFYLVMPFMGTDLGKLMKHEKLGEDRIQFLVYQMLKGLRDLKPGNLAVNEDCELKILDFGLARQADSEMTGYVVTRWYRAPEVILNWMRYTQTVDIWSVGCIMAEMITGKTLFKGSDHLDQLKEIMKVTGTPPAEFVQRLQSDEAKNYMKGLPELEKKDFASILTNASPLAVNLLEKMLVLDAEQRVTAGEALAHPYFESLHDTEDEPQVQKYDDSFDDVDRTLDEWKRVTYKEVLSFKPPRQLGARVSKETPL

SEQ ID NO: 7036 - protein, 365 aa, Homo sapiens
MSLIRKKGFYKQDVNKTAWELPKTYVSPTHVGSGAYGSVCSAIDKRSGEKVAIKKLSRPFQSEIFAKRAYRELLLLKHMQHENVIGLLDVFTPASSLRNFYDFYLVMPFMQTDLQKIMGMEFSEEKIQYLVYQMLKGLKYIHSAGVVHRDLKPGNLAVNEDCELKILDFGLARHADAEMTGYVVTRWYRAPEVILSWMHYNQTVDIWSVGCIMAEMLTGKTLFKGKDYLDQLTQILKVTGVPGTEFVQKLNDKAAKSYIQSLPQTPRKDFTQLFPRASPQAADLLEKMLELDVDKRLTAAQALTHPFFEPFRDPEEETEAQQPFDDSLEHEKLTVDEWKQHIYKEIVNFSPIARKDSRRRSGMKL

SEQ ID NO: 7037 - protein, 152 aa, Homo sapiens
MQHENVIGLLDVFTPASSLRNFYDFYLVMPFMQTDLQKIMGMEFSEEKIQYLVYQMLKGLKYIHSAGVVHRDLKPGNLAVNEDCELKILDFGLARHADAEMTGYVVTRWYRAPEVILSWMHYNQTGQILHPVPATDPQEGFHSAVPTGQPPG

SEQ ID NO: 7038 - protein, 355 aa, Homo sapiens
MSLIRKKGFYKQDVNKTAWELPKTYVSPTHVGSGAYGSVCSAIDKRSGEKVAIKKLSRPFQSEIFAKRAYRELLLLKHMQHENVIGLLDVFTPASSLRNFYDFYLVMPFMQTDLQKIMGMEFSEEKIQYLVYQMLKGLKDLKPGNLAVNEDCELKILDFGLARHADAEMTGYVVTRWYRAPEVILSWMHYNQTVDIWSVGCIMAEMLTGKTLFKGKDYLDQLTQILKVTGVPGTEFVQKLNDKAAKSYIQSLPQTPRKDFTQLFPRASPQAADLLEKMLELDVDKRLTAAQALTHPFFEPFRDPEEETEAQQPFDDSLEHEKLTVDEWKQHIYKEIVNFSPIARKDSRRRSGMKL

SEQ ID NO: 7039 - protein, 257 aa, Homo sapiens
MSLIRKKGFYKQDVNKTAWELPKTYVSPTHVGSGAYGSVCSAIDKRSGEKVAIKKLSRPFQSEIFAKRAYRELLLLKHMQHENVIGLLDVFTPASSLRNFYDFYLVMPFMQTDLQKIMGMEFSEEKIQYLVYQMLKGLKYIHSAGVVHRDLKPGNLAVNEDCELKILDFGLARHADAEMTGYVVTRWYRAPEVILSWMHYNQTGQILHPVPATDPQEGFHSAVPTGQPPGCGPAGEDAGARRGQAPDGRAGPHPSLL

SEQ ID NO: 7040 - protein, 310 aa, Homo sapiens
MSLIRKKGFYKQDVNKTAWELPKTYVSPTHVGSGAYGSVCSAIDKRSGEKVAIKKLSRPFQSEIFAKRAYRELLLLKHMQHENVIGLLDVFTPASSLRNFYDFYLVMPFMQTDLQKIMGMEFSEEKIQYLVYQMLKGLKYIHSAGVVHRDLKPGNLAVNEDCELKILDFGLARHADAEMTGYVVTRWYRAPEVILSWMHYNQTVDIWSVGCIMAEMLTGKTLFKGKDYLLEKMLELDVDKRLTAAQALTHPFFEPFRDPEEETEAQQPFDDSLEHEKLTVDEWKQHIYKEIVNFSPIARKDSRRRSGMKL

SEQ ID NO: 7041 - protein, 360 aa, Homo sapiens
MSQERPTFYRQELNKTIWEVPERYQNLSPVGSGAYGSVCAAFDTKTGLRVAVKKLSRPFQSIIHAKRTYRELRLLKHMKHENVIGLLDVFTPARSLEEFNDVYLVTHLMGADLNNIVKCQKLTDDHVQFLIYQILRGLKYIHSADIIHRDLKPSNLAVNEDCELKILDFGLARHTDDEMTGYVATRWYRAPEIMLNWMHYNQTVDIWSVGCIMAELLTGRTLFPGTDHIDQLKLILRLVGTPGAELLKKISSESARNYIQSLTQMPKMNFANVFIGANPLAVDLLEKMLVLDSDKRITAAQALAHAYFAQYHDPDDEPVADPYDQSFESRDLLIDEWKSLTYDEVISFVPPPLDQEEMES

SEQ ID NO: 7042 - protein, 360 aa, Homo sapiens
MSQERPTFYRQELNKTIWEVPERYQNLSPVGSGAYGSVCAAFDTKTGLRVAVKKLSRPFQSIIHAKRTYRELRLLKHMKHENVIGLLDVFTPARSLEEFNDVYLVTHLMGADLNNIVKCQKLTDDHVQFLIYQILRGLKYIHSADIIHRDLKPSNLAVNEDCELKILDFGLARHTDDEMTGYVATRWYRAPEIMLNWMHYNQTVDIWSVGCIMAELLTGRTLFPGTDHINQLQQIMRLTGTPPAYLINRMPSHEARNYIQSLTQMPKMNFANVFIGANPLAVDLLEKMLVLDSDKRITAAQALAHAYFAQYHDPDDEPVADPYDQSFESRDLLIDEWKSLTYDEVISFVPPPLDQEEMES

SEQ ID NO: 7043 - protein, 307 aa, Homo sapiens
MSQERPTFYRQELNKTIWEVPERYQNLSPVGSGAYGSVCAAFDTKTGLRVAVKKLSRPFQSIIHAKRTYRELRLLKHMKHENVIGLLDVFTPARSLEEFNDVYLVTHLMGADLNNIVKCQKLTDDHVQFLIYQILRGLKYIHSADIIHRDLKPSNLAVNEDCELKILDFGLARHTDDEMTGYVATRWYRAPEIMLNWMHYNQTVDIWSVGCIMAELLTGRTLFPGTDHIDQLKLILRLVGTPGAELLKKISSESLSTCWRRCLYWTQIRELQRPKPLHMPTLLSTTILMMNQWPILMISPLKAGTSL

SEQ ID NO: 7044 - protein, 283 aa, Homo sapiens
MKHENVIGLLDVFTPARSLEEFNDVYLVTHLMGADLNNIVKCQKLTDDHVQFLIYQILRGLKYIHSADIIHRDLKPSNLAVNEDCELKILDFGLARHTDDEMTGYVATRWYRAPEIMLNWMHYNQTVDIWSVGCIMAELLTGRTLFPGTDHIDQLKLILRLVGTPGAELLKKISSESARNYIQSLTQMPKMNFANVFIGANPLAVDLLEKMLVLDSDKRITAAQALAHAYFAQYHDPDDEPVADPYDQSFESRDLLIDEWKSLTYDEVISFVPPPLDQEEMES

SEQ ID NO: 7045 - protein, 379 aa, Homo sapiens
MAAAAAQGGGGGEPRRTEGVGPGVPGEVEMVKGQPFDVGPRYTQLQYIGEGAYGMVSSAYDHVRKTRVAIKKISPFEHQTYCQRTLREIQILLRFRHENVIGIRDILRASTLEAMRDVYIVQDLMETDLYKLLKSQQLSNDHICYFLYQILRGLKYIHSANVLHRDLKPSNLLINTTCDLKICDFGLARIADPEHDHTGFLTEYVATRWYRAPEIMLNSKGYTKSIDIWSVGCILAEMLSNRPIFPGKHYLDQLNHILGILGSPSQEDLNCIINMKARNYLQSLPSKTKVAWAKLFPKSDSKALDLLDRMLTFNPNKRITVEEALAHPYLEQYYDPTDEPVAEEPFTFAMELDDLPKERLKELIFQETARFQPGVLEAP

SEQ ID NO: 7046 - protein, 335 aa, Homo sapiens
MAAAAAQGGGGGEPRRTEGVGPGVPGEVEMVKGQPFDVGPRYTQLQYIGEGAYGMVSSAYDHVRKTRVAIKKISPFEHQTYCQRTLREIQILLRFRHENVIGIRDILRASTLEAMRDVYIVQDLMETDLYKLLKSQQLSNDHICYFLYQILRGLKYIHSANVLHRDLKPSNLLINTTCDLKICDFGLARIADPEHDHTGFLTEYVATRWYRAPEIMLNSKGYTKSIDIWSVGCILAEMLSNRPIFPGKHYLDQLNHILALDLLDRMLTFNPNKRITVEEALAHPYLEQYYDPTDEPVAEEPFTFAMELDDLPKERLKELIFQETARFQPGVLEAP

SEQ ID NO: 7047 - protein, 311 aa, Homo sapiens
MVKGQPFDVGPRYTQLQYIGEGAYGMVSSAYDHVRKTRVAIKKISPFEHQTYCQRTLREIQILLRFRHENVIGIRDILRASTLEAMRDVYIVQDLMETDLYKLLKSQQLSNDHICYFLYQILRGLKYIHSANVLHRDLKPSNLLINTTCDLKGYTKSIDIWSVGCILAEMLSNRPIFPGKHYLDQLNHILGILGSPSQEDLNCIINMKARNYLQSLPSKTKVAWAKLFPKSDSKALDLLDRMLTFNPNKRITVEEALAHPYLEQYYDPTDEPVAEEPFTFAMELDDLPKERLKELIFQETARFQPGVLEAP

SEQ ID NO: 7048 - protein, 335 aa, Homo sapiens; identical to SEQ ID NO: 7046

SEQ ID NO: 7049 - protein, 357 aa, Homo sapiens
MAAAAAQGGGGGEPRRTEGVGPGVPGEVEMVKGQPFDVGPRYTQLQYIGEGAYGMVSSAYDHVRKTRVAIKKISPFEHQTYCQRTLREIQILLRFRHENVIGIRDILRASTLEAMRDVYIVQDLMETDLYKLLKSQQLSNDHICYFLYQILRGLKYIHSANVLHRDLKPSNLLINTTCDLKICDFGLARIADPEHDHTGFLTEYVATRWYRAPEIMLNSKGYTKSIDIWSVGCILAEMLSNRPIFPGKHYLDQLNHILGILGSPSQEDLNCIINMKARNYLQSLPSKTKVAWAKLFPKSDSKALDLLDRMLTFNPNKRITVEEALAHPYLEQYYDPTDEVGQSPAAVGLGAGEQGGT

SEQ ID NO: 7050 - protein, 265 aa, Homo sapiens
MRDVYIVQDLMETDLYKLLKSQQLSNDHICYFLYQILRGLKYIHSANVLHRDLKPSNLLINTTCDLKICDFGLARIADPEHDHTGFLTEYVATRWYRAPEIMLNSKGYTKSIDIWSVGCILAEMLSNRPIFPGKHYLDQLNHILGILGSPSQEDLNCIINMKARNYLQSLPSKTKVAWAKLFPKSDSKALDLLDRMLTFNPNKRITVEEALAHPYLEQYYDPTDEPVAEEPFTFAMELDDLPKERLKELIFQETARFQPGVLEAP

SEQ ID NO: 7051 - protein, 427 aa, Homo sapiens
MSRSKRDNNFYSVEIGDSTFTVLKRYQNLKPIGSGAQGIVCAAYDAILERNVAIKKLSRPFQNQTHAKRAYRELVLMKCVNHKNIIGLLNVFTPQKSLEEFQDVYIVMELMDANLCQVIQMELDHERMSYLLYQMLCGIKHLHSAGIIHRDLKPSNIVVKSDCTLKILDFGLARTAGTSFMMTPYVVTRYYRAPEVILGMGYKENVDLWSVGCIMGEMVCHKILFPGRDYIDQWNKVIEQLGTPCPEFMKKLQPTVRTYVENRPKYAGYSFEKLFPDVLFPADSEHNKLKASQARDLLSKMLVIDASKRISVDEALQHPYINVWYDPSEAEAPPPKIPDKQLDEREHTIEEWKELIYKEVMDLEERTKNGVIRGQPSPLGAAVINGSQHPSSSSSVNDVSSMSTDPTLASDTDSSLEAAAGPLGCCR

SEQ ID NO: 7052 - protein, 218 aa, Homo sapiens [sequence omitted]

SEQ ID NO: 7053 - protein, 427 aa, Homo sapiens
MSRSKRDNNFYSVEIGDSTFTVLKRYQNLKPIGSGAQGIVCAAYDAILERNVAIKKLSRPFQNQTHAKRAYRELVLMKCVNHKNIIGLLNVFTPQKSLEEFQDVYIVMELMDANLCQVIQMELDHERMSYLLYQMLCGIKHLHSAGIIHRDLKPSNIVVKSDCTLKILDFGLARTAGTSFMMTPYVVTRYYRAPEVILGMGYKENVDIWSVGCIMGEMIKGGVLFPGTDHIDQWNKVIEQLGTPCPEFMKKLQPTVRTYVENRPKYAGYSFEKLFPDVLFPADSEHNKLKASQARDLLSKMLVIDASKRISVDEALQHPYINVWYDPSEAEAPPPKIPDKQLDEREHTIEEWKELIYKEVMDLEERTKNGVIRGQPSPLGAAVINGSQHPSSSSSVNDVSSMSTDPTLASDTDSSLEAAAGPLGCCR

SEQ ID NO: 7054 - protein, 384 aa, Homo sapiens
MSRSKRDNNFYSVEIGDSTFTVLKRYQNLKPIGSGAQGIVCAAYDAILERNVAIKKLSRPFQNQTHAKRAYRELVLMKCVNHKNIIGLLNVFTPQKSLEEFQDVYIVMELMDANLCQVIQMELDHERMSYLLYQMLCGIKHLHSAGIIHRDLKPSNIVVKSDCTLKILDFGLARTAGTSFMMTPYVVTRYYRAPEVILGMGYKENVDIWSVGCIMGEMIKGGVLFPGTDHIDQWNKVIEQLGTPCPEFMKKLQPTVRTYVENRPKYAGYSFEKLFPDVLFPADSEHNKLKASQARDLLSKMLVIDASKRISVDEALQHPYINVWYDPSEAEAPPPKIPDKQLDEREHTIEEWKELIYKEVMDLEERTKNGVIRGQPSPLAQVQQ

SEQ ID NO: 7055 - protein, 384 aa, Homo sapiens
MSRSKRDNNFYSVEIGDSTFTVLKRYQNLKPIGSGAQGIVCAAYDAILERNVAIKKLSRPFQNQTHAKRAYRELVLMKCVNHKNIIGLLNVFTPQKSLEEFQDVYIVMELMDANLCQVIQMELDHERMSYLLYQMLCGIKHLHSAGIIHRDLKPSNIVVKSDCTLKILDFGLARTAGTSFMMTPYVVTRYYRAPEVILGMGYKENVDLWSVGCIMGEMVCHKILFPGRDYIDQWNKVIEQLGTPCPEFMKKLQPTVRTYVENRPKYAGYSFEKLFPDVLFPADSEHNKLKASQARDLLSKMLVIDASKRISVDEALQHPYINVWYDPSEAEAPPPKIPDKQLDEREHTIEEWKELIYKEVMDLEERTKNGVIRGQPSPLAQVQQ

SEQ ID NO: 7056 - protein, 427 aa, Homo sapiens; identical to SEQ ID NO: 7051

SEQ ID NO: 7057 - protein, 308 aa, Homo sapiens
MSRSKRDNNFYSVEIGDSTFTVLKRYQNLKPIGSGAQGIVCAAYDAILERNVAIKKLSRPFQNQTHAKRAYRELVLMKCVNHKNIIGLLNVFTPQKSLEEFQDVYIVMELMDANLCQVIQMELDHERMSYLLYQMLCGIKHLHSAGIIHRDLKPSNIVVKSDCTLKILDFGLARTAGTSFMMTPYVVTRYYRAPEVILGMGYKENADSEHNKLKASQARDLLSKMLVIDASKRISVDEALQHPYINVWYDPSEAEAPPPKIPDKQLDEREHTIEEWKELIYKEVMDLEERTKNGVIRGQPSPLAQVQQ

SEQ ID NO: 7058 - protein, 142 aa, Homo sapiens
MSRSKRDNNFYSVEIGDSTFTVLKRYQNLKPIGSGAQGIVCAAYDAILERNVAIKKLSRPFQNQTHAKRAYRELVLMKCVNHKNIIGLLNVFTPQKSLEEFQDVYIVMELMDANLCQVIQMELDHERMSYLLYQMLCGIKHL

SEQ ID NO: 7059 - protein, 97 aa, Homo sapiens
MIIGLLNVFTPQKSLEEFQDVYIVMELMDANLCQVIQMELDHERMSYLLYQMLCGIKHLHSAGIIHRDLKPSNIVVKSDCTLKILDFGLARTAGTSF

SEQ ID NO: 7060 - protein, 142 aa, Homo sapiens; identical to SEQ ID NO: 7058

SEQ ID NO: 7061 - protein, 393 aa, Homo sapiens [sequence omitted]

SEQ ID NO: 7062 - protein, 400 aa, Homo sapiens [sequence omitted]

SEQ ID NO: 7063 - protein, 351 aa, Homo sapiens
MGVQGTLMSRDQTPHLLSILGKSKRKKDLRISCMSKPPAPNPTPPRNLDSRTFITIGDRNFEVEADDLVTISELGRGAYGVVEKVRHAQSGTIMAVKRIRATVNSQEQKRLLMDLDINMRTVDCFYTVTFYGALFREGDVWICMELMDTSLDKFYRKVLDKNMTIPEDILGEIAVSIVRALEHLHSKLSVIHRDVKPSNVLINKEGHVKMCDFGISGYLVDSVAKTMDAGCKPYMAPERINPELNQKGYNVKSDVWSLGITMIEMAILRFPYESWGTPFQQLKQVVEEPSPQLPADRFSPEFVDFTAQCLRKNPAERMSYLELMEHPFFTLHKTKKTDIAAFVKEILGEDS

SEQ ID NO: 7064 - protein, 347 aa, Homo sapiens
MESPASSQPASMPQSKGKSKRKKDLRISCMSKPPAPNPTPPRNLDSRTFITIGDRNFEVEADDLVTISELGRGAYGVVEKVRHAQSGTIMAVKRIRATVNSQEQKRLLMDLDINMRTVDCFYTVTFYGALFREGDVWICMELMDTSLDKFYRKVLDKNMTIPEDILGEIAVSIVRALEHLHSKLSVIHRDVKPSNVLINKEGHVKMCDFGISGYLVDSVAKTMDAGCKPYMAPERINPELNQKGYNVKSDVWSLGITMIEMAILRFPYESWGTPFQQLKQVVEEPSPQLPADRFSPEFVDFTAQCLRKNPAERMSYLELMEHPFFTLHKTKKTDIAAFVKEILGEDS

SEQ ID NO: 7065 - protein, 318 aa, Homo sapiens
MSKPPAPNPTPPRNLDSRTFITIGDRNFEVEADDLVTISELGRGAYGVVEKVRHAQSGTIMAVKRIRATVNSQEQKRLLMDLDINMRTVDCFYTVTFYGALFREGDVWICMELMDTSLDKFYRKVLDKNMTIPEDILGEIAVSIVRALEHLHSKLSVIHRDVKPSNVLINKEGHVKMCDFGISGYLVDSVAKTMDAGCKPYMAPERINPELNQKGYNVKSDVWSLGITMIEMAILRFPYESWGTPFQQLKQVVEEPSPQLPADRFSPEFVDFTAQCLRKNPAERMSYLELMEHPFFTLHKTKKTDIAAFVKEILGEDS

SEQ ID NO: 7066 - protein, 370 aa, Homo sapiens
MLSNSQGQSPPVPFPAPAPPPQPPTPALPHPPAQPPPPPPQQFPQFHVKSGLQIKKNAIIDDYKVTSQVLGLGINGKVLQIFNKRTQEKFALKMLQDCPKARREVELHWRASQCPHIVRIVDVYENLYAGRKCLLIVMECLDGGELFSRIQDRGDQAFTEREASEIMKSIGEAIQYLHSINIAHRDVKPENLLYTSKRPNAILKLTDFGFAKETTSHNSLTTPCYTPYYVAPEVLGPEKYDKSCDMWSLGVIMYILLCGYPPFYSNHGLAISPGMKTRIRMGQYEFPNPEWSEVSEEVKMLIRNLLKTEPTQRMTITEFMNHPWIMQSTKVPQTPLHTSRVLKEDKERWEDVKGCLHDKNSDQATWLTRL

SEQ ID NO: 7067 - protein, 400 aa, Homo sapiens
MLSNSQGQSPPVPFPAPAPPPQPPTPALPHPPAQPPPPPPQQFPQFHVKSGLQIKKNAIIDDYKVTSQVLGLGINGKVLQIFNKRTQEKFALKMLQDCPKARREVELHWRASQCPHIVRIVDVYENLYAGRKCLLIVMECLDGGELFSRIQDRGDQAFTEREASEIMKSIGEAIQYLHSINIAHRDVKPENLLYTSKRPNAILKLTDFGFAKETTSHNSLTTPCYTPYYVAPEVLGPEKYDKSCDMWSLGVIMYILLCGYPPFYSNHGLAISPGMKTRIRMGQYEFPNPEWSEVSEEVKMLIRNLLKTEPTQRMTITEFMNHPWIMQSTKVPQTPLHTSRVLKEDKERWEDVKEEMTSALATMRVDYEQIKIKKIEDASNPLLLKRRKKARALEAAALAH

SEQ ID NO: 7068 - protein, 382 aa, Homo sapiens
MDGETAEEQGGPVPPPVAPGGPGLGGAPGGRREPKKYAVTDDYQLSKQVLGLGVNGKVLECFHRRTGQKCALKLLYDSPKARQEVDHHWQASGGPHIVCILDVYENMHHGKRCLLIIMECMEGGELFSRIQERGDQAFTEREAAEIMRDIGTAIQFLHSHNIAHRDVKPENLLYTSKEKDAVLKLTDFGFAKETTQNALQTPCYTPYYVAPEVLGPEKYDKSCDMWSLGVIMYILLCGFPPFYSNTGQAISPGMKRRIRLGQYGFPNPEWSEVSEDAKQLIRLLLKTDPTERLTITQFMNHPWINQSMVVPQTPLHTARVLQEDKDHWDEVKEEMTSALATMRVDYDQVKIKDLKTSNNRLLNKRRKKQAGSSSASQGCNNQ

SEQ ID NO: 7069 - protein, 332 aa, Homo sapiens
MDGETAEEQGGPVPPPVAPGGPGLGGAPGGRREPKKYAVTDDYQLSKQVLGLGVNGKVLECFHRRTGQKCALKLLYDSPKARQEVDHHWQASGGPHIVCILDVYENMHHGKRCLLIIMECMEGGELFSRIQERGDQAFTEREAAEIMRDIGTAIQFLHSHNIAHRDVKPENLLYTSKEKDAVLKLTDFGFAKETTQNALQTPCYTPYYVAPEVLGPEKYDKSCDMWSLGVIMYILLCGFPPFYSNTGQAISPGMKRRIRLGQYGFPNPEWSEVSEDAKQLIRLLLKTDPTERLTITQFMNHPWINQSMVVPQTPLHTARVLQEDKDHWDEVK

SEQ ID NO: 7070 - protein, 382 aa, Homo sapiens; identical to SEQ ID NO: 7068

SEQ ID NO: 7071 - protein, 119 aa, Homo sapiens
MDGETAEEQGGPVPPPVAPGGPGLGGAPGGRREPKKYAVTDDYQLSKQVLGLGVNGKVLECFHRRTGQKCALKLLYDSPKARQEVDHHWQASGGPHIVCILDVYENMHHGKRCLLIIME

SEQ ID NO: 7072 - protein, 473 aa, Homo sapiens
MSEESDMDKAIKETSILEEYSINWTQKLGAGISGPVRVCVKKSTQERFALKILLDRPKARNEVRLHMMCATHPNIVQIIEVFANSVQFPHESSPRARLLIVMEMMEGGELFHRISQHRHFTEKQASQVTKQIALALRHCHLLNIAHRDLKPENLLFKDNSLDAPVKLCDFGFAKIDQGDLMTPQFTPYYVAPQVLEAQRRHQKEKSGIIPTSPTPYTYNKSCDLWSLGVIIYVMLCGYPPFYSKHHSRTIPKDMRRKIMTGSFEFPEEEWSQISEMAKDVVRKLLKVKPEERLTIEGVLDHPWLNSTEALDNVLPSAQLMMDKAVVAGIQQAHAEQLANMRIQDLKVSLKPLHSVNNPILRKRKLLGTKPKDSVYIHDHENGAEDSNVALEKLRDVIAQCILPQAGKGENEDEKLNEVMQEAWKYNRECKLLRDTLQSFSWNGRGFTDKVDRLKLAEIVKQVIEEQTTSHESQ

SEQ ID NO: 7073 - protein, 471 aa, Homo sapiens
MSEESDMDKAIKETSILEEYSINWTQKLGAGISGPVRVCVKKSTQERFALKILLDRPKARNEVRLHMMCATHPNIVQIIEVFANSVQFPHESSPRARLLIVMEMMEGGELFHRISQHRHFTEKQASQVTKQIALALRHCHLLNIAHRDLKPENLLFKDNSLDAPVKLCDFGFAKIDQGDLMTPQFTPYYVAPQVLEAQRRHQKEKSGIIPTSPTPYTYNKSCDLWSLGVIIYVMLCGYPPFYSKHHSRTIPKDMRRKIMTGSFEFPEEEWSQISEMAKDVVRKLLKVKPEERLTIEGVLDHPWLNSTEALDNVLPSAQLMMDKAVVAGIQQAHAEQLANMRIQDLKVSLKPLHSVNNPILRKRKLLGTKPKDSVYIHDHENGAEDSNVALEKLRDVIAQCILPQAGENEDEKLNEVMQEAWKYNRECKLLRDTLQSFSWNGRGFTDKVDRLKLAEIVKQVIEEQTTSHESQ

SEQ ID NO: 7074 - protein, 471 aa, Homo sapiens [sequence omitted]

SEQ ID NO: 7075 - protein, 473 aa, Homo sapiens
MSEESDMDKAIKETSILEEYSINWTQKLGAGISGPVRVCVKKSTQERFALKILLDRPKARNEVRLHMMCATHPNIVQIIEVFANSVQFPHESSPRARLLIVMEMMEGGELFHRISQHRHFTEKQASQVTKQATLALRHCHLLNIAHRDLKPENLLFKDNSLDAPVKLCDFGFAKIDQGDLMTPQFTPYYVAPQVLEAQRRHQKEKSGIIPTSPTPYTYNKSCDLWSLGVIIYVMLCGYPPFYSKHHSRTIPKDMRRKIMTGSFEFPEEEWSQISEMAKDVVRKLLKVKPEERLTIEGVLDHPWLNSTEALDNVLPSAQLMMDKAVVAGIQQAHAEQLANMRIQDLKVSLKPLHSVNNPILRKRKLLGTKPKDSVYIHDHENGAEDSNVALEKLRDVIAQCILPQAGKGENEDEKLNEVMQEAWKYNRECKLLRDTLQSFSWNGRGFTDKVDRLKLAEIVKQVIEEQTTSHESQ

SEQ ID NO: 7076 - protein, 932 aa, Homo sapiens
MAAAAAVEAAAPMGALWGLVHDFVVGQQEGPADQVAADVKSGNYTVLQVVEALGSSLENPEPRTRARAIQLLSQVLLHCHTLLLEKEVVHLILFYENRLKDHHLVIPSVLQGLKALSLCVALPPGLAVSVLKAIFQEVHVQSLPQVDRHTVYNIITNFMRTREEELKSLGADFTFGFIQVMDGEKDPRNLLVAFRIVHDLISRDYSLGPFVEELFEVTSCYFPIDFTPPPNDPHGIQREDLILSLRAVLASTPRFAEFLLPLLIEKVDSEVLSAKLDSLQTLNACCAVYGQKELKDFLPSLWASIRRESSQRRTILEMLLGFLKLQQKWSYEDKDQRPLNGFKDQLCSLVFMALTDPSTQLQLVGIRTLTVLGAQPDLLSYEDLELAVGHLYRLSFLKEDSQSCRVAALEASGTLAALYPVAFSSHLVPKLAEELRVGESNLTNGDEPTQCSRHLCCLQALSAVSTHPSIVKETLPLLLQHLWQVNRGNMVAQSSDVIAVCQSLRQMAEKCQQDPESCWYFHQTAIPCLLALAVQASMPEKEPSVLRKVLLEDEVLAAMVSVIGTATTHLSPELAAQSVTHIVPLFLDGNVSFLPENSFPSRFQPFQDGSSGQRRLIALLMAFVCSLPRNVEIPQLNQLMRELLELSCCHSCPFSSTAAAKCFAGLLNKHPAGQQLDEFLQLAVDKVEAGLGSGPCRSQAFTLLLWVTKALVLRYHPLSSCLTARLMGLLSDPELGPAAADGFSLLMSDCTDVLTRAGHAEVRIMFRQRFFTDNVPALVQGFHAAPQDVKPNYLKGLSHVLNRLPKPVLLPELPTLLSLLLEALSCPDCVVQLSTLSCLQPLLLEAPQVMSLHVDTLVTKFLNLSSSPSMAVRIAALQCMHALTRLPTPVLLPYKPQVIRALAKPLDDKKRLVRKEAVSARGEWFLLGSPGS

SEQ ID NO: 7077 - protein, 363 aa, Homo sapiens
MLLGFLKLQQKWSYEDKDQRPLNGFKDQLCSLVFMALTDPSTQLQLVGIRTLTVLGAQPDLLSYEDLELAVGHLYRLSFLKEDSQSCRVAALEASGTLAALYPVAFSSHLVPKLAEELRVGESNLTNGDEPTQCSRHLCCLQALSAVSTHPSIVKETLPLLLQHLWQVNRGNMVAQSSDVIAVCQSLRQMAEKCQQDPESCWYFHQTAIPCLLALAVQASMPEKEPSVLRKVLLEDEVLAAMVSVIGTATTHLSPELAAQSVTHIVPLFLDGNVSFLPENSFPSRFQPFQDGSSGQRRLIALLMAFVCSLPRNVEIPQLNQLMRELLELSCTAAPFLPPLLPSALQDSSTSTLQGSSWMNSYS

SEQ ID NO: 7078 - protein, 375 aa, Homo sapiens
MKLVWPSAKLLQAAAGASARACDSVTSNVLPLLLEQFHKHSQSSQRRTILEMLLGFLKLQQKWSYEDKDQRPLNGFKDQLCSLVFMALTDPSTQLQLVGIRTLTVLGAQPDLLSYEDLELAVGHLYRLSFLKEDSQSCRVAALEASGTLAALYPVAFSSHLVPKLAEELRVGESNLTNGDEPTQCSRHLCCLQALSAVSTHPSIVKETLPLLLQHLWQVNRGNMVAQSSDVIAVCQSLRQMAEKCQQDPESCWYFHQTAIPCLLALAVQASMPEKEPSVLRKVLLEDEVLAAMVSVIGTATTHLSPELAAQSVTHIVPLFLDGNVSFLPENSFPSRFQPFQVTDGSSGQRRLIALLMAFVCSLPRNGSSWMNSYS

SEQ ID NO: 7079 - protein, 375 aa, Homo sapiens; identical to SEQ ID NO: 7078

SEQ ID NO: 7080 - protein, 987 aa, Homo sapiens
MAAAAAVEAAAPMGALWGLVHDFVVGQQEGPADQVAADVKSGNYTVLQVVEALGSSLENPEPRTRARAIQLLSQVLLHCHTLLLEKEVVHLILFYENRLKDHHLVIPSVLQGLKALSLCVALPPGLAVSVLKAIFQEVHVQSLPQVDRHTVYNIITNFMRTREEGPFVEELFEVTSCYFPIDFTPPPNDPHGIQREDLILSLRAVLASTPRFAEFLLPLLIEKVDSEVLSAKLDSLQTLNACCAVYGQKELKDFLPSLWASIRREVFQTASERVEAEGLAALHSLTACLSRSVLRADAEDLLDSFLSNILQDCRHHLCEPDMKLVWPSAKLLQAAAGASARACDSVTSNVLPLLLEQFHKHSQSSQRRTILEMLLGFLKLQQKWSYEDKDQRPLNGFKDQLCSLVFMALTDPSTQLQLVGIRTLTVLGAQPDLLSYEDLELAVGHLYRLSFLKEDSQSCRVAALEASGTLAALYPVAFSSHLVPKLAEELRVGESNLTNGDEPTQCSRHLCCLQALSAVSTHPSIVKETLPLLLQHLWQVNRGNMVAQSSDVIAVCQSLRQMAEKCQQDPESCWYFHQTAIPCLLALAVQASMPEKEPSVLRKVLLEDEVLAAMVSVIGTATTHLSPELAAQSVTHIVPLFLDGNVSFLPENSFPSRFQPFQDGSSGQRRLIALLMAFVCSLPRNVEIPQLNQLMRELLELSCCHSCPFSSTAAAKCFAGLLNKHPAGQQLDEFLQLAVDKVEAGLGSGPCRSQAFTLLLWVTKALVLRYHPLSSCLTARLMGLLSDPELGPAAADGFSLLMSDCTDVLTRAGHAEVRIMFRQRFFTDNVPALVQGFHAAPQDVKPNYLKGLSHVLNRLPKPVLLPELPTLLSLLLEALSCPDCVVQLSTLSCLQPLLLEAPQVMSLHVDTLVTKFLNLSSSPSMAVRIAALQCMHALTRLPTPVLLPYKPQVIRALAKPLDDKKRLVRKEAVSARGEWFLLGSPGS

SEQ ID NO: 7081 - protein, 1030 aa, Homo sapiens
MAAAAAVEAAAPMGALWGLVHDFVVGQQEGPADQVAADVKSGNYTVLQVVEALGSSLENPEPRTRARAIQLLSQVLLHCHTLLLEKEVVHLILFYENRLKDHHLVIPSVLQGLKALSLCVALPPGLAVSVLKAIFQEVHVQSLPQVDRHTVYNIITNFMRTREEELKSLGADFTFGFIQVMDGEKDPRNLLVAFRIVHDLISRDYSLGPFVEELFEVTSCYFPIDFTPPPNDPHGIQREDLILSLRAVLASTPRFAEFLLPLLIEKVDSEVLSAKLDSLQTLNACCAVYGQKELKDFLPSLWASIRREVFQTASERVEAEGLAALHSLTACLSRSVLRADAEDLLDSFLSNILQDCRHHLCEPDMKLVWPSAKLLQAAAGASARACDSVTSNVLPLLLEQFHKHSQSSQRRTILEMLLGFLKLQQKWSYEDKDQRPLNGFKDQLCSLVFMALTDPSTQLQLVGIRTLTVLGAQPDLLSYEDLELAVGHLYRLSFLKEDSQSCRVAALEASGTLAALYPVAFSSHLVPKLAEELRVGESNLTNGDEPTQCSRHLCCLQALSAVSTHPSIVKETLPLLLQHLWQVNRGNMVAQSSDVIAVCQSLRQMAEKCQQDPESCWYFHQTAIPCLLALAVQASMPEKEPSVLRKVLLEDEVLAAMVSVIGTATTHLSPELAAQSVTHIVPLFLDGNVSFLPENSFPSRFQPFQDGSSGQRRLIALLMAFVCSLPRNVEIPQLNQLMRELLELSCCHSCPFSSTAAAKCFAGLLNKHPAGQQLDEFLQLAVDKVEAGLGSGPCRSQAFTLLLWVTKALVLRYHPLSSCLTARLMGLLSDPELGPAAADGFSLLMSDCTDVLTRAGHAEVRIMFRQRFFTDNVPALVQGFHAAPQDVKPNYLKGLSHVLNRLPKPVLLPELPTLLSLLLEALSCPDCVVQLSTLSCLQPLLLEAPQVMSLHVDTLVTKFLNLSSSPSMAVRIAALQCMHALTRLPTPVLLPYKPQVIRALAKPLDDKKRLVRKEAVSARGEWFLLGSPGS

SEQ ID NO: 7082 - protein, 1009 aa, Homo sapiens
MAAAAAVEAAAPMGALWGLVHDFVVGQQEGPADQVAASSLENPEPRTRARAIQLLSQVLLHCHTLLLEKEVVHLILFYENRLKDHHLVIPSVLQGLKALSLCVALPPGLAVSVLKAIFQEVHVQVDRHTVYNIITNFMRTREEELKSLGADFTFGFIQVMDGEKDPRNLLVAFRIVHDLISRDYSLGPFVEELFEVTSCYFPIDFTPPPNDPHGIQREDLILSLRAVLASTPRFAEFLLPLLIEKVDSEVLSAKLDSLQTLNACCAVYGQKELKDFLPSLWASIRREVFQTASERVEAEGLAALHSLTACLSRSVLRADAEDLLDSFLSNILQDCRHHLCEPDMKLVWPSAKLLQAAAGASARACDSVTSNVLPLLLEQFHKHSQSSQRRTILEMLLGFLKLQQKWSYEDKDQRPLNGFKDQLCSLVFMALTDPSTQLQLVGIRTLTVLGAQPDLLSYEDLELAVGHLYRLSFLKEDSQSCRVAALEASGTLAALYPVAFSSHLVPKLAEELRVGESNLTNGDEPTQCSRHLCCLQALSAVSTHPSIVKETLPLLLQHLWQVNRGNMVAQSSDVIAVCQSLRQMAEKCQQDPESCWYFHQTAIPCLLALAVQASMPEKEPSVLRKVLLEDEVLAAMVSVIGTATTHLSPELAAQSVTHIVPLFLDGNVSFLPENSFPSRFQPFQDGSSGQRRLIALLMAFVCSLPRNVEIPQLNQLMRELLELSCCHSCPFSSTAAAKCFAGLLNKHPAGQQLDEFLQLAVDKVEAGLGSGPCRSQAFTLLLWVTKALVLRYHPLSSCLTARLMGLLSDPELGPAAADGFSLLMSDCTDVLTRAGHAEVRIMFRQRFFTDNVPALVQGFHAAPQDVKPNYLKGLSHVLNRLPKPVLLPELPTLLSLLLEALSCPDCVVQLSTLSCLQPLLLEAPQVMSLHVDTLVTKFLNLSSSPSMAVRIAALQCMHALTRLPTPVLLPYKPQVIRALAKPLDDKKRLVRKEAVSARGEWFLLGSPGS

SEQ ID NO: 7083 - protein, 1030 aa, Homo sapiens; identical to SEQ ID NO: 7081

SEQ ID NO: 7084 - protein, 577 aa, Homo sapiens
MPKTISVRVTTMDAELEFAIQPNTTGKQLFDQVVKTIGLREVWFFGLQYQDTKGFSTWLKLNKKVTAQDVRKESPLLFKFRAKFYPEDVSEELIQDITQRLFFLQVKEGILNDDIYCPPETAVLLASYAVQSKYGDFNKEVHKSGYLAGDKLLPQRVLEQHKLNKDQWEERIQVWHEEHRGMLREDAVLEYLKIAQDLEMYGVNYFSIKNKKGSELWLGVDALGLNIYEQNDRLTPKIGFPWSEIRNISFNDKKFVIKPIDKKAPDFVFYAPRLRINKRILALCMGNHELYMRRRKPDTIEVQQMKAQAREEKHQKQMERAMLENEKKKREMAEKEKEKIEREKEELMERLKQIEEQTKKAQQELEEQTRRALELEQERKRAQSEAEKLAKERQEAEEAKEALLQASRDQKKTQEQLALEMAELTARISQLEMARQKKESEAVEWQQKAQMVQEDLEKTRAELKTAMSTPHVAEPAENEQDEQDENGAEASADLRADAMAKDRSEEERTTEAEKNERVQKHLKALTSELANARDESKKTANDMIHAENMRLGRDKYKTLRQIRQGNTKQRIDEFESM

SEQ ID NO: 7085 - protein, 238 aa, Homo sapiens
MRFKNRFQRFMNHRAPANGRYKPTCYEHAANCYTHAFLIVPAIVGSALLHRLSDDCWEKITAWIYGMGLCALFIVSTVFHIVSWKKSHLRTVEHCFHMCDRMVIYFFIAASYAPWLNLRELGPLASHMRWFIWLMAAGGTIYVFLYHEKYKVVELFFYLTMGFSPALVVTSMNNTDGLQELACGGLIYCLGVVFFKSDGIIPFAHAIWHLFVATAAAVHYYAIWKYLYRSPTDFMRHL

SEQ ID NO: 7086 - protein, 708 aa, Homo sapiens
MSTADALDDENTFKILVATDIHLGFMEKDAVRGNDTFVTLDEILRLAQENEVDFILLGGDLFHENKPSRKTLHTCLELLRKYCMGDRPVQFEILSDQSVNFGFSKFPWVNYQDGNLNISIPVFSIHGNHDDPTGADALCALDILSCAGFVNHFGRSMSVEKIDISPVLLQKGSTKIALYGLGSIPDERLYRMFVNKKVTMLRPKEDENSWFNLFVIHQNRSKHGSTNFIPEQFLDDFIDLVIWGHEHECKIAPTKNEQQLFYISQPGSSVVTSLSPGEAVKKHVGLLRIKGRKMNMHKIPLHTVRQFFMEDIVLANHPDIFNPDNPKVTQAIQSFCLEKIEEMLENAERERLGNSHQPEKPLVRLRVDYSGGFEPFSVLRFSQKFVDRVANPKDIIHFFRHREQKEKTGEEINFGKLITKPSEGTTLRVEDLVKQYFQTAEKNVQLSLLTERGMGEAVQEFVDKEEKDAIEELVKYQLEKTQRFLKERHIDALEDKIDEEVRRFRETRQKNTNEEDDEVREAMTRARALRSQSEESASAFSADDLMSIDLAEQMANDSDDSISAATNKGRGRGRGRRGGRGQNSASRGGSQRGRADTGLETSTRSRNSKTAVSASRNMSIIDAFKSTRQQPSRNVTTKNYSEVIEVDESDVEEDIFPTTSKTDQRWSSTSSSKIMSQSQVSKGVDFESSEDDDDDPFMNTSSLRRNRR

SEQ ID NO: 7087 - protein, 680 aa, Homo sapiens
MSTADALDDENTFKILVATDIHLGFMEKDAVRGNDTFVTLDEILRLAQENEVDFILLGGDLFHENKPSRKTLHTCLELLRKYCMGDRPVQFEILSDQSVNFGFSKFPWVNYQDGNLNISIPVFSIHGNHDDPTGADALCALDILSCAGFVNHFGRSMSVEKIDISPVLLQKGSTKIALYGLGSIPDERLYRMFVNKKVTMLRPKEDENSWFNLFVIHQNRSKHGSTNFIPEQFLDDFIDLVIWGHEHECKIAPTKNEQQLFYISQPGSSVVTSLSPGEAVKKHVGLLRIKGRKMNMHKIPLHTVRQFFMEDIVLANHPDIFNPDNPKVTQAIQSFCLEKIEEMLENAERERLGNSHQPEKPLVRLRVDYSGGFEPFSVLRFSQKFVDRVANPKDIIHFFRHREQKEKTGEEINFGKLITKPSEGTTLRVEDLVKQYFQTAEKNVQLSLLTERGMGEAVQEFVDKEEKDAIEELVKYQLEKTQRFLKERHIDALEDKIDEEVRRFRETRQKNTNEEDDEVREAMTRARALRSQSEESASAFSADDLMSIDLAEQMANDSDDSISAATNKGRGRGRGRRGGRGQNSASRGGSQRGRAFKSTRQQPSRNVTTKNYSEVIEVDESDVEEDIFPTTSKTDQRWSSTSSSKIMSQSQVSKGVDFESSEDDDDDPFMNTSSLRRNRR

SEQ ID NO: 7088 - protein, 707 aa, Homo sapiens
MSTADALDDENTFKILVATDIHLGFMEKDAVRGNDTFVTLDEILRLAQENEVDFILLGGDLFHENKPSRKTLHTCLELLRKYCMGDRPVQFEILSDQSVNFGFSKFPWVNYQDGNLNISIPVFSIHGNHDDPTGADALCALDILSCAGFVNHFGRSMSVEKIDISPVLLQKGSTKIALYGLGSIPDERLYRMFVNKKVTMLRPKEDENSWFNLFVIHQNRSKHGSTNFIPEQFLDDFIDLVIWGHEHECKIAPTKNEQQLFYISQPGSSVVTSLSPGEAVKKHVGLLRIKGRKMNMHKIPLHTVRQFFMEDIVLANHPDIFNPDNPKVTQAIQSFCLEKIEEMLENAERERLGNSHQPEKPLVRLRVDYSGGFEPFSVLRFSQKFVDRVANPKDIIHFFRHREQKEKTGEEINFGKLITKPSEGTTLRVEDLVKQYFQTAEKNVQLSLLTERGMGEAVQEFVDKEEKDAIEELVKYQLEKTQRFLKERHIDALEDKIDEEVRRFRETRQKNTNEEDDEVREAMTRARALRSQSEESASAFSADDLMSIDLAEQMANDSDDSISAATNKGRGRGRGRRGGRGQNSASRGGSQRGRDTGLETSTRSRNSKTAVSASRNMSIIDAFKSTRQQPSRNVTTKNYSEVIEVDESDVEEDIFPTTSKTDQRWSSTSSSKIMSQSQVSKGVDFESSEDDDDDPFMNTSSLRRNRR

SEQ ID NO: 7089 - protein, 711 aa, Homo sapiens
MNRNISHQKGDDENTFKILVATDIHLGFMEKDAVRGNDTFVTLDEILRLAQENEVDFILLGGDLFHENKPSRKTLHTCLELLRKYCMGDRPVQFEILSDQSVNFGFSKFPWVNYQDGNLNISIPVFSIHGNHDDPTGADALCALDILSCAGFVNHFGRSMSVEKIDISPVLLQKGSTKIALYGLGSIPDERLYRMFVNKKVTMLRPKEDENSWFNLFVIHQNRSKHGSTNFIPEQFLDDFIDLVIWGHEHECKIAPTKNEQQLFYISQPGSSVVTSLSPGEAVKKHVGLLRIKGRKMNMHKIPLHTVRQFFMEDIVLANHPDIFNPDNPKVTQAIQSFCLEKIEEMLENAERERLGNSHQPEKPLVRLRVDYSGGFEPFSVLRFSQKFVDRVANPKDIIHFFRHREQKEKTGEEINFGKLITKPSEGTTLRVEDLVKQYFQTAEKNVQLSLLTERGMGEAVQEFVDKEEKDAIEELVKYQLEKTQRFLKERHIDALEDKIDEEVRRFRETRQKNTNEEDDEVREAMTRARALRSQSEESASAFSADDLMSIDLAEQMANDSDDSISAATNKGRGRGRGRRGGRGQNSASRGGSQRGRADTGLETSTRSRNSKTAVSASRNMSIIDAFKSTRQQPSRNVTTKNYSEVIEVDESDVEEDIFPTTSKTDQRWSSTSSSKIMSQSQVSKGVDFESSEDDDDDPFMNTSSLRRNRR

SEQ ID NO: 7090 - protein, 127 aa, Homo sapiens
MSTADALDDENTFKILVATDIHLGFMEKDAVRGNDTFVTLDEILRLAQENEVDFILLGGDLFHENKPSRKTLHTCLELLRKYCMGDRPVQFEILSDQSVNFGFSKFPWVNYQDGNLNISIPVFSIHG

SEQ ID NO: 7091 - protein, 111 aa, Homo sapiens
MSTADALDDENTFKILVATDIHLGFMEKDAVRGNDTFVTLDEILRLAQENEVDFILLGGDLFHENKPSRKTLHTCLELLRKYCMGDRPVQFEILSDQSVNFGFSKFPWVNY

SEQ ID NO: 7092 - protein, 221 aa, Homo sapiens
MSTADALDDENTFKILVATDIHLGFMEKDAVRGNDTFVTLDEILRLAQENEVDFILLGGDLFHENKPSRKTLHTCLELLRKYCMGDRPVQFEILSDQSVNFGFSKFPWVNYQDGNLNISIPVFSIHGNHDDPTGADALCALDILSCAGFVNHFGRSMSVEKIDISPVLLQKGSTKIALYGLGSIPDERLYRMFVNKKVTMLRPKEDENSWFNLFVIHQNRV

SEQ ID NO: 7093 - protein, 273 aa, Homo sapiens
MTPGTQSPFFLLLLLTVLTVVTGSGHASSTPGGEKETSATQRSSVPSSTEKNALSTGVSFFFLSFHISNLQFNSSLEDPSTDYYQELQRDISEMFLQIYKQGGFLGLSNIKFRPGSVVVQLTLAFREGTINVHDVETQFNQYKTEAASRYNLTISDVSVSDVPFPFSAQSGAGVPGWGIALLVLVCVLVALAIVYLIALAVCQCRRKNYGQLDIFPARDTYHPMSEYPTYHTHGRYVPPSSTDRSPYEKVSAGNGGSSLSYTNPAVAATSANL

SEQ ID NO: 7094 - protein, 224 aa, Homo sapiens
MTPGTQSPFFLLLLLTVLTATTAPKPATVVTGSGHASSTPGGEKETSATQRSSVPSSTEKNAFRPGSVVVQLTLAFREGTINVHDVETQFNQYKTEAASRYNLTISDVSVSDVPFPFSAQSGAGVPGWGIALLVLVCVLVALAIVYLIALAVCQCRRKNYGQLDIFPARDTYHPMSEYPTYHTHGRYVPPSSTDRSPYEKVSAGNGGSSLSYTNPAVAATSANL

SEQ ID NO: 7095 - protein, 166 aa, Homo sapiens
MTPGTQSPFFLLLLLTVLTATTAPKPATVVTGSGHASSTPGGEKETSATQRSSVPSSTEKNASGAGVPGWGIALLVLVCVLVALAIVYLIALAVCQCRRKNYGQLDIFPARDTYHPMSEYPTYHTHGRYVPPSSTDRSPYEKVSAGNGGSSLSYTNPAVAATSANL

SEQ ID NO: 7096 - protein, 203 aa, Homo sapiens
MTPGTQSPFFLLLLLTVLTVVTGSGHASSTPGGEKETSATQRSSVPSSTEKNAIPAPTTTKSCRETFLKCFCRFINKGVFWASPILSSVSDVPFPFSAQSGAGVPGWGIALLVLVCVLVALAIVYLIALAVCQCRRKNYGQLDIFPARDTYHPMSEYPTYHTHGRYVPPSSTDRSPYEKVSAGNGGSSLSYTNPAVAATSANL

SEQ ID NO: 7097 - protein, 168 aa, Homo sapiens
MTPGTQSPFFLLLLLTVLTVVTGSGHASSTPGGEKETSATQRSSVPSSTEKNALSTGVSFFFLSFHISNLQFNSSLEDPSTDYYQELQRDISEMAVCQCRRKNYGQLDIFPARDTYHPMSEYPTYHTHGRYVPPSSTDRSPYEKVSAGNGGSSLSYTNPAVAATSANL

SEQ ID NO: 7098 - protein, 255 aa, Homo sapiens
MTPGTQSPFFLLLLLTVLTVVTGSGHASSTPGGEKETSATQRSSVPSSTEKNAFNSSLEDPSTDYYQELQRDISEMFLQIYKQGGFLGLSNIKFRPGSVVVQLTLAFREGTINVHDVETQFNQYKTEAASRYNLTISDVSVSDVPFPFSAQSGAGVPGWGIALLVLVCVLVALAIVYLIALAVCQCRRKNYGQLDIFPARDTYHPMSEYPTYHTHGRYVPPSSTDRSPYEKVSAGNGGSSLSYTNPAVAATSANL

SEQ ID NO: 7099 - protein, 264 aa, Homo sapiens
MTPGTQSPFFLLLLLTVLTATTAPKPATVVTGSGHASSTPGGEKETSATQRSSVPSSTEKNAFNSSLEDPSTDYYQELQRDISEMFLQIYKQGGFLGLSNIKFRPGSVVVQLTLAFREGTINVHDVETQFNQYKTEAASRYNLTISDVSVSDVPFPFSAQSGAGVPGWGIALLVLVCVLVALAIVYLIALAVCQCRRKNYGQLDIFPARDTYHPMSEYPTYHTHGRYVPPSSTDRSPYEKVSAGNGGSSLSYTNPAVAATSANL

SEQ ID NO: 7100 - protein, 198 aa, Homo sapiens
MTPGTQSPFFLLLLLTVLTVVTGSGHASSTPGGEKETSATQRSSVPSSTEKNALSTGVSFFFLSFHISNLQFNSSLEDPSTDYYQELQRDISEMFLQIYKQGGFLGLSNIKFRPGSVVVQLTLAFREGTINVHDVETQFNQYKTEAASRYNLTISDVSGCLSVPPKELRAAGHLSSPGYLPSYERVPHLPHPWALCAP

SEQ ID NO: 7101 - protein, 475 aa, Homo sapiens
MTPGTQSPFFLLLLLTVLTVVTGSGHASSTPGGEKETSATQRSSVPSSTEKNAVSMTSSVLSSHSPGSGSSTTQGQDVTLAPATEPASGSAATWGQDVTSVPVTRPALGSTTPPAHDVTSAPDNKPAPGSTAPPAHGVTSAPDTRPAPGSTAPPAHGVTSAPDNRPALGSTAPPVHNVTSASGSASGSASTLVHNGTSARATTTPASKSTPFSIPSHHSDTPTTLASHSTKTDASSTHHSTVPPLTSSNHSTSPQLSTGVSFFFLSFHISNLQFNSSLEDPSTDYYQELQRDISEMFLQIYKQGGFLGLSNIKFRPGSVVVQLTLAFREGTINVHDVETQFNQYKTEAASRYNLTISDVSVSDVPFPFSAQSGAGVPGWGIALLVLVCVLVALAIVYLIALAVCQCRRKNYGQLDIFPARDTYHPMSEYPTYHTHGRYVPPSSTDRSPYEKVSAGNGGSSLSYTNPAVAATSANL

SEQ ID NO: 7102 - protein, 159 aa, Homo sapiens
MTPGTQSPFFLLLLLTVLTATTAPKPATVVTGSGHASSTPGGEKETSATQRSSVPSSTEKNAFNSSLEDPSTDYYQELQRDISEMAVCQCRRKNYGQLDIFPARDTYHPMSEYPTYHTHGRYVPPSSTDRSPYEKVSAGNGGSSLSYTNPAVAATSANL

SEQ ID NO: 7103 - protein, 230 aa, Homo sapiens
MTPGTQSPFFLLLLLTVLTVVTGSGHASSTPGGEKETSATQRSSVPSSTEKNAIPAPTTTKSCRETFLKWPGSVVVQLTLAFREGTINVHDVETQFNQYKTEAASRYNLTISDVSVSDVPFPFSAQSGAGVPGWGIALLVLVCVLVALAIVYLIALAVCQCRRKNYGQLDIFPARDTYHPMSEYPTYHTHGRYVPPSSTDRSPYEKVSAGNGGSSLSYTNPAVAATSANL

SEQ ID NO: 7104 - protein, 561 aa, Homo sapiens
MTPGTQSPFFLLLLLTVLTVVTGSGHASSTPGGEKETSATQRSSVPSSTEKNAVSMTSSVLSSHSPGSGSSTTQGQDVTLAPATEPASGSAATWGQDVTSVPVTRPALGSTTPPAHDVTSAPDTRPAPGSTAPPAHGVTSAPDTRPAPGSTAPPAHGVTSAPDTRPAPGSTAPPAHGVTSAPDTRPAPGSTAPPAHGVTSAPDTRRAPGSTPAPGSTAPPAHGVTSAPDTRPAPGSTAPPAHGVTSAPDNRPALGSTAPPVHNVTSASGSASGSASTLVHNGTSARATTTPASKSTPFSIPSHHSDTPTTLASHSTKTDASSTHHSTVPPLTSSNHSTSPQLSTGVSFFFLSFHISNLQFNSSLEDPSTDYYQELQRDISEMFLQIYKQGGFLGLSNIKFRPGSVVVQLTLAFREGTINVHDVETQFNQYKTEAASRYNLTISDVSVSDVPFPFSAQSGAGVPGWGIALLVLVCVLVALAIVYLIALAVCQCRRKNYGQLDIFPARDTYHPMSEYPTYHTHGRYVPPSSTDRSPYEKVSAGNGGSSLSYTNPAVAATSANL

SEQ ID NO: 7105 - protein, 229 aa, Homo sapiens
MTPGTQSPFFLLLLLTVLTVVTGSGHASSTPGGEKETSATQRSSVPSSTEKNAIYKQGGFLGLSNIKFRPGSVVVQLTLAFREGTINVHDVETQFNQYKTEAASRYNLTISDVSVSDVPFPFSAQSGAGVPGWGIALLVLVCVLVALAIVYLIALAVCQCRRKNYGQLDIFPARDTYHPMSEYPTYHTHGRYVPPSSTDRSPYEKVSAGNGGSSLSYTNPAVAATSANL

SEQ ID NO: 7106 - protein, 259 aa, Homo sapiens
MTPGTQSPFFLLLLLTVLTATTAPKPATVVTGSGHASSTPGGEKETSATQRSSVPSSTEKNAFNSSLEDPSTDYYQELQRDISEMFLQIYKQGGFLGLSNIKFRPGSVVVQLTLAFREGTINVHDVETQFNQYKTEAASRYNLTISDVSVSDVPFPFSAQSGAGVPGWGIALLVLVCVLVALAIVYLIALAVCQCRRKNYGQLDIFPARDTYHPMSEYPTYHTHGRYVPPSSTDRSPYEKRQNGWSTMPRGALPEESQG

SEQ ID NO: 7107 - protein, 610 aa, Homo sapiens
MGLKAAQKTLFPLRSIDDVVRLFAAELGREEPDLVLLSLVLGFVEHFLAVNRVIPTNVPELTFQPSPAPDPPGGLTYFPVADLSIIAALYARFTAQIRGAVDLSLYPREGGVSSRELVKKVSDVIWNSLSRSYFKDRAHIQSLFSFITGTKLDSSGVAFAVVGACQALGLRDVHLALSEDHAWVVFGPNGEQTAEVTWHGKGNEDRRGQTVNAGVAERSWLYLKGSYMRCDRKMEVAFMVCAINPSIDLHTDSLELLQLQQKLLWLLYDLGHLERYPMALGNLADLEELEPTPGRPDPLTLYHKGIASAKTYYRDEHIYPYMYLAGYHCRNRNVREALQAWADTATVIQDYNYCREDEEIYKEFFEVANDVIPNLLKEAASLLEAGEERPGEQSQGTQSQGSALQDPECFAHLLRFYDGICKWEEGSPTPVLHVGWATFLVQSLGRFEGQVRQKVRIVSREAEAAEAEEPWGEEAREGRRRGPRRESKPEEPPPPKKPALDKGLGTGQGAVSGPPRKPPGTVAGTARGPEGGSTAQVPAPTASPPPEGPVLTFQSEKMKGMKELLVATKINSSAIKLQLTAQSQVQMKKQKVSTPSDYTLSFLKRQRKGL

SEQ ID NO: 7108 - protein, 610 aa, Homo sapiens; identical to SEQ ID NO: 7107

SEQ ID NO: 7109 - protein, 615 aa, Homo sapiens
MGLKAAQKTLFPLRSIDDVVRLFAAELGREEPDLVLLSLVLGFVEHFLAVNRVIPTNVPELTFQPSPAPDPPGGLTYFPVADLSIIAALYARFTAQIRGAVDLSLYPREGGVSSRELVKKVSDVIWNSLSRSYFKDRAHIQSLFSFITGWSPVGTKLDSSGVAFAVVGACQALGLRDVHLALSEDHAWVVFGPNGEQTAEVTWHGKGNEDRRGQTVNAGVAERSWLYLKGSYMRCDRKMEVAFMVCAINPSIDLHTDSLELLQLQQKLLWLLYDLGHLERYPMALGNLADLEELEPTPGRPDPLTLYHKGIASAKTYYRDEHIYPYMYLAGYHCRNRNVREALQAWADTATVIQDYNYCREDEEIYKEFFEVANDVIPNLLKEAASLLEAGEERPGEQSQGTQSQGSALQDPECFAHLLRFYDGICKWEEGSPTPVLHVGWATFLVQSLGRFEGQVRQKVRIVSREAEAAEAEEPWGEEAREGRRRGPRRESKPEEPPPPKKPALDKGLGTGQGAVSGPPRKPPGTVAGTARGPEGGSTAQVPAPTASPPPEGPVLTFQSEKMKGMKELLVATKINSSAIKLQLTAQSQVQMKKQKVSTPSDYTLSFLKRQRKGL

SEQ ID NO: 7110 - protein, 615 aa, Homo sapiens; identical to SEQ ID NO: 7109

SEQ ID NO: 7111 - protein, 555 aa, Homo sapiens
MGLKAAQKTLFPLRSIDDVVRLFAAELGREEPDLVLLSLVLGFVEHFLAVNRVIPTNVPELTFQPSPAPDPPGGLTYFPVADLSIIAALYARFTAQIRGAVDLSLYPREGGVSSRELVKKVSDVIWNSLSRSYFKDRAHIQSLFSFITGTKLDSSGVAFAVVGACQALGLRDVHLALSEDHAWVVFGPNGEQTAEVTWHGKGNEDRRGQTVNAGVAERSWLYLKGSYMRCDRKMEVAFMVCAINPSIDLHTDSLELLQLQQKLLWLLYDLGHLERYPMALGNLADLEELEPTPGRPDPLTLYHKGIASAKTYYRDEHIYPYMYLAGYHCRNRNVREALQAWADTATVIQDYNYCREDEEIYKEFFEVANDVIPNLLKEAASLLEAGEERPGEQSQVRQKVRIVSREAEAAEAEEPWGEEAREGRRRGPRRESKPEEPPPPKKPALDKGLGTGQGAVSGPPRKPPGTVAGTARGPEGGSTAQVPAPTASPPPEGPVLTFQSEKMKGMKELLVATKINSSAIKLQLTAQSQVQMKKQKVSTPSDYTLSFLKRQRKGL

SEQ ID NO: 7112 - protein, 575 aa, Homo sapiens
MGLKAAQKTLFPLRSIDDVVRLFAAELGREEPDLVLLSLVLGFVEHFLAVNRVIPTNVPELTFQPSPAPDPPGGLTYFPVADLSIIAALYARFTAQIRGAVDLSLYPREGGVSSRELVKKVSDVIWNSLSRSYFKDRAHIQSLFSFITGTKLDSSGVAFAVVGACQALGLRDVHLALSEDHAWSWLYLKGSYMRCDRKMEVAFMVCAINPSIDLHTDSLELLQLQQKLLWLLYDLGHLERYPMALGNLADLEELEPTPGRPDPLTLYHKGIASAKTYYRDEHIYPYMYLAGYHCRNRNVREALQAWADTATVIQDYNYCREDEEIYKEFFEVANDVIPNLLKEAASLLEAGEERPGEQSQGTQSQGSALQDPECFAHLLRFYDGICKWEEGSPTPVLHVGWATFLVQSLGRFEGQVRQKVRIVSREAEAAEAEEPWGEEAREGRRRGPRRESKPEEPPPPKKPALDKGLGTGQGAVSGPPRKPPGTVAGTARGPEGGSTAQVPAPTASPPPEGPVLTFQSEKMKGMKELLVATKINSSAIKLQLTAQSQVQMKKQKVSTPSDYTLSFLKRQRKGL

SEQ ID NO: 7113 - protein, 610 aa, Homo sapiens; identical to SEQ ID NO: 7107

SEQ ID NO: 7114 - protein, 615 aa, Homo sapiens; identical to SEQ ID NO: 7109

SEQ ID NO: 7115 - protein, 615 aa, Homo sapiens; identical to SEQ ID NO: 7109

SEQ ID NO: 7116 - protein, 261 aa, Homo sapiens
MGLKAAQKTLFPLRSIDDVVRLFAAELGREEPDLVLLSLVLGFVEHFLAVNRVIPTNVPELTFQPSPAPDPPGGLTYFPVADLSIIAALYARFTAQIRGAVDLSLYPREGGVSSRELVKKVSDVIWNSLSRSYFKDRAHIQSLFSFITGTKLDSSGVAFAVVGACQALGLRDVHLALSEDHAWVVFGPNGEQTAEVTWHGKGNEDRRGQTVNAGVAERSWLYLKGSYMRCDRKMEVAFMVCAINPSIDLHTDSLELLQLQQ

SEQ ID NO: 7117 - protein, 146 aa, Homo sapiens
MGLKAAQKTLFPLRSIDDVVRLFAAELGREEPDLVLLSLVLGFVEHFLAVNRVIPTNVPELTFQPSPAPDPPGGLTYFPVADLSIIAALYARFTAQIRGAVDLSLYPREGGVSSRELVKKVSDVIWNSLSRSYFKDRAHIQSLFSF

SEQ ID NO: 7118 - protein, 146 aa, Homo sapiens; identical to SEQ ID NO: 7117

SEQ ID NO: 7119 - protein, 346 aa, Homo sapiens
MGLKAAQKTLFPLRSIDDVVRLFAAELGREEPDLVLLSLVLGFVEHFLAVNRVIPTNVPELTFQPSPAPDPPGGLTYFPVADLSIIAALYARFTAQIRGAVDLSLYPREGGVSSRELVKKVSDVIWNSLSRSYFKDRAHIQSLFSFITGTKLDSSGVAFAVVGACQALGLRDVHLALSEDHAWVVFGPNGEQTAEVTWHGKGNEDRRGQTVNAGVAERSWLYLKGSYMRCDRKMEVAFMVCAINPSIDLHTDSLELLQLQQKLLWLLYDLGHLERYPMALGNLADLEELEPTPGRPDPLTLYHKGIASAKTYYRDEHIYPYMYLAGYHCRNRNVREALQAWADTAT

SEQ ID NO: 7120 - protein, 615 aa, Homo sapiens; identical to SEQ ID NO: 7109

SEQ ID NO: 7121 - protein, 281 aa, Homo sapiens
MGLKAAQKTLFPLRSIDDVVRLFAAELGREEPDLVLLSLVLGFVEHFLAVNRVIPTNVPELTFQPSPAPDPPGGLTYFPVADLSIIAALYARFTAQIRGAVDLSLYPREGGVSSRELVKKVSDVIWNSLSRSYFKDRAHIQSLFSFITGTKLDSSGVAFAVVGACQALGLRDVHLALSEDHAWVVFGPNGEQTAEVTWHGKGNEDRRGQTVNAGVAERSWLYLKGSYMRCDRKMEVAFMVCAINPSIDLHTDSLELLQLQQKLLWLLYDLGHLERYPMALG

SEQ ID NO: 7122 - protein, 551 aa, Homo sapiens
MAAPVRLGRKRPLPACPNPLFVRWLTEWRDEATRSRRRTRFVFQKALRSLRRYPLPLRSGKEAKILQHFGDGLCRMLDERLQRHRTSGGDHAPDSPSGENSPAPQGRLAEVQDSSMPVPAQPKAGGSGSYWPARHSGARVILLVLYREHLNPNGHHFLTKEELLQRCAQKSPRVAPGSARPWPALRSLLHRNLVLRTHQPARYSLTPEGLELAQKLAESEGLSLLNVGIGPKEPPGEETAVPGAASAELASEAGVQQQPLELRPGEYRVLLCVDIGETRGGGHRPELLRELQRLHVTHTVRKLHVGDFVWVAQETNPRDPANPGELVLDHIVERKRLDDLCSSIIDGRFREQKFRLKRCGLERRVYLVEEHGSVHNLSLPESTLLQAVTNTQVIDGFFVKRTADIKESAAYLALLTRGLQRLYQGHTLRSRPWGTPGNPESGAMTSPNPLCSLLTFSDFNAGAIKNKAQSVREVFARQLMQVRGVSGEKAAALVDRYSTPASLLAAYDACATPKEQETLLSTIKCGRLQRNLGPALSRTLSQLYCSYGPLT

SEQ ID NO: 7123 - protein, 551 aa, Homo sapiens; identical to SEQ ID NO: 7122

SEQ ID NO: 7124 - protein, 829 aa, Homo sapiens
MNSGVAMKYGNDSSAELSELHSAALASLKGDIVELNKRLQQTERERDLLEKKLAKAQCEQSHLMREHEDVQERTTLRYEERITELHSVIAELNKKIDRLQGTTIREEDEYSELRSELSQSQHEVNEDSRSMDQDQTSVSIPENQSTMVTADMDNCSDLNSELQRVLTGLENVVCGRKKSSCSLSVAEVDKHIEQLTTASEHCDLAIKTVEEIEGVLGRDLYPNLAEERSRWEKELAGLREENESLTAMLCSKEEELNRTKATMNAIREERDRLRRRVRELQTRLQSVQATGPSSPGRLTSTNRPINPSTGELSTSSSSNDIPIAKIAERVKLSKTRSESSSSDRPVLGSEISSIGVSSSVAEHLAHSLQDCSNIQEIFQTLYSHGSAISESKIREFEVETERLNSRIEHLKSQNDLLTITLEECKSNAERMSMLVGKYESNATALRLALQYSEQCIEAYELLLALAESEQSLILGQFRAAGVGSSPGDQSGDENITQMLKRAHDCRKTAENAAKALLMKLDGSCGGAFAVAGCSVQPWESLSSNSHTSTTSSTASSCDTEFTKEDEQRLKDYIQQLKNDRAAVKLTMLELESIHIDPLSYDVKPRGDSQRLDLENAVLMQELMAMKEEMAELKAQLYLLEKEKKALELKLSTREAQEQAYLVHIEHLKSEVEEQKEQRMRSLSSTSSGSKDKPGKECADAASPALSLAELRTTCSENELAAEFTNAIRREKKLKARVQELVSALERLTKSSEIRHQQSAEFVNDLKRANSNLVAAYEKAKKKHQNKLKKLESQMMAMVERHETQVRMLKQRIALLEEENSRPHTNETSL

SEQ ID NO: 7125 - protein, 756 aa, Homo sapiens
MSFVAGVIRRLDETVVNRIAAGEVIQRPANAIKEMIENCLDAKSTSIQVIVKEGGLKLIQIQDNGTGIRKEDLDIVCERFTTSKLQSFEDLASISTYGFRGEALASISHVAHVTITTKTADGKCAYRASYSDGKLKAPPKPCAGNQGTQITVEDLFYNIATRRKALKNPSEEYGKILEVVGRYSVHNAGISFSVKKQGETVADVRTLPNASTVDNIRSIFGNAVSRELIEIGCEDKTLAFKMNGYISNANYSVKKCIFLLFINHRLVESTSLRKAIETVYAAYLPKNTHPFLYLSLEISPQNVDVNVHPTKHEVHFLHEESILERVQQHIESKLLGSNSSRMYFTQTLLPGLAGPSGEMVKSTTSLTSSSTSGSSDKVYAHQMVRTDSREQKLDAFLQPLSKPLSSQPQAIVTEDKTDISSGRARQQDEEMLELPAPAEVAAKNQSLEGDTTKGTSEMSEKRGPTSSNPRKRHREDSDVEMVEDDSRKEMTAACTPRRRIINLTSVLSLQEEINEQGHEVLREMLHNHSFVGCVNPQWALAQHQTKLYLLNTTKLSEELFYQILIYDFANFGVLRLSEPAPLFDLAMLALDSPESGWTEEDGPKEGLAEYIVEFLKKKAEMLADYFSLEIDEEGNLIGLPLLIDNYVPPLEGLPIFILRLATEVNWDEEKECFESLSKECAMFYSIRKQYISEESTLSGQQSEVPGSIPNSWKWTVEHIVYKALRSHILPPKHFTEDGNILQLANLPDLYKVFERC

SEQ ID NO: 7126 - protein, 551 aa, Homo sapiens
KPLLNHVLAIKGPRSRWRTFYNIATRRKALKNPSEEYGKILEVVGRYSVHNAGISFSVKKQGETVADVRTLPNASTVDNIRSIFGNAVSRELIEIGCEDKTLAFKMNGYISNANYSVKKCIFLLFINHRLVESTSLRKAIETVYAAYLPKNTHPFLYLSLEISPQNVDVNVHPTKHEVHFLHEESILERVQQHIESKLLGSNSSRMYFTQTLLPGLAGPSGEMVKSTTSLTSSSTSGSSDKVYAHQMVRTDSREQKLDAFLQPLSKPLSSQPQAIVTEDKTDISSGRARQQDEEMLELPAPAEVAAKNQSLEGDTTKGTSEMSEKRGPTSSNPRKRHREDSDVEMVEDDSRKEMTAACTPRRRIINLTSVLSLQEEINEQGHEVLREMLHNHSFVGCVNPQWALAQHQTKLYLLNTTKLSEELFYQILIYDFANFGVLRLSEPAPLFDLAMLALDSPESGWTEEDGPKEGLAEYIVEFLKKKAEMLADYFSLEIDESEVPGSIPNSWKWTVEHIVYKALRSHILPPKHFTEDGNILQLANLPDLYKVFERC

SEQ ID NO: 7127 - protein, 116 aa, Homo sapiens
MSEKRGPTSSNPRKRHREDSDVEMVEDDSRKEMTAACTPRRRIINLTSVLSLQEEINEQGHEVLREMLHNHSFVGCVNPQWALAQHQTKLYLLNTTKLRVKCLAPFQTPGSGLWNT

SEQ ID NO: 7128 - protein, 174 aa, Homo sapiens [sequence omitted]

SEQ ID NO: 7129 - protein, 658 aa, Homo sapiens
MAFEALASISHVAHVTITTKTADGKCAYRASYSDGKLKAPPKPCAGNQGTQITVEDLFYNIATRRKALKNPSEEYGKILEVVGRYSVHNAGISFSVKKQGETVADVRTLPNASTVDNIRSIFGNAVSRELIEIGCEDKTLAFKMNGYISNANYSVKKCIFLLFINHRLVESTSLRKAIETVYAAYLPKNTHPFLYLSLEISPQNVDVNVHPTKHEVHFLHEESILERVQQHIESKLLGSNSSRMYFTQTLLPGLAGPSGEMVKSTTSLTSSSTSGSSDKVYAHQMVRTDSREQKLDAFLQPLSKPLSSQPQAIVTEDKTDISSGRARQQDEEMLELPAPAEVAAKNQSLEGDTTKGTSEMSEKRGPTSSNPRKRHREDSDVEMVEDDSRKEMTAACTPRRRIINLTSVLSLQEEINEQGHEVLREMLHNHSFVGCVNPQWALAQHQTKLYLLNTTKLSEELFYQILIYDFANFGVLRLSEPAPLFDLAMLALDSPESGWTEEDGPKEGLAEYIVEFLKKKAEMLADYFSLEIDEEGNLIGLPLLIDNYVPPLEGLPIFILRLATEVNWDEEKECFESLSKECAMFYSIRKQYISEESTLSGQQSEVPGSIPNSWKWTVEHIVYKALRSHILPPKHFTEDGNILQLANLPDLYKVFERC

SEQ ID NO: 7130 - protein, 319 aa, Homo sapiens
MIENCLDAKSTSIQVIVKEGGLKLIQIQDNGTGIRKEDLDIVCERFTTSKLQSFEDLASISTYGFRGEALASISHVAHVTITTKTADGKCAYRASYSDGKLKAPPKPCAGNQGTQITVEDLFYNIATRRKALKNPSEEYGKILEVVGRYSVHNAGISFSVKKQGETVADVRTLPNASTVDNIRSIFGNAVSRELIEIGCEDKTLAFKMNGYISNANYSVKKCIFLLFINHRLVESTSLRKAIETVYAAYLPKNTHPFLYLSLEISPQNVDVNVHPTKHEVHFLHEESILERVQQHIESKLLGSNSSRMYFTQKETSGRF

SEQ ID NO: 7131 - protein, 515 aa, Homo sapiens
MNGYISNANYSVKKCIFLLFINHRLVESTSLRKAIETVYAAYLPKNTHPFLYLSLEISPQNVDVNVHPTKHEVHFLHEESILERVQQHIESKLLGSNSSRMYFTQTLLPGLAGPSGEMVKSTTSLTSSSTSGSSDKVYAHQMVRTDSREQKLDAFLQPLSKPLSSQPQAIVTEDKTDISSGRARQQDEEMLELPAPAEVAAKNQSLEGDTTKGTSEMSEKRGPTSSNPRKRHREDSDVEMVEDDSRKEMTAACTPRRRIINLTSVLSLQEEINEQGHEVLREMLHNHSFVGCVNPQWALAQHQTKLYLLNTTKLSEELFYQILIYDFANFGVLRLSEPAPLFDLAMLALDSPESGWTEEDGPKEGLAEYIVEFLKKKAEMLADYFSLEIDEEGNLIGLPLLIDNYVPPLEGLPIFILRLATEVNWDEEKECFESLSKECAMFYSIRKQYISEESTLSGQQSEVPGSIPNSWKWTVEHIVYKALRSHILPPKHFTEDGNILQLANLPDLYKVFERC

SEQ ID NO: 7132 - protein, 679 aa, Homo sapiens
  VARIANT 1: note = MOD_RES - Any amino acid
XRLDETVVNRIAAGEVIQRPANAIKEMIENCLDAKSTSIQVIVKEGGLKLIQIQDNGTGIRKEDLDIVCERFTTSKLQSFEDLASISTYGFRGEALASISHVAHVTITTKTADGKCAYRASYSDGKLKAPPKPCAGNQGTQITVEDLFYNIATRRKALKNPSEEYGKILEVVGRYSVHNAGISFSVKKQGETVADVRTLPNASTVDNIRSIFGNAVSRELIEIGCEDKTLAFKMNGYISNANYSVKKCIFLLFINHRLVESTSLRKAIETVYAAYLPKNTHPFLYLSLEISPQNVDVNVHPTKHEVHFLHEESILERVQQHIESKLLGSNSSRMYFTQTLLPGLAGPSGEMVKSTTSLTSSSTSGSSDKVYAHQMVRTDSREQKLDAFLQPLSKPLSSQPQAIVTEDKTDISSGRARQQDEEMLELPAPAEVAAKNQSLEGDTTKGTSEMSEKRGPTSSNPRKRHREDSDVEMVEDDSRKEMTAACTPRRRIINLTSVLSLQEEINEQGHEVLREMLHNHSFVGCVNPQWALAQHQTKLYLLNTTKLSEELFYQILIYDFANFGVLRLSEPAPLFDLAMLALDSPESGWTEEDGPKEGLAEYIVEFLKKKAEMLADYFSLEIDESEVPGSIPNSWKWTVEHIVYKALRSHILPPKHFTEDGNILQLANLPDLYKVFERC

SEQ ID NO: 7133 - protein, 515 aa, Homo sapiens; identical to SEQ ID NO: 7131

SEQ ID NO: 7134 - protein, 460 aa, Homo sapiens
MNGYISNANYSVKKCIFLLFINHRLVESTSLRKAIETVYAAYLPKNTHPFLYLSLEISPQNVDVNVHPTKHEVHFLHEESILERVQQHIESKLLGSNSSRMYFTQTLLPGLAGPSGEMVKSTTSLTSSSTSGSSDKVYAHQMVRTDSREQKLDAFLQPLSKPLSSQPQAIVTEDKTDISSGRARQQDEEMLELPAPAEVAAKNQSLEGDTTKGTSEMSEKRGPTSSNPRKRHREDSDVEMVEDDSRKEMTAACTPRRRIINLTSVLSLQEEINEQGHEVLREMLHNHSFVGCVNPQWALAQHQTKLYLLNTTKLSEELFYQILIYDFANFGVLRLSEPAPLFDLAMLALDSPESGWTEEDGPKEGLAEYIVEFLKKKAEMLADYFSLEIDEEGNLIGLPLLIDNYVPPLEGLPIFILRLATEVNWDEEKECFESLSKECAMFYSIRKQYISEESTLSGQQ

SEQ ID NO: 7135 - protein, 280 aa, Homo sapiens
MIENCLDAKSTSIQVIVKEGGLKLIQIQDNGTGIRKEDLDIVCERFTTSKLQSFEDLASISTYGFRGEALASISHVAHVTITTKTADGKCAYRASYSDGKLKAPPKPCAGNQGTQITVEDLFYNIATRRKALKNPSEEYGKILEVVGRYSVHNAGISFSVKKQGETVADVRTLPNASTVDNIRSIFGNAVSRELIEIGCEDKTLAFKMNGYISNANYSVKKCIFLLFINHRLVESTSLRKAIETVYAAYLPKNTHPFLYLRLCYQDLLAPLGRWLNPQQV

SEQ ID NO: 7136 - protein, 515 aa, Homo sapiens; identical to SEQ ID NO: 7131

SEQ ID NO: 7137 - protein, 1429 aa, Homo sapiens
MIKCLSVEVQAKLRSGLAISSLGQCVEELALNSIDAEAKCVAVRVNMETFQVQVIDNGFGMGSDDVEKVGNRYFTSKCHSVQDLENPRFYGFRGEALANIADMASAVEISSKKNRTMKTFVKLFQSGKALKACEADVTRASAGTTVTVYNLFYQLPVRRKCMDPRLEFEKVRQRIEALSLMHPSISFSLRNDVSGSMVLQLPKTKDVCSRFCQIYGLGKSQKLREISFKYKEFELSGYISSEAHYNKNMQFLFVNKRLVLRTKLHKLIDFLLRKESIICKPKNGPTSRQMNSSLRHRSTPELYGIYVINVQCQFCEYDVCMEPAKTLIEFQNWDTLLFCIQEGVKMFLKQEKLFVELSGEDIKEFSEDNGFSLFDATLQKRVTSDERSNFQEACNNILDSYEMFNLQSKAVKRKTTAENVNTQSSRDSEATRKNTNDAFLYIYESGGPGHSKMTEPSLQNKDSSCSESKMLEQETIVASEAGENEKHKKSFLEHSSLENPCGTSLEMFLSPFQTPCHFEESGQDLEIWKESTTVNGMAANILKNNRIQNQPKRFKDATEVGCQPLPFATTLWGVHSAQTEKEKKKESSNCGRRNVFSYGRVKLCSTGFITHVVQNEKTKSTETEHSFKNYVRPGPTRAQETFGNRTRHSVETPDIKDLASTLSKESGQLPNKKNCRTNISYGLENEPTATYTMFSAFQEGSKKSQTDCILSDTSPSFPWYRHVSNDSRKTDKLIGFSKPIVRKKLSLSSQLGSLEKFKRQYGKVENPLDTEVEESNGVTTNLSLQVEPDILLKDKNRLENSDVCKITTMEHSDSDSSCQPASHILNSEKFPFSKDEDCLEQQMPSLRESPMTLKELSLFNRKPLDLEKSSESLASKLSRLKGSERETQTMGMMSRFNELPNSDSSRKDSKLCSVLTQDFCMLFNNKHEKTENGVIPTSDSATQDNSFNKNSKTHSNSNTTENCVISETPLVLPYNNSKVTGKDSDVLIRASEQQIGSLDSPSGMLMNPVEDATGDQNGICFQSEESKARACSETEESNTCCSDWQRHFDVALGRMVYVNKMTGLSTFIAPTEDIQAACTKDLTTVAVDVVLENGSQYRCQPFRSDLVLPFLPRARAERTVMRQDNRDTVDDTVSSESLQSLFSEWDNPVFARYPEVAVDVSSGQAESLAVKIHNILYPYRFTKGMIHSMQVLQQVDNKFIACLMSTKTEENGEADSYEKQQAQGSGRKKLLSSTLIPPLEITVTEEQRRLLWCYHKNLEDLGLEFVFPDTSDSLVLVGKVPLCFVEREANELRRGRSTVTKSIVEEFIREQLELLQTTGGIQGTLPLTVQKVLASQACHGAIKFNDGLSLQESCRLIEALSSCQLPFQCAHGRPSMLPLADIDHLEQEKQIKPNLTKLRKMAQAWRLFGKAECDTRQSLQQSMPPCEPP

SEQ ID NO: 7138 - protein, 1453 aa, Homo sapiens
MIKCLSVEVQAKLRSGLAISSLGQCVEELALNSIDAEAKCVAVRVNMETFQVQVIDNGFGMGSDDVEKVGNRYFTSKCHSVQDLENPRFYGFRGEALANIADMASAVEISSKKNRTMKTFVKLFQSGKALKACEADVTRASAGTTVTVYNLFYQLPVRRKCMDPRLEFEKVRQRIEALSLMHPSISFSLRNDVSGSMVLQLPKTKDVCSRFCQIYGLGKSQKLREISFKYKEFELSGYISSEAHYNKNMQFLFVNKRLVLRTKLHKLIDFLLRKESIICKPKNGPTSRQMNSSLRHRSTPELYGIYVINVQCQFCEYDVCMEPAKTLIEFQNWDTLLFCIQEGVKMFLKQEKLFVELSGEDIKEFSEDNGFSLFDATLQKRVTSDERSNFQEACNNILDSYEMFNLQSKAVKRKTTAENVNTQSSRDSEATRKNTNDAFLYIYESGGPGHSKMTEPSLQNKDSSCSESKMLEQETIVASEAGENEKHKKSFLEHSSLENPCGTSLEMFLSPFQTPCHFEESGQDLEIWKESTTVNGMAANILKNNRIQNQPKRFKDATEVGCQPLPFATTLWGVHSAQTEKEKKKESSNCGRRNVFSYGRVKLCSTGFITHVVQNEKTKSTETEHSFKNYVRPGPTRAQETFGNRTRHSVETPDIKDLASTLSKESGQLPNKKNCRTNISYGLENEPTATYTMFSAFQEGSKKSQTDCILSDTSPSFPWYRHVSNDSRKTDKLIGFSKPIVRKKLSLSSQLGSLEKFKRQYGKVENPLDTEVEESNGVTTNLSLQVEPDILLKDKNRLENSDVCKITTMEHSDSDSSCQPASHILNSEKFPFSKDEDCLEQQMPSLRESPMTLKELSLFNRKPLDLEKSSESLASKLSRLKGSERETQTMGMMSRFNELPNSDSSRKDSKLCSVLTQDFCMLFNNKHEKTENGVIPTSDSATQDNSFNKNSKTHSNSNTTENCVISETPLVLPYNNSKVTGKDSDVLIRASEQQIGSLDSPSGMLMNPVEDATGDQNGICFQSEESKARACSETEESNTCCSDWQRHFDVALGRMVYVNKMTGLSTFIAPTEDIQAACTKDLTTVAVDVVLENGSQYRCQPFRSDLVLPFLPRARAERTVMRQDNRDTVDDTVSSESLQSLFSEWDNPVFARYPEVAVDVSSGQAESLAVKIHNILYPYRFTKGMIHSMQVLQQVDNKFIACLMSTKTEENGEAGGNLLVLVDQHAAHERIRLEQLIIDSYEKQQAQGSGRKKLLSSTLIPPLEITVTEEQRRLLWCYHKNLEDLGLEFVFPDTSDSLVLVGKVPLCFVEREANELRRGRSTVTKSIVEEFIREQLELLQTTGGIQGTLPLTVQKVLASQACHGAIKFNDGLSLQESCRLIEALSSCQLPFQCAHGRPSMLPLADIDHLEQEKQIKPNLTKLRKMAQAWRLFGKAECDTRQSLQQSMPPCEPP

SEQ ID NO: 7139 - protein, 391 aa, Homo sapiens
MVYVNKMTGLSTFIAPTEDIQAACTKDLTTVAVDVVLENGSQYRCQPFRSDLVLPFLPRARAERTVMRQDNRDTVDDTVSSESLQSLFSEWDNPVFARYPEVAVDVSSGQAESLAVKIHNILYPYRFTKGMIHSMQVLQQVDNKFIACLMSTKTEENGEAGGNLLVLVDQHAAHERIRLEQLIIDSYEKQQAQGSGRKKLLSSTLIPPLEITVTEEQRRLLWCYHKNLEDLGLEFVFPDTSDSLVLVGKVPLCFVEREANELRRGRSTVTKSIVELLQTTGGIQGTLPLTVQKVLASQACHGAIKFNDGLSLQESCRLIEALSSCQLPFQCAHGRPSMLPLADIDHLEQEKQIKPNLTKLRKMAQAWRLFGKAECDTRQSLQQSMPPCEPP

SEQ ID NO: 7140 - protein, 198 aa, Homo sapiens
MNPVEDATGDQNGICFQSEESKARACSETEESNTCCSDWQRHFDVALGRMVYVNKMTGLSTFIAPTEDIQAACTKDLTTVAVDVVLENGSQYRCQPFRSDLVLPFLPRARAERTVMRQDNRDTVDDTVSSESLQSLFSEWDNPVFARYPEVLQQVDNKFIACLMSTKTEENGEAAELMMLQDPCCRQSREDENHEFSL

SEQ ID NO: 7141 - protein, 162 aa, Homo sapiens
MIKCLSVEVQAKLRSGLAISSLGQCVEELALNSIDAEAKCVAVRVNMETFQVQVIDNGFGMGSDDVEKVGNRYFTSKCHSVQDLENPRFYGFRGEALANIADMASAVEISSKKNRTMKTFVKLFQSGKALKACEADVTRASAGTTVTVYNLFYQLPVRRKCM

SEQ ID NO: 7142 - protein, 1453 aa, Homo sapiens; identical to SEQ ID NO: 7138

SEQ ID NO: 7143 - protein, 106 aa, Homo sapiens
MIKCLSVEVQAKLRSGLAISSLGQCVEELALNSIDAEAKCVAVRVNMETFQVQVIDNGFGMGSDDVEKVGNRYFTSKCHSVQDLENPRFYGFRGEALANIADMASA

SEQ ID NO: 7144 - protein, 934 aa, Homo sapiens [sequence omitted]

SEQ ID NO: 7145 - protein, 341 aa, Homo sapiens [sequence omitted]

SEQ ID NO: 7146 - protein, 921 aa, Homo sapiens
MAVQPKETLQLESAAEVGFVRFFQGMPEKPTTTVRLFDRGDFYTAHGEDALLAAREVFKTQGVIKYMGPAGAKNLQSVVLSKMNFESFVKDLLLVRQYRVEVYKNRAGNKASKENDWYLAYKASPGNLSQFEDILFGNNDMSASIGVVGVKMSAVDGQRQVGVGYVDSIQRKLGLCEFPDNDQFSNLEALLIQIGPKECVLPGGETAGDMGKLRQIIQRGGILITERKKADFSTKDIYQDLNRLLKGKKGEQMNSAVLPEMENQVAVSSLSAVIKFLELLSDDSNFGQFELTTFDFSQYMKLDIAAVRALNLFQGSVEDTTGSQSLAALLNKCKTPQGQRLVNQWIKQPLMDKNRIEERLNLVEAFVEDAELRQTLQEDLLRRFPDLNRLAKKFQRQAANLQDCYRLYQGINQLPNVIQALEKHEGKHQKLLLAVFVTPLTDLRSDFSKFQEMIETTLDMDQVENHEFLVKPSFDPNLSELREIMNDLEKKMQSTLISAARDLGLDPGKQIKLDSSAQFGYYFRVTCKEEKVLRNNKNFSTVDIQKNGVKFTNSKLTSLNEEYTKNKTEYEEAQDAIVKEIVNISSGYVEPMQTLNDVLAQLDAVVSFAHVSNGAPVPYVRPAILEKGQGRIILKASRHACVEVQDEIAFIPNDVYFEKDKQMFHIITGPNMGGKSTYIRQTGVIVLMAQIGCFVPCESAEVSIVDCILARVGAGDSQLKGVSTFMAEMLETASILRSATKDSLIIIDELGRGTSTYDGFGLAWAISEYIATKIGAFCMFATHFHELTALANQIPTVNNLHVTALTTEETLTMLYQVKKGVCDQSFGIHVAELANFPKHVIECAKQKALELEEFQYIGESQGYDIMEPAAKKCYLERENLRVTEPKDQCLILLTWKRKLRGGKRSACSRPERQNQGSGELS

SEQ ID NO: 7147 - protein, 720 aa, Homo sapiens
MIGIWHIRLLLAISLSLKTFSLVTMICQLPLVLWVLKCPQLMARDMGKLRQIIQRGGILITERKKADFSTKDIYQDLNRLLKGKKGEQMNSAVLPEMENQGSVEDTTGSQSLAALLNKCKTPQGQRLVNQWIKQPLMDKNRIEERLNLVEAFVEDAELRQTLQEDLLRRFPDLNRLAKKFQRQAANLQDCYRLYQGINQLPNVIQALEKHEGKHQKLLLAVFVTPLTDLRSDFSKFQEMIETTLDMDQVENHEFLVKPSFDPNLSELREIMNDLEKKMQSTLISAARDLGLDPGKQIKLDSSAQFGYYFRVTCKEEKVLRNNKNFSTVDIQKNGVKFTNSKLTSLNEEYTKNKTEYEEAQDAIVKEIVNISSGYVEPMQTLNDVLAQLDAVVSFAHVSNGAPVPYVRPAILEKGQGRIILKASRHACVEVQDEIAFIPNDVYFEKDKQMFHIITGPNMGGKSTYIRQTGVIVLMAQIGCFVPCESAEVSIVDCILARVGAGDSQLKGVSTFMAEMLETASILRSATKDSLIIIDELGRGTSTYDGFGLAWAISEYIATKIGAFCMFATHFHELTALANQIPTVNNLHVTALTTEETLTMLYQVKKGVCDQSFGIHVAELANFPKHVIECAKQKALELEEFQYIGESQGYDIMEPAAKKCYLEREQGEKIIQEFLSKVKQMPFTEMSEENITIKLKQLKAEVIAKNNSFVNEIISRIKVTT

SEQ ID NO: 7148 - protein, 810 aa, Homo sapiens
MAVQPKETLQLESAAEVGFVRFFQGMPEKPTTTVRLFDRGDFYTAHGEDALLAAREVFKTQGVIKYMGPAGAKNLQSVVLSKMNFESFVKDLLLVRQYRVEVYKNRAGNKASKENDWYLAYKASPGNLSQFEDILFGNNDMSASIGVVGVKMSAVDGQRQVGVGYVDSIQRKLGLCEFPDNDQFSNLEALLIQIGPKECVLPGGETAGDMGKLRQIIQRGGILITERKKADFSTKDIYQDLNRLLKGKKGEQMNSAVLPEMENQVAVSSLSAVIKFLELLSDDSNFGQFELTTFDFSQYMKLDIAAVRALNLFQGSVEDTTGSQSLAALLNKCKTPQGQRLVNQWIKQPLMDKNRIEERLNLVEAFVEDAELRQTLQEDLLRRFPDLNRLAKKFQRQAANLQDCYRLYQGINQLPNVIQALEKHEGKHQKLLLAVFVTPLTDLRSDFSKFQEMIETTLDMDQVENHEFLVKPSFDPNLSELREIMNDLEKKMQSTLISAARDLGLDPGKQIKLDSSAQFGYYFRVTCKEEKVLRNNKNFSTVDIQKNGVKFTNSKLTSLNEEYTKNKTEYEEAQDAIVKEIVNISSGYVEPMQTLNDVLAQLDAVVSFAHVSNGAPVPYVRPAILEKGQGRIILKASRHACVEVQDEIAFIPNDVYFEKDKQMFHIITGPNMGGKSTYIRQTGVIVLMAQIGCFVPCESAEVSIVDCILARVGAGDSQLKGVSTFMAEMLETASILRSATKDSLIIIDELGRGTSTYDGFGLAWAISEYIATKIGAFCMFATIFMNLLPWPIRYQLLIIYMSQHSPLKRP

SEQ ID NO: 7149 - protein, 168 aa, Homo sapiens
MDKNRIEERLNLVEAFVEDAELRQTLQEDLLRRFPDLNRLAKKFQRQAANLQDCYRLYQGINQLPNVIQALEKHEGKHQKLLLAVFVTPLTDLRSDFSKFQEMIETTLDMDQVENHEFLVKPSFDPNLSELREIMNDLEKKMQSTLISAARDLGGSLQPRSSRLACAT

SEQ ID NO: 7150 - protein, 533 aa, Homo sapiens
MAVQPKETLQLESAAEVGFVRFFQGMPEKPTTTVRLFDRGDFYTAHGEDALLAAREVFKTQGVIKYMGPAGAKNLQSVVLSKMNFESFVKDLLLVRQYRVEVYKNRAGNKASKENDWYLAYKASPGNLSQFEDILFGNNDMSASIGVVGVKMSAVDGQRQVGVGYVDSIQRKLGLCEFPDNDQFSNLEALLIQIGPKECVLPGGETAGDMGKLRQIIQRGGILITERKKADFSTKDIYQDLNRLLKGKKGEQMNSAVLPEMENQVAVSSLSAVIKFLELLSDDSNFGQFELTTFDFSQYMKLDIAAVRALNLFQGSVEDTTGSQSLAALLNKCKTPQGQRLVNQWIKQPLMDKNRIEERLNLVEAFVEDAELRQTLQEDLLRRFPDLNRLAKKFQRQAANLQDCYRLYQGINQLPNVIQALEKHEGKHQKLLLAVFVTPLTDLRSDFSKFQEMIETTLDMDQVENHEFLVKPSFDPNLSELREIMNDLEKKMQSTLISAARDLGLDPGKQIKLDSSAQFGYYFRVTCKEKSPS

SEQ ID NO: 7151 - protein, 410 aa, Homo sapiens
MAVQPKETLQLESAAEVGFVRFFQGMPEKPTTTVRLFDRGDFYTAHGEDALLAAREVFKTQGVIKYMGPAGAKNLQSVVLSKMNFESFVKDLLLVRQYRVEVYKNRAGNKASKENDWYLAYKASPGNLSQFEDILFGNNDMSASIGVVGVKMSAVDGQRQVGVGYVDSIQRKLGLCEFPDNDQFSNLEALLIQIGPKECVLPGGETAGDMGKLRQIIQRGGILITERKKADFSTKDIYQDLNRLLKGKKGEQMNSAVLPEMENQVAVSSLSAVIKFLELLSDDSNFGQFELTTFDFSQYMKLDIAAVRALNLFQGSVEDTTGSQSLAALLNKCKTPQGQRLVNQWIKQPLMDKNRIEERLNLVEAFVEDAELRQTLQEDYFVDSQILTDLPRSFKDKQQTYKIVTDSIRV

SEQ ID NO: 7152 - protein, 485 aa, Homo sapiens
MAVQPKETLQLESAAEVGFVRFFQGMPEKPTTTVRLFDRGDFYTAHGEDALLAAREVFKTQGVIKYMGPAGAKNLQSVVLSKMNFESFVKDLLLVRQYRVEVYKNRAGNKASKENDWYLAYKASPGNLSQFEDILFGNNDMSASIGVVGVKMSAVDGQRQVGVGYVDSIQRKLGLCEFPDNDQFSNLEALLIQIGPKECVLPGGETAGDMGKLRQIIQRGGILITERKKADFSTKDIYQDLNRLLKGKKGEQMNSAVLPEMENQVAVSSLSAVIKFLELLSDDSNFGQFELTTFDFSQYMKLDIAAVRALNLFQGSVEDTTGSQSLAALLNKCKTPQGQRLVNQWIKQPLMDKNRIEERLNLVEAFVEDAELRQTLQEDLLRRFPDLNRLAKKFQRQAANLQDCYRLYQGINQLPNVIQALEKHEGKHQKLLLAVFVTPLTDLRSDFSKFQEMIETTLDMDQVENHEFLVKPSFDPNLSELRNNE

SEQ ID NO: 7153 - protein, 868 aa, Homo sapiens
MGPAGAKNLQSVVLSKMNFESFVKDLLLVRQYRVEVYKNRAGNKASKENDWYLAYKASPGNLSQFEDILFGNNDMSASIGVVGVKMSAVDGQRQVGVGYVDSIQRKLGLCEFPDNDQFSNLEALLIQIGPKECVLPGGETAGDMGKLRQIIQRGGILITERKKADFSTKDIYQDLNRLLKGKKGEQMNSAVLPEMENQVAVSSLSAVIKFLELLSDDSNFGQFELTTFDFSQYMKLDIAAVRALNLFQGSVEDTTGSQSLAALLNKCKTPQGQRLVNQWIKQPLMDKNRIEERLNLVEAFVEDAELRQTLQEDLLRRFPDLNRLAKKFQRQAANLQDCYRLYQGINQLPNVIQALEKHEGKHQKLLLAVFVTPLTDLRSDFSKFQEMIETTLDMDQVENHEFLVKPSFDPNLSELREIMNDLEKKMQSTLISAARDLGLDPGKQIKLDSSAQFGYYFRVTCKEEKVLRNNKNFSTVDIQKNGVKFTNSKLTSLNEEYTKNKTEYEEAQDAIVKEIVNISSGYVEPMQTLNDVLAQLDAVVSFAHVSNGAPVPYVRPAILEKGQGRIILKASRHACVEVQDEIAFIPNDVYFEKDKQMFHIITGPNMGGKSTYIRQTGVIVLMAQIGCFVPCESAEVSIVDCILARVGAGDSQLKGVSTFMAEMLETASILRSATKDSLIIIDELGRGTSTYDGFGLAWAISEYIATKIGAFCMFATHFHELTALANQIPTVNNLHVTALTTEETLTMLYQVKKGVCDQSFGIHVAELANFPKHVIECAKQKALELEEFQYIGESQGYDIMEPAAKKCYLEREQGEKIIQEFLSKVKQMPFTEMSEENITIKLKQLKAEVIAKNNSFVNEIISRIKVTT

SEQ ID NO: 7154 - protein, 1137 aa, Homo sapiens
MSRRKPASGGLAASSSAPARQAVLSRFFQSTGSLKSTSSSTGAADQVDPGAAAAAAAAAAAAPPAPPAPAFPPQLPPHIATEIDRRKKRPLENDGPVKKKVKKVQQKEGGSDLGMSGNSEPKKCLRTRNVSKSLEKLKEFCCDSALPQSRVQTESLQERFAVLPKCTDFDDISLLHAKNAVSSEDSKRQINQKDTTLFDLSQFGSSNTSHENLQKTASKSANKRSKSIYTPLELQYIEMKQQHKDAVLCVECGYKYRFFGEDAEIAARELNIYCHLDHNFMTASIPTHRLFVHVRRLVAKGYKVGVVKQTETAALKAIGDNRSSLFSRKLTALYTKSTLIGEDVNPLIKLDDAVNVDEIMTDTSTSYLLCISENKENVRDKKKGNIFIGIVGVQPATGEVVFDSFQDSASRSELETRMSSLQPVELLLPSALSEQTEALIHRATSVSVQDDRIRVERMDNIYFEYSHAFQAVTEFYAKDTVDIKGSQIISGIVNLEKPVICSLAAIIKYLKEFNLEKMLSKPENFKQLSSKMEFMTINGTTLRNLEILQNQTDMKTKGSLLWVLDHTKTSFGRRKLKKWVTQPLLKLREINARLDAVSEVLHSESSVFGQIENHLRKLPDIERGLCSIYHKKCSTQEFFLIVKTLYHLKSEFQAIIPAVNSHIQSDLLRTVILEIPELLSPVEHYLKILNEQAAKVGDKTELFKDLSDFPLIKKRKDEIQGVIDEIRMHLQEIRKILKNPSAQYVTVSGQEFMIEIKNSAVSCIPTDWVKVGSTKAVSRFHSPFIVENYRHLNQLREQLVLDCSAEWLDFLEKFSEHYHSLCKAVHHLATVDCIFSLAKVAKQGDYCRPTVQEERKIVIKNGRHPVIDVLLGEQDQYVPNNTDLSEDSERVMIITGPNMGGKSSYIKQVALITIMAQIGSYVPAEEATIGIVDGIFTRMGAADNIYKGQSTFMEELTDTAEIIRKATSQSLVILDELGRGTSTHDGIAIAYATLEYFIRDVKSLTLFVTHYPPVCELEKNYSHQVGNYHMGFLVSEDESKLDPGAAEQVPDFVTFLYQITRGIAARSYGLNVAKLADVPGEILKKAAHKSKELEGLINTKRKRLKYFAKLWTMHNAQDLQKWTEEFNMEETQTSLLH

SEQ ID NO: 7155 - protein, 1128 aa, Homo sapiens
MSRRKPASGGLAASSSAPARQAVLSRFFQSTGSLKSTSSSTGAADQVDPGAAAAAAPPAPAFPPQLPPHIATEIDRRKKRPLENDGPVKKKVKKVQQKEGGSDLGMSGNSEPKKCLRTRNVSKSLEKLKEFCCDSALPQSRVQTESLQERFAVLPKCTDFDDISLLHAKNAVSSEDSKRQINQKDTTLFDLSQFGSSNTSHENLQKTASKSANKRSKSIYTPLELQYIEMKQQHKDAVLCVECGYKYRFFGEDAEIAARELNIYCHLDHNFMTASIPTHRLFVHVRRLVAKGYKVGVVKQTETAALKAIGDNRSSLFSRKLTALYTKSTLIGEDVNPLIKLDDAVNVDEIMTDTSTSYLLCISENKENVRDKKKGNIFIGIVGVQPATGEVVFDSFQDSASRSELETRMSSLQPVELLLPSALSEQTEALIHRATSVSVQDDRIRVERMDNIYFEYSHAFQAVTEFYAKDTVDIKGSQIISGIVNLEKPVICSLAAIIKYLKEFNLEKMLSKPENFKQLSSKMEFMTINGTTLRNLEILQNQTDMKTKGSLLWVLDHTKTSFGRRKLKKWVTQPLLKLREINARLDAVSEVLHSESSVFGQIENHLRKLPDIERGLCSIYHKKCSTQEFFLIVKTLYHLKSEFQAIIPAVNSHIQSDLLRTVILEIPELLSPVEHYLKILNEQAAKVGDKTELFKDLSDFPLIKKRKDEIQGVIDEIRMHLQEIRKILKNPSAQYVTVSGQEFMIEIKNSAVSCIPTDWVKVGSTKAVSRFHSPFIVENYRHLNQLREQLVLDCSAEWLDFLEKFSEHYHSLCKAVHHLATVDCIFSLAKVAKQGDYCRPTVQEERKIVIKNGRHPVIDVLLGEQDQYVPNNTDLSEDSERVMIITGPNMGGKSSYIKQVALITIMAQIGSYVPAEEATIGIVDGIFTRMGAADNIYKGQSTFMEELTDTAEIIRKATSQSLVILDELGRGTSTHDGIAIAYATLEYFIRDVKSLTLFVTHYPPVCELEKNYSHQVGNYHMGFLVSEDESKLDPGAAEQVPDFVTFLYQITRGIAARSYGLNVAKLADVPGEILKKAAHKSKELEGLINTKRKRLKYFAKLWTMHNAQDLQKWTEEFNMEETQTSLLH

SEQ ID NO: 7156 - protein, 936 aa, Homo sapiens
MLRPEISSTSPSAPAVSPSSGETRSPQGPRYNFGLQETPQSRPSVQVVSASTCPGTSGAAGDRSSSSSSLPCPAPNSRPAQGSYFGNKRAYAENTVASNFTFGASSSSARDTNYPQTLKTPLSTGNPQRSGYKSWTPQVGYSASSSSAISAHSPSVIVAVVEGRGLARGEIGMASIDLKNPQIILSQFADNTTYAKVITKLKILSPLEIIMSNTACAVGNSTKLFTLITENFKNVNFTTIQRKYFNETKGLEYIEQLCIAEFSTVLMEVQSKYYCLAAVAALLKYVEFIQNSVYAPKSLKICFQGSEQTAMIDSSSAQNLELLINNQDYRNNHTLFGVLNYTKTPGGSRRLRSNILEPLVDIETINMRLDCVQELLQDEELFFGLQSVISRFLDTEQLLSVLVQIPKQDTVNAAESKITNLIYLKHTLELVDPLKIAMKNCNTPLLRAYYGSLEDKRFGIILEKIKTVINDDARYMKGCLNMRTQKCYAVRSNINEFLDIARRTYTEIVDDIAGMISQLGEKYSLPLRTSFSSARGFFIQMTTDCIALPSDQLPSEFIKISKVKNSYSFTSADLIKMNERCQESLREIYHMTYMIVCKLLSEIYEHIHCLYKLSDTVSMLDMLLSFAHACTLSDYVRPEFTDTLAIKQGWHPILEKISAEKPIANNTYVTEGSNFLIITGPNMSGKSTYLKQIALCQIMAQIGSYVPAEYSSFRIAKQIFTRISTDDDIETNSSTFMKEMKEIAYILHNANDKSLILIDELGRGTNTEEGIGICYAVCEYLLSLKAFTLFATHFLELCHIDALYPNVENMHFEVQHVKNTSRNKEAILYTYKLSKGLTEEKNYGLKAAEVSSLPPSIVLDAKEITTQITRQILQNQRSTPEMERQRAVYHLATRLVQTARNSQLDPDSLRIYLSNLKKKYKEDFPRTEQVPEKTEE

SEQ ID NO: 7157 - protein, 270 aa, Homo sapiens
MASLGANPRRTPQGPRPGAASSGFPSPAPVPGPREAEEEEVEEEEELAEIHLCVLWNSGYLGIAYYDTSDSTIHFMPDAPDHESLKLLQRVLDEINPQSVVTSAKQDENMTRFLGKLASQEHREPKRPEIIFLPSVDFGLEISKQRLLSGNYSFIPDAMTATEKILFLSSIIPFDCLLTVRALGGLLKFLGRRRIGVELEDYNVSVPILGFKKFMLTHLVNIDQDTYSVLQIFKSESHPSVYKVASGLKEGLSLFGILNRCHCKWGEKLL

SEQ ID NO: 7158 - protein, 270 aa, Homo sapiens; identical to SEQ ID NO: 7157

SEQ ID NO: 7159 - protein, 194 aa, Homo sapiens
MASLGANPRRTPQGPRPGAASSGFPSPAPVPGPREAEEEEVEEEEELAEIHLCVLWNSGYLGIAYYDTSDSTIHFMPDAPDHESLKLLQRVLDEINPQSVVTSAKQDENMTRFLGKLASQEHREPKRPEIIFLPSVDFGLEISKQRLLSGNYSFIPDAMTATEKILFLSSIIPFDCLLTVRALGGLLKFLGRRR

SEQ ID NO: 7160 - protein, 270 aa, Homo sapiens; identical to SEQ ID NO: 7157

SEQ ID NO: 7161 - protein, 287 aa, Homo sapiens
MASLGANPRRTPQGPRPGAASSGFPSPAPVPGPREAEEEEVEEEEELAEIHLCVLWNSGYLGIAYYDTSDSTIHFMPDAPDHESLKLLQRVLDEINPQSVVTSAKQDENMTRFLGKLASQEHREPKRPEIIFLPSVDFGLEISKQRLLSGNYSFIPDAMTATEKILFLSSIIPFDCLLTPPGDLRFTPIPLLIPSQVRALGGLLKFLGRRRIGVELEDYNVSVPILGFKKFMLTHLVNIDQDTYSVLQIFKSESHPSVYKVASGLKEGLSLFGILNRCHCKWGEKLL

SEQ ID NO: 7162 - protein, 107 aa, Homo sapiens
KILFLSSIIPFDCLLTVRALGGLLKFLGRRRIGVELEDYNVSVPILGFKKFMLTHLVNIDQDTYSVLQIFKSESHPSVYKVASGLKEGLSLFGILNRCHCKWGEKLL

SEQ ID NO: 7163 - protein, 254 aa, Homo sapiens
MASLGANPRRTPQGPRPGAASSGFPSPAPVPGPREAEEEEVEEEEELAEIHLCVLWNSGYLGIAYYDTSDSTIHFMPDAPDHESLKLLQRVLDEINPQSVVTSAKQDENMTRFLGKLASQEHREPKRPEIIFLPSVDFGLEISKQRLLSGNYSFIPDAMTATEKILFLSSIIPFDCLLTVRALGGLLKFLGRRRIGVELEDYNVSVPILGFKKFMLTHLVNIDQDTYRLECNGAISAQCNLCLLGSSDSPASAS

SEQ ID NO: 7164 - protein, 1360 aa, Homo sapiens
MSRQSTLYSFFPKSPALSDANKASARASREGGRAAAAPGASPSPGGDAAWSEAGPGPRPLARSASPPKAKNLNGGLRRSVAPAAPTSCDFSPGDLVWAKMEGYPWWPCLVYNHPFDGTFIREKGKSVRVHVQFFDDSPTRGWVSKRLLKPYTGSKSKEAQKGGHFYSAKPEILRAMQRADEALNKDKIKRLELAVCDEPSEPEEEEEMEVGTTYVTDKSEEDNEIESEEEVQPKTQGSRRSSRQIKKRRVISDSESDIGGSDVEFKPDTKEEGSSDEISSGVGDSESEGLNSPVKVARKRKRMVTGNGSLKRKSSRKETPSATKQATSISSETKNTLRAFSAPQNSESQAHVSGGGDDSSRPTVWYHETLEWLKEEKRRDEHRRRPDHPDFDASTLYVPEDFLNSCTPGMRKWWQIKSQNFDLVICYKVGKFYELYHMDALIGVSELGLVFMKGNWAHSGFPEIAFGRYSDSLVQKGYKVARVEQTETPEMMEARCRKMAHISKYDRVVRREICRIITKGTQTYSVLEGDPSENYSKYLLSLKEKEEDSSGHTRAYGVCFVDTSLGKFFIGQFSDDRHCSRFRTLVAHYPPVQVLFEKGNLSKETKTILKSSLSCSLQEGLIPGSQFWDASKTLRTLLEEEYFREKLSDGIGVMLPQVLKGMTSESDSIGLTPGEKSELALSALGGCVFYLKKCLIDQELLSMANFEEYIPLDSDTVSTTRSGAIFTKAYQRMVLDAVTLNNLEIFLNGTNGSTEGTLLERVDTCHTPFGKRLLKQWLCAPLCNHYAINDRLDAIEDLMVVPDKISEVVELLKKLPDLERLLSKIHNVGSPLKSQNHPDSRAIMYEETTYSKKKIIDFLSALEGFKVMCKIIGIMEEVADGFKSKILKQVISLQTKNPEGRFPDLTVELNRWDTAFDHEKARKTGLITPKAGFDSDYDQALADIRENEQSLLEYLEKQRNRIGCRTIVYWGIGRNRYQLEIPENFTTRNLPEEYELKSTKKGCKRYWTKTIEKKLANLINAEERRDVSLKDCMRRLFYNFDKNYKDWQSAVECIAVLDVLLCLANYSRGGDGPMCRPVILLPEDTPPFLELKGSRHPCITKTFFGDDFIPNDILIGCEEEEQENGKAYCVLVTGPNMGGKSTLMRQAGLLAVMAQMGCYVPAEVCRLTPIDRVFTRLGASDRIMSGESTFFVELSETASILMHATAHSLVLVDELGRGTATFDGTAIANAVVKELAETIKCRTLFSTHYHSLVEDYSQNVAVRLGHMACMVENECEDPSQETITFLYKFIKGACPKSYGFNAARLANLPEEVIQKGHRKAREFEKMNQSLRLFREVCLASERSTVDAEAVHKLLTLIKEL

SEQ ID NO: 7165 - protein, 252 aa, Homo sapiens
MSRQSTLYSFFPKSPALSDANKASARASREGGRAAAAPGASPSPGGDAAWSEAGPGPRPLARSASPPKAKNLNGGLRRSVAPAAPTSCDFSPGDLVWAKMEGYPWWPCLVYNHPFDGTFIREKGKSVRVHVQFFDDSPTRGWVSKRLLKPYTGSKSKEAQKGGHFYSAKPEILRAMQRADEALNKDKIKRLELAVCDEPSEPEEEEEMEVGTTYVTDKSEEDNEIESEEEVQPKTQGSRRSSRQIKKRRKKR

SEQ ID NO: 7166 - protein, 1058 aa, Homo sapiens
MVTGNGSLKRKSSRKETPSATKQATSISSETKNTLRAFSAPQNSESQAHVSGGGDDSSRPTVWYHETLEWLKEEKRRDEHRRRPDHPDFDASTLYVPEDFLNSCTPGMRKWWQIKSQNFDLVICYKVGKFYELYHMDALIGVSELGLVFMKGNWAHSGFPEIAFGRYSDSLVQKGYKVARVEQTETPEMMEARCRKMAHISKYDRVVRREICRIITKGTQTYSVLEGDPSENYSKYLLSLKEKEEDSSGHTRAYGVCFVDTSLGKFFIGQFSDDRHCSRFRTLVAHYPPVQVLFEKGNLSKETKTILKSSLSCSLQEGLIPGSQFWDASKTLRTLLEEEYFREKLSDGIGVMLPQVLKGMTSESDSIGLTPGEKSELALSALGGCVFYLKKCLIDQELLSMANFEEYIPLDSDTVSTTRSGAIFTKAYQRMVLDAVTLNNLEIFLNGTNGSTEGTLLERVDTCHTPFGKRLLKQWLCAPLCNHYAINDRLDAIEDLMVVPDKISEVVELLKKLPDLERLLSKIHNVGSPLKSQNHPDSRAIMYEETTYSKKKIIDFLSALEGFKVMCKIIGIMEEVADGFKSKILKQVISLQTKNPEGRFPDLTVELNRWDTAFDHEKARKTGLITPKAGFDSDYDQALADIRENEQSLLEYLEKQRNRIGCRTIVYWGIGRNRYQLEIPENFTTRNLPEEYELKSTKKGCKRYWTKTIEKKLANLINAEERRDVSLKDCMRRLFYNFDKNYKDWQSAVECIAVLDVLLCLANYSRGGDGPMCRPVILLPEDTPPFLELKGSRHPCITKTFFGDDFIPNDILIGCEEEEQENGKAYCVLVTGPNMGGKSTLMRQAGLLAVMAQMGCYVPAEVCRLTPIDRVFTRLGASDRIMSGESTFFVELSETASILMHATAHSLVLVDELGRGTATFDGTAIANAVVKELAETIKCRTLFSTHYHSLVEDYSQNVAVRLGHMACMVENECEDPSQETITFLYKFIKGACPKSYGFNAARLANLPEEVIQKGHRKAREFEKMNQSLRLFREVCLASERSTVDAEAVHKLLTLIKEL

SEQ ID NO: 7167 - protein, 1230 aa, Homo sapiens
MSRQSTLYSFFPKSPALSDANKASARASREGGRAAAAPGASPSPGGDAAWSEAGPGPRPLARSASPPKAKNLNGGLRRSVGTTYVTDKSEEDNEIESEEEVQPKTQGSRRSSRQIKKRRVISDSESDIGGSDVEFKPDTKEEGSSDEISSGVGDSESEGLNSPVKVARKRKRMVTGNGSLKRKSSRKETPSATKQATSISSETKNTLRAFSAPQNSESQAHVSGGGDDSSRPTVWYHETLEWLKEEKRRDEHRRRPDHPDFDASTLYVPEDFLNSCTPGMRKWWQIKSQNFDLVICYKVGKFYELYHMDALIGVSELGLVFMKGNWAHSGFPEIAFGRYSDSLVQKGYKVARVEQTETPEMMEARCRKMAHISKYDRVVRREICRIITKGTQTYSVLEGDPSENYSKYLLSLKEKEEDSSGHTRAYGVCFVDTSLGKFFIGQFSDDRHCSRFRTLVAHYPPVQVLFEKGNLSKETKTILKSSLSCSLQEGLIPGSQFWDASKTLRTLLEEEYFREKLSDGIGVMLPQVLKGMTSESDSIGLTPGEKSELALSALGGCVFYLKKCLIDQELLSMANFEEYIPLDSDTVSTTRSGAIFTKAYQRMVLDAVTLNNLEIFLNGTNGSTEGTLLERVDTCHTPFGKRLLKQWLCAPLCNHYAINDRLDAIEDLMVVPDKISEVVELLKKLPDLERLLSKIHNVGSPLKSQNHPDSRAIMYEETTYSKKKIIDFLSALEGFKVMCKIIGIMEEVADGFKSKILKQVISLQTKNPEGRFPDLTVELNRWDTAFDHEKARKTGLITPKAGFDSDYDQALADIRENEQSLLEYLEKQRNRIGCRTIVYWGIGRNRYQLEIPENFTTRNLPEEYELKSTKKGCKRYWTKTIEKKLANLINAEERRDVSLKDCMRRLFYNFDKNYKDWQSAVECIAVLDVLLCLANYSRGGDGPMCRPVILLPEDTPPFLELKGSRHPCITKTFFGDDFIPNDILIGCEEEEQENGKAYCVLVTGPNMGGKSTLMRQAGLLAVMAQMGCYVPAEVCRLTPIDRVFTRLGASDRIMSGESTFFVELSETASILMHATAHSLVLVDELGRGTATFDGTAIANAVVKELAETIKCRTLFSTHYHSLVEDYSQNVAVRLGHMACMVENECEDPSQETITFLYKFIKGACPKSYGFNAARLANLPEEVIQKGHRKAREFEKMNQSLRLFREVCLASERSTVDAEAVHKLLTLIKEL

SEQ ID NO: 7168 - protein, 324 aa, Homo sapiens
MRRLFYNFDKNYKDWQSAVECIAVLDVLLCLANYSRGGDGPMCRPVILLPEDTPPFLELKGSRHPCITKTFFGDDFIPNDILIGCEEEEQENGKIVCLLLDQIWGASLRMRQAGLLAVMAQMGCYVPAEVCRLTPIDRVFTRLGASDRIMSGESTFFVELSETASILMHATAHSLVLVDELGRGTATFDGTAIANAVVKELAETIKCRTLFSTHYHISRRLFSKCCCLGHMACMVENECEDPSQETITFLYKFIKGACPKSYGFNAARLANLPEEVIQKGHRKAREFEKMNQSLRLFREVCLASERSTVDAEAVHKLLTLIKEL

SEQ ID NO: 7169 - protein, 1066 aa, Homo sapiens
MSRQSTLYSFFPKSPALSDANKASARASREGGRAACPRGLSFPRRGCGLERGWAWRPLARSASPPKAKNLNGGLRRSVAPAAPTSCDFSPGDLVWAKMEGYPWWPCLVYNHPFDGTFIREKGKSVRVHVQFFDDSPTRGWVSKRLLKPYTGSKSKEAQKGGHFYSAKPEILRAMQRADEALNKDKIKRLELAVCDEPSEPEEEEEMEVGTTYVTDKSEEDNEIESEEEVQPKTQGSRRSSRQIKKRRVISDSESDIGGSDVEFKPDTKEEGSSDEISSGVGDSESEGLNSPVKVARKRKRMVTGNGSLKRKSSRKETPSATKQATSISSETKNTLRAFSAPQNSESQAHVSGGGDDSSRPTVWYHETLEWLKEEKRRDEHRRRPDHPDFDASTLYVPEDFLNSCTPGMRKWWQIKSQNFDLVICYKVGKFYELYHMDALIGVSELGLVFMKGNWAHSGFPEIAFGRYSDSLVQKGYKVARVEQTETPEMMEARCRKMAHISKYDRVVRREICRIITKGTQTYSVLEGDPSENYSKYLLSLKEKEEDSSGHTRAYGVCFVDTSLGKFFIGQFSDDRHCSRFRTLVAHYPPVQVLFEKGNLSKETKTILKSSLSCSLQEGLIPGSQFWDASKTLRTLLEEEYFREKLSDGIGVMLPQVLKGMTSESDSIGLTPGEKSELALSALGGCVFYLKKCLIDQELLSMANFEEYIPLDSDTVSTTRSGAIFTKAYQRMVLDAVTLNNLEIFLNGTNGSTEGTLLERVDTCHTPFGKRLLKQWLCAPLCNHYAINDRLDAIEDLMVVPDKISEVVELLKKLPDLERLLSKIHNVGSPLKSQNHPDSRAIMYEETTYSKKKIIDFLSALEGFKVMCKIIGIMEEVADGFKSKILKQVISLQTKNPEGRFPDLTVELNRWDTAFDHEKARKTGLITPKAGFDSDYDQALADIRENEQSLLEYLEKQRNRIGCRTIVYWGIGRNRYQLEIPENFTTRNLPEEYELKSTKKGCKRYWTKTIEKKLANLINAEERRDVSLKDCMRRLFYNFDKNYKDWQSAVECIAVLGKTLNKLVLRL

SEQ ID NO: 7170 - protein, 522 aa, Homo sapiens
MRKPRAAVGSGHRKQAASQEGRQKHAKNNSQAKPSACDAGLARQPEEVVLQASVSSYHLFRDVAEVTAFRGSLLSWYDQEKRDLPWRRRAEDEMDLDRRAYAVWVSEVMLQQTQVATVINYYTGWMQKWPTLQDLASASLEEVNQLWAGLGYYSRGRRLQEGARKVVEELGGHMPRTAETLQQLLPGVGRYTAGAIASIAFGQATGVVDGNVARVLCRVRAIGADPSSTLVSQQLWGLAQQLVDPARPGDFNQAAMELGATVCTPQRPLCSQCPVESLCRARQRVEQEQLLASGSLSGSPDVEECAPNTGQCHLCLPPSEPWDQTLGVVNFPRKASRKPPREESSATCVLEQPGALGAQILLVQRPNSGLLAGLWEFPSVTWEPSEQLQRKALLQELQRWAGPLPATHLRHLGEVVHTFSHIKLTYQVYGLALEGQTPVTTVPPGARWLTQEEFHTAAVSTAMKKVFRVYQGQQPGTCMGSKRSQVSSPCSRKKPRMGQQVLDNFFRSHISTDAHSLNSAAQ

SEQ ID NO: 7171 - protein, 521 aa, Homo sapiens
MRKPRAAVGSGHRKQAASQEGRQKHAKNNSQAKPSACDGLARQPEEVVLQASVSSYHLFRDVAEVTAFRGSLLSWYDQEKRDLPWRRRAEDEMDLDRRAYAVWVSEVMLQQTQVATVINYYTGWMQKWPTLQDLASASLEEVNQLWAGLGYYSRGRRLQEGARKVVEELGGHMPRTAETLQQLLPGVGRYTAGAIASIAFGQATGVVDGNVARVLCRVRAIGADPSSTLVSQQLWGLAQQLVDPARPGDFNQAAMELGATVCTPQRPLCSQCPVESLCRARQRVEQEQLLASGSLSGSPDVEECAPNTGQCHLCLPPSEPWDQTLGVVNFPRKASRKPPREESSATCVLEQPGALGAQILLVQRPNSGLLAGLWEFPSVTWEPSEQLQRKALLQELQRWAGPLPATHLRHLGEVVHTFSHIKLTYQVYGLALEGQTPVTTVPPGARWLTQEEFHTAAVSTAMKKVFRVYQGQQPGTCMGSKRSQVSSPCSRKKPRMGQQVLDNFFRSHISTDAHSLNSAAQ

SEQ ID NO: 7172 - protein, 546 aa, Homo sapiens
MTPLVSRLSRLWAIMRKPRAAVGSGHRKQAASQEGRQKHAKNNSQAKPSACDGMIAECPGAPAGLARQPEEVVLQASVSSYHLFRDVAEVTAFRGSLLSWYDQEKRDLPWRRRAEDEMDLDRRAYAVWVSEVMLQQTQVATVINYYTGWMQKWPTLQDLASASLEEVNQLWAGLGYYSRGRRLQEGARKVVEELGGHMPRTAETLQQLLPGVGRYTAGAIASIAFGQATGVVDGNVARVLCRVRAIGADPSSTLVSQQLWGLAQQLVDPARPGDFNQAAMELGATVCTPQRPLCSQCPVESLCRARQRVEQEQLLASGSLSGSPDVEECAPNTGQCHLCLPPSEPWDQTLGVVNFPRKASRKPPREESSATCVLEQPGALGAQILLVQRPNSGLLAGLWEFPSVTWEPSEQLQRKALLQELQRWAGPLPATHLRHLGEVVHTFSHIKLTYQVYGLALEGQTPVTTVPPGARWLTQEEFHTAAVSTAMKKVFRVYQGQQPGTCMGSKRSQVSSPCSRKKPRMGQQVLDNFFRSHISTDAHSLNSAAQ

SEQ ID NO: 7173 - protein, 532 aa, Homo sapiens
MRKPRAAVGSGHRKQAASQEGRQKHAKNNSQAKPSACDGMIAECPGAPAGLARQPEEVVLQASVSSYHLFRDVAEVTAFRGSLLSWYDQEKRDLPWRRRAEDEMDLDRRAYAVWVSEVMLQQTQVATVINYYTGWMQKWPTLQDLASASLEEVNQLWAGLGYYSRGRRLQEGARKVVEELGGHMPRTAETLQQLLPGVGRYTAGAIASIAFGQATGVVDGNVARVLCRVRAIGADPSSTLVSQQLWGLAQQLVDPARPGDFNQAAMELGATVCTPQRPLCSQCPVESLCRARQRVEQEQLLASGSLSGSPDVEECAPNTGQCHLCLPPSEPWDQTLGVVNFPRKASRKPPREESSATCVLEQPGALGAQILLVQRPNSGLLAGLWEFPSVTWEPSEQLQRKALLQELQRWAGPLPATHLRHLGEVVHTFSHIKLTYQVYGLALEGQTPVTTVPPGARWLTQEEFHTAAVSTAMKKVFRVYQGQQPGTCMGSKRSQVSSPCSRKKPRMGQQVLDNFFRSHISTDAHSLNSAAQ

SEQ ID NO: 7174 - protein, 521 aa, Homo sapiens; identical to SEQ ID NO: 7171

SEQ ID NO: 7175 - protein, 536 aa, Homo sapiens
MTPLVSRLSRLWAIMRKPRAAVGSGHRKQAASQEGRQKHAKNNSQAKPSACDAGLARQPEEVVLQASVSSYHLFRDVAEVTAFRGSLLSWYDQEKRDLPWRRRAEDEMDLDRRAYAVWVSEVMLQQTQVATVINYYTGWMQKWPTLQDLASASLEEVNQLWAGLGYYSRGRRLQEGARKVVEELGGHMPRTAETLQQLLPGVGRYTAGAIASIAFGQATGVVDGNVARVLCRVRAIGADPSSTLVSQQLWGLAQQLVDPARPGDFNQAAMELGATVCTPQRPLCSQCPVESLCRARQRVEQEQLLASGSLSGSPDVEECAPNTGQCHLCLPPSEPWDQTLGVVNFPRKASRKPPREESSATCVLEQPGALGAQILLVQRPNSGLLAGLWEFPSVTWEPSEQLQRKALLQELQRWAGPLPATHLRHLGEVVHTFSHIKLTYQVYGLALEGQTPVTTVPPGARWLTQEEFHTAAVSTAMKKVFRVYQGQQPGTCMGSKRSQVSSPCSRKKPRMGQQVLDNFFRSHISTDAHSLNSAAQ

SEQ ID NO: 7176 - protein, 535 aa, Homo sapiens
MTPLVSRLSRLWAIMRKPRAAVGSGHRKQAASQEGRQKHAKNNSQAKPSACDGLARQPEEVVLQASVSSYHLFRDVAEVTAFRGSLLSWYDQEKRDLPWRRRAEDEMDLDRRAYAVWVSEVMLQQTQVATVINYYTGWMQKWPTLQDLASASLEEVNQLWAGLGYYSRGRRLQEGARKVVEELGGHMPRTAETLQQLLPGVGRYTAGAIASIAFGQATGVVDGNVARVLCRVRAIGADPSSTLVSQQLWGLAQQLVDPARPGDFNQAAMELGATVCTPQRPLCSQCPVESLCRARQRVEQEQLLASGSLSGSPDVEECAPNTGQCHLCLPPSEPWDQTLGVVNFPRKASRKPPREESSATCVLEQPGALGAQILLVQRPNSGLLAGLWEFPSVTWEPSEQLQRKALLQELQRWAGPLPATHLRHLGEVVHTFSHIKLTYQVYGLALEGQTPVTTVPPGARWLTQEEFHTAAVSTAMKKVFRVYQGQQPGTCMGSKRSQVSSPCSRKKPRMGQQVLDNFFRSHISTDAHSLNSAAQ

SEQ ID NO: 7177 - protein, 291 aa, Homo sapiens
MRKPRAAVGSGHRKQAASQEGRQKHAKNNSQAKPSACDGMIAECPGAPAGLARQPEEVVLQASVSSYHLFRDVAEVTAFRGSLLSWYDQEKRDLPWRRRAEDEMDLDRRAYAVWVSEVMLQQTQVATVINYYTGWMQKWPTLQDLASASLEEVNQLWAGLGYYSRGRRLQEGARKVVEELGGHMPRTAETLQQLLPGVGRYTAGAIASIAFGQATGVVDGNVARVLCRVRAIGADPSSTLVSQQLWGLAQQLVDPARPGDFNQAAMELGATVCTPQRPLCSQCPVESLCRA

SEQ ID NO: 7178 - protein, 532 aa, Homo sapiens; identical to SEQ ID NO: 7173

SEQ ID NO: 7179 - protein, 549 aa, Homo sapiens
MTPLVSRLSRLWAIMRKPRAAVGSGHRKQAASQEGRQKHAKNNSQAKPSACDACAGMIAECPGAPAGLARQPEEVVLQASVSSYHLFRDVAEVTAFRGSLLSWYDQEKRDLPWRRRAEDEMDLDRRAYAVWVSEVMLQQTQVATVINYYTGWMQKWPTLQDLASASLEEVNQLWAGLGYYSRGRRLQEGARKVVEELGGHMPRTAETLQQLLPGVGRYTAGAIASIAFGQATGVVDGNVARVLCRVRAIGADPSSTLVSQQLWGLAQQLVDPARPGDFNQAAMELGATVCTPQRPLCSQCPVESLCRARQRVEQEQLLASGSLSGSPDVEECAPNTGQCHLCLPPSEPWDQTLGVVNFPRKASRKPPREESSATCVLEQPGALGAQILLVQRPNSGLLAGLWEFPSVTWEPSEQLQRKALLQELQRWAGPLPATHLRHLGEVVHTFSHIKLTYQVYGLALEGQTPVTTVPPGARWLTQEEFHTAAVSTAMKKVFRVYQGQQPGTCMGSKRSQVSSPCSRKKPRMGQQVLDNFFRSHISTDAHSLNSAAQ

SEQ ID NO: 7180 - protein, 521 aa, Homo sapiens; identical to SEQ ID NO: 7171

SEQ ID NO: 7181 - protein, 215 aa, Homo sapiens
MTPLVSRLSRLWEVNQLWAGLGYYSRGRRLQEGARKVVEELGGHMPRTAETLQQLLPGVGRYTAGAIASIAFGQATGVVDGNVARVLCRVRAIGADPSSTLVSQQLWGLAQQLVDPARPGDFNQAAMELGATVCTPQRPLCSQCPVESLCRARQRVEQEQLLASGSLSGSPDVEECAPNTGQCHLCLPPSEPWDQTLGVVNFPRKASRKPPREES

SEQ ID NO: 7182 - protein, 230 aa, Homo sapiens
MTPLVSRLSRLWAIMRKPRAAVGSGHRKQAASQEGRQKHAKNNSQAKPSACDGGESTLGWPGLLFSWPAAAGGSSEGLLAGLWEFPSVTWEPSEQLQRKALLQELQRWAGPLPATHLRHLGEVVHTFSHIKLTYQVYGLALEGQTPVTTVPPGARWLTQEEFHTAAVSTAMKKVFRVYQGQQPGTCMGSKRSQVSSPCSRKKPRMGQQVLDNFFRSHISTDAHSLNSAAQ

SEQ ID NO: 7183 - protein, 96 aa, Homo sapiens
MSDNDDIEVESDEEQPRFQSAADKRAHHNALERKRRDHIKDSFHSLRDSVPSLQGEKLYFLFWKLCTPVLHRQSLMQKCHTFISSYQVHKKKECKI

SEQ ID NO: 7184 - protein, 134 aa, Homo sapiens
MSDNDDIEVESDEEQPRFQSAADKRAHHNALERKRRDHIKDSFHSLRDSVPSLQGEKASRAQILDKATEYIQYMRRKNHTHQQDIDDLKRQNALLEQQGEHPSSWGSWPCCAPARSGFGTWACRVRASHGVCAQ

SEQ ID NO: 7185 - protein, 83 aa, Homo sapiens
MSDNDDIEVESDEEQPRFQSAADKRAHHNALERKRRDHIKDSFHSLRDSVPSLQGEKGTKMKLTLPPVFPYEHLPFPTVFCHG

SEQ ID NO: 7186 - protein, 151 aa, Homo sapiens
MSDNDDIEVESDADKRAHHNALERKRRDHIKDSFHSLRDSVPSLQGEKASRAQILDKATEYIQYMRRKNHTHQQDIDDLKRQNALLEQQVRALEKARSSAQLQTNYPSSDNSLYTNAKGSTISAFDGGSDSSSESEPEEPQSRKKLRMEAS

SEQ ID NO: 7187 - protein, 160 aa, Homo sapiens
MSDNDDIEVESDEEQPRFQSAADKRAHHNALERKRRDHIKDSFHSLRDSVPSLQGEKASRAQILDKATEYIQYMRRKNHTHQQDIDDLKRQNALLEQQVRALEKARSSAQLQTNYPSSDNSLYTNAKGSTISAFDGGSDSSSESEPEEPQSRKKLRMEAS

SEQ ID NO: 7188 - protein, 141 aa, Homo sapiens
MLSVKITSIFSIFFFLLFQEEQPRFQSAADKRAHHNALERKRRDHIKDSFHSLRDSVPSLQGEKASRAQILDKATEYIQYMRRKNHTHQQDIDDLKRQNALLEQQGEHPSSWGSWPCCAPARSGFGTWACRVRASHGVCAQ

SEQ ID NO: 7189 - protein, 103 aa, Homo sapiens
MSDNDDIEVESDEEQPRFQSAADKRAHHNALERKRRDHIKDSFHSLRDSVPSLQGEKASRAQILDKATEYIQYMRRKNHTHQQDIDDLKRQNALLEQQGESES

SEQ ID NO: 7190 - protein, 103 aa, Homo sapiens; identical to SEQ ID NO: 7189

SEQ ID NO: 7191 - protein, 4640 aa, Homo sapiens
MPVPDGSVAAAGLGLGLPAADSRGHYQLLLSGRALADRYRRIYTAALNDRDQGGGSAGHPASRNKKILNKKKLKRKQKSKSKVKTRSKSENLENTVIIPDIKLHSNPSAFNIYCNVRHCVLEWQKKEISLAAASKNSVQSGESDSDEEEESKEPPIKLPKIIEVGLCEVFELIKETRFSHPSLCLRSLQALLNVLQGQQPEGLQSEPPEVLESLFQLLLEITVRSTGMNDSTGQSLTALSCACLFSLVASWGETGRTLQAISAILTNNGSHACQTIQVPTILNSLQRSVQAVLVGKIQIQDWFSNGIKKAALMHKWPLKEISVDEDDQCLLQNDGFFLYLLCKDGLYKIGSGYSGTVRGHIYNSTSRIRNRKEKKSWLGYAQGYLLYRDVNNHSMTAIRISPETLEQDGTVMLPDCHTEGQNILFTDGEYINQIAASRDDGFVVRIFATSTEPVLQQELQLKLARKCLHACGISLFDLEKDLHIISTGFDEESAILGAGREFALMKTANGKIYYTGKYQSLGIKQGGPSAGKWVELPITKSPKIVHFSVGHDGSHALLVAEDGSIFFTGSASKGEDGESTKSRRQSKPYKPKKIIKMEGKIVVYTACNNGSSSVISKDGELYMFGKDAIYSDSSSLVTDLKGHFVTQVAMGKAHTCVLMKNGEVWTFGVNNKGQCGRDTGAMNQGGKGFGVENMATAMDEDLEEELDEKDEKSMMCPPGMHKWKLEQCMVCTVCGDCTGYGASCVSSGRPDRVPGGICGCGSGESGCAVCGCCKACARELDGQEARQRGILDAVKEMIPLDLLLAVPVPGVNIEEHLQLRQEEKRQRVIRRHRLEEGRGPLVFAGPIFMNHREQALARLRSHPAQLKHKRDKHKDGSGERGEKDASKITTYPPGSVRFDCELRAVQVSCGFHHSVVLMENGDVYTFGYGQHGQLGHGDVNSRGCPTLVQALPGPSTQVTAGSNHTAVLLMDGQVFTFGSFSKGQLGRPILDVPYWNAKPAPMPNIGSKYGRKATWIGASGDQTFLRIDEALINSHVLATSEIFASKHIIGLVPASISEPPPFKCLLINKVDGSCKTFNDSEQEDLQGFGVCLDPVYDVIWRFRPNTRELWCYNAVVADARLPSAADMQSRCSILSPELALPTGSRALTTRSHAALHILGCLDTLAAMQDLKMGVASTEEETQAVMKVYSKEDYSVVNRFESHGGGWGYSAHSVEAIRFSADTDILLGGLGLFGGRGEYTAKIKLFELGPDGGDHETDGDLLAETDVLAYDCAAREKYAMMFDEPVLLQAGWWYVAWARVSGPSSDCGSHGQASITTDDGVVFQFKSSKKSNNGTDVNAGQIPQLLYRLPTSDGSASKGKQQTSEPVHILKRSFARTVSVECFESLLSILHWSWTTLVLGVEELRGLKGFQFTATLLDLERLRFVGTCCLRLLRVYTCEIYPVSATGKAVVEETSKLAECIGKTRTLLRKILSEGVDHCMVKLDNDPQGYLSQPLSLLEAVLQECHNTFTACFHSFYPTPALQWACLCDLLNCLDQDIQEANFKTSSSRLLAAVMSALCHTSVKLTSIFPIAYDGEVLLRSIVKQVSTENDSTLVHRFPLLVAHMEKLSQSEENISGMTSFREVLEKMLVIVVLPVRNSLRRENELFSSHLVSNTCGLLASIVSELTASALGSEVDGLNSLHSVKASANRFTKTSQGRSWNTGNGSPDAICFSVDKPGIVVVGFSVYGGGGIHEYELEVLVDDSEHAGDSTHSHRWTSLELVKGTYTTDDSPSDIAEIRLDKVVPLKENVKYAVRLRNYGSRTANGDGGMTTVQCPDGVTFTFSTCSLSSNGTNQTRGQIPQILYYRSEFDGDLQSQLLSKANEEDKNCSRALSVVSTVVRASKDLLHRALAVDADDIPELLSSSSLFSMLLPLIIAYIGPVAAAIPKVAVEVFGLVQQLLPSVAILNQKYAPPAFNPNQSTDSTTGNQPEQGLSACTTSSHYAVIESEHPYKPACVMHYKVTFPECVRWMTIEFDPQCGTAQSEDVLRLLIPVRTVQNSGYGPKLTSVHENLNSWIELKKFSGSSGWPTMVLVLPGNEALFSLETASDYVKDDKASFYGFKCFAIGYEFSPGPDEGVIQLEKELANLGGVCAAALMKKDLALPIGNELEEDLEILEEAALQVCKTHSGILGKGLALSHSPTILEALEGNLPLQIQSNEQSFLDDFIACVPGSSGGRLARWLQPDSYADPQKTSLILNKDDIRCGWPTTITVQTKDQYGDVVHVPNMKVEVKAVPVSQKKMSLQQDQAKKPQRIPGSPAVTAASSNTDMTYGGLASPKLDVSYEPMIVKEARYIAITMMKVYENYSFEELRFASPTPKRPSENMLIRVNNDGTYCANWTPGAIGLYTLHVTIDGIEIDAGLEVKVKDPPKGMIPPGTQLVKPKSEPQPNKVRKFVAKDSAGLRIRSHPSLQSEQIGIVKVNGTITFIDEIHNDDGVWLRLNDETIKKYVPNMNGYTEAWCLSFNQHLGKSLLVPVDESKTNTDDFFKDINSCCPQEATMQEQDMPFLRGGPGMYKVVKTGPSGHNIRSCPNLRGIPIGMLVLGNKVKAVGEVTNSEGTWVQLDQNSMVEFCESDEGEAWSLARDRGGNQYLRHEDEQALLDQNSQTPPPSPFSVQAFNKGASCSAQGFDYGLGNSKGDRGNISTSSKPASTSGKSELSSKHSRSLKPDGRMSRTTADQKKPRGTESLSASESLILKSDAAKLRSDSHSRSLSPNHNTLQTLKSDGRMPSSSRAESPGPGSRLSSPKPKTLPANRSSPSGASSPRSSSPHDKNLPQKSTAPVKTKLDPPRERSKSDSYTLDPDTLRKKKMPLTEPLRGRSTSPKPKSVPKDSTDSPGSENRAPSPHVVQENLHSEVVEVCTSSTLKTNSLTDSTCDDSSEFKSVDEGSNKVHFSIGKAPLKDEQEMRASPKISRKCANRHTRPKKEKSSFLFKGDGSKPLEPAKQAMSPSVAECARAVFASFLWHEGIVHDAMACSSFLKFHPELSKEHAPIRSSLNSQQPTEEKETKLKNRHSLEISSALNMFNIAPHGPDISKMGSINKNKVLSMLKEPPLHEKCEDGKTETTFEMSMHNTMKSKSPLPLTLQHLVAFWEDISLATIKAASQNMIFPSPGSCAVLKKKECEKENKKSKKEKKKKEKAEVRPRGNLFGEMAQLAVGGPEKDTICELCGESHPYPVTYHMRQAHPGCGRYAGGQGYNSIGHFCGGWAGNCGDGGIGGSTWYLVCDRCREKYLREKQAAAREKVKQSRRKPMQVKTPRALPTMEAHQVIKANALFLLSLSSAAEPSILCYHPAKPFQSQLPSVKEGISEDLPVKMPCLYLQTLARHHHENFVGYQDDNLFQDEMRYLRSTSVPAPYISVTPDASPNVFEEPESNMKSMPPSLETSPITDTDLAKRTVFQRSYSVVASEYDKQHSILPARVKAIPRRRVNSGDTEVGSSLLRHPSPELSRLISAHSSLSKGERNFQWPVLAFVIQHHDLEGLEIAMKQALRKSACRVFAMEAFNWLLCNVIQTTSLHDILWHFVASLTPAPVEPEEEEDEENKTSKENSEQEKDTRVCEHPLSDIVIAGEAAHPLPHTFHRLLQTISDLMMSLPSGSSLQQMALRCWSLKFKQSDHQFLHQSNVFHHINNILSKSDDGDSEESFSISIQSGFEAMSQELCIVMCLKDLTSIVDIKTSSRPAMIGSLTDGSTETFWESGDEDKNKTKNITINCVKGINARYVSVHVDNSRDLGNKVTSMTFLTGKAVEDLCRIKQVDLDSRHIGWVTSELPGGDNHIIKIELKGPENTLRVRQVKVLGWKDGESTKIAGQISASVAQQRNCEAETLRVFRLITSQVFGKLISGDAEPTPEQEEKALLSSPEGEEKVYNATSDADLKEHMVGIIFSRSKLTNLQKQVCAHIVQAIRMEATRVREEWEHAISSKENANSQPNDEDASSDAYCFELLSMVLALSGSNVGRQYLAQQLTLLQDLFSLLHTASPRVQRQVTSLLRRVLPEVTPSRLASIIGVKSLPPADISDIIHSTEKGDWNKLGILDMFLGCIAKALTVQLKAKGTTITGTAGTTVGKGVTTVTLPMIFNSSYLRRGESHWWMKGSTPTQISEIIIKLIKDMAAGHLSEAWSRVTKNAIAETIIALTKMEEEFRSPVRCIATTRLWLALASLCVLDQDHVDRLSSGRWMGKDGQQKQMPMCDNHDDGETAAIILCNVCGNLCTDCDRFLHLHRRTKTHQRQVFKEEEEAIKVDLHEGCGRTKLFWLMALADSKTMKAMVEFREHTGKPTTSSSEACRFCGSRSGTELSAVGSVCSDADCQEYAKIACSKTHPCGHPCGGVKNEEHCLPCLHGCDKSATSLKQDADDMCMICFTEALSAAPAIQLDCSHIFHLQCCRRVLENRWLGPRITFGFISCPICKNKINHIVLKDLLDPIKELYEDVRRKALMRLEYEGLHKSEAITTPGVRFYNDPAGYAMNRYAYYVCYKCRKAYFGGEARCDAEAGRGDDYDPRELICGACSDVSRAQMCPKHGTDFLEYKCRYCCSVAVFFCFGTTHFCNACHDDFQRMTSIPKEELPHCPAGPKGKQLEGTECPLHVVHPPTGEEFALGCGVCRNAHTF

SEQ ID NO: 7192 - protein, 513 aa, Homo sapiens
MQEQDMPFLRGGPGMYKVVKTGPSGHNIRSCPNLRGIPIGMLVLGNKVKAVGEVTNSEGTWVQLDQNSMVEFCESDEGEAWSLARDRGGNQYLRHEDEQALLDQNSQTPPPSPFSVQAFNKGASCSAQGFDYGLGNSKVLTVLPTAGDQLSAILNSIQSRPNLPAPSIFDQAAKPPSSLVHSPFVFGQPLSFQQPQLQSDRGNISTSSKPASTSGKSELSSKHSRSLKPDGRMSRTTADQKKPRGTESLSASESLILKSDAAKLRSDSHSRSLSPNHNTLQTLKSDGRMPSSSRAESPGPGSRLSSPKPKTLPANRSSPSGASSPRSSSPHDKNLPQKSTAPVKTKLDPPRERSKSDSYTLDPDTLRKKKMPLTEPLRGRSTSPKPKSVPKDSTDSPGSENRAPSPHVVQENLHSEVVEVCTSSTLKTNSLTDSTCDDSSEFKSVDEGSNKVHFSIGKAPLKDEQEMRASPKISRKCANRHTRPKRKIEFSFQRRWIQAFRASQASHVSFCGR

SEQ ID NO: 7193 - protein, 4678 aa, Homo sapiens
MMMCAATASPAAASSGLGGDGFYPAATFSSSPAPGALFMPVPDGSVAAAGLGLGLPAADSRGHYQLLLSGRALADRYRRIYTAALNDRDQGGGSAGHPASRNKKILNKKKLKRKQKSKSKVKTRSKSENLENTVIIPDIKLHSNPSAFNIYCNVRHCVLEWQKKEISLAAASKNSVQSGESDSDEEEESKEPPIKLPKIIEVGLCEVFELIKETRFSHPSLCLRSLQALLNVLQGQQPEGLQSEPPEVLESLFQLLLEITVRSTGMNDSTGQSLTALSCACLFSLVASWGETGRTLQAISAILTNNGSHACQTIQVPTILNSLQRSVQAVLVGKIQIQDWFSNGIKKAALMHKWPLKEISVDEDDQCLLQNDGFFLYLLCKDGLYKIGSGYSGTVRGHIYNSTSRIRNRKEKKSWLGYAQGYLLYRDVNNHSMTAIRISPETLEQDGTVMLPDCHTEGQNILFTDGEYINQIAASRDDGFVVRIFATSTEPVLQQELQLKLARKCLHACGISLFDLEKDLHIISTGFDEESAILGAGREFALMKTANGKIYYTGKYQSLGIKQGGPSAGKWVELPITKSPKIVHFSVGHDGSHALLVAEDGSIFFTGSASKGEDGESTKSRRQSKPYKPKKIIKMEGKIVVYTACNNGSSSVISKDGELYMFGKDAIYSDSSSLVTDLKGHFVTQVAMGKAHTCVLMKNGEVWTFGVNNKGQCGRDTGAMNQGGKGFGVENMATAMDEDLEEELDEKDEKSMMCPPGMHKWKLEQCMVCTVCGDCTGYGASCVSSGRPDRVPGGICGCGSGESGCAVCGCCKACARELDGQEARQRGILDAVKEMIPLDLLLAVPVPGVNIEEHLQLRQEEKRQRVIRRHRLEEGRGPLVFAGPIFMNHREQALARLRSHPAQLKHKRDKHKDGSGERGEKDASKITTYPPGSVRFDCELRAVQVSCGFHHSVVLMENGDVYTFGYGQHGQLGHGDVNSRGCPTLVQALPGPSTQVTAGSNHTAVLLMDGQVFTFGSFSKGQLGRPILDVPYWNAKPAPMPNIGSKYGRKATWIGASGDQTFLRIDEALINSHVLATSEIFASKHIIGLVPASISEPPPFKCLLINKVDGSCKTFNDSEQEDLQGFGVCLDPVYDVIWRFRPNTRELWCYNAVVADARLPSAADMQSRCSILSPELALPTGSRALTTRSHAALHILGCLDTLAAMQDLKMGVASTEEETQAVMKVYSKEDYSVVNRFESHGGGWGYSAHSVEAIRFSADTDILLGGLGLFGGRGEYTAKIKLFELGPDGGDHETDGDLLAETDVLAYDCAAREKYAMMFDEPVLLQAGWWYVAWARVSGPSSDCGSHGQASITTDDGVVFQFKSSKKSNNGTDVNAGQIPQLLYRLPTSDGSASKGKQQTSEPVHILKRSFARTVSVECFESLLSILHWSWTTLVLGVEELRGLKGFQFTATLLDLERLRFVGTCCLRLLRVYTCEIYPVSATGKAVVEETSKLAECIGKTRTLLRKILSEGVDHCMVKLDNDPQGYLSQPLSLLEAVLQECHNTFTACFHSFYPTPALQWACLCDLLNCLDQDIQEANFKTSSSRLLAAVMSALCHTSVKLTSIFPIAYDGEVLLRSIVKQVSTENDSTLVHRFPLLVAHMEKLSQSEENISGMTSFREVLEKMLVIVVLPVRNSLRRENELFSSHLVSNTCGLLASIVSELTASALGSEVDGLNSLHSVKASANRFTKTSQGRSWNTGNGSPDAICFSVDKPGIVVVGFSVYGGGGIHEYELEVLVDDSEHAGDSTHSHRWTSLELVKGTYTTDDSPSDIAEIRLDKVVPLKENVKYAVRLRNYGSRTANGDGGMTTVQCPDGVTFTFSTCSLSSNGTNQTRGQIPQILYYRSEFDGDLQSQLLSKANEEDKNCSRALSVVSTVVRASKDLLHRALAVDADDIPELLSSSSLFSMLLPLIIAYIGPVAAAIPKVAVEVFGLVQQLLPSVAILNQKYAPPAFNPNQSTDSTTGNQPEQGLSACTTSSHYAVIESEHPYKPACVMHYKVTFPECVRWMTIEFDPQCGTAQSEDVLRLLIPVRTVQNSGYGPKLTSVHENLNSWIELKKFSGSSGWPTMVLVLPGNEALFSLETASDYVKDDKASFYGFKCFAIGYEFSPGPDEGVIQLEKELANLGGVCAAALMKKDLALPIGNELEEDLEILEEAALQVCKTHSGILGKGLALSHSPTILEALEGNLPLQIQSNEQSFLDDFIACVPGSSGGRLARWLQPDSYADPQKTSLILNKDDIRCGWPTTITVQTKDQYGDVVHVPNMKVEVKAVPVSQKKMSLQQDQAKKPQRIPGSPAVTAASSNTDMTYGGLASPKLDVSYEPMIVKEARYIAITMMKVYENYSFEELRFASPTPKRPSENMLIRVNNDGTYCANWTPGAIGLYTLHVTIDGIEIDAGLEVKVKDPPKGMIPPGTQLVKPKSEPQPNKVRKFVAKDSAGLRIRSHPSLQSEQIGIVKVNGTITFIDEIHNDDGVWLRLNDETIKKYVPNMNGYTEAWCLSFNQHLGKSLLVPVDESKTNTDDFFKDINSCCPQEATMQEQDMPFLRGGPGMYKVVKTGPSGHNIRSCPNLRGIPIGMLVLGNKVKAVGEVTNSEGTWVQLDQNSMVEFCESDEGEAWSLARDRGGNQYLRHEDEQALLDQNSQTPPPSPFSVQAFNKGASCSAQGFDYGLGNSKGDRGNISTSSKPASTSGKSELSSKHSRSLKPDGRMSRTTADQKKPRGTESLSASESLILKSDAAKLRSDSHSRSLSPNHNTLQTLKSDGRMPSSSRAESPGPGSRLSSPKPKTLPANRSSPSGASSPRSSSPHDKNLPQKSTAPVKTKLDPPRERSKSDSYTLDPDTLRKKKMPLTEPLRGRSTSPKPKSVPKDSTDSPGSENRAPSPHVVQENLHSEVVEVCTSSTLKTNSLTDSTCDDSSEFKSVDEGSNKVHFSIGKAPLKDEQEMRASPKISRKCANRHTRPKKEKSSFLFKGDGSKPLEPAKQAMSPSVAECARAVFASFLWHEGIVHDAMACSSFLKFHPELSKEHAPIRSSLNSQQPTEEKETKLKNRHSLEISSALNMFNIAPHGPDISKMGSINKNKVLSMLKEPPLHEKCEDGKTETTFEMSMHNTMKSKSPLPLTLQHLVAFWEDISLATIKAASQNMIFPSPGSCAVLKKKECEKENKKSKKEKKKKEKAEVRPRGNLFGEMAQLAVGGPEKDTICELCGESHPYPVTYHMRQAHPGCGRYAGGQGYNSIGHFCGGWAGNCGDGGIGGSTWYLVCDRCREKYLREKQAAAREKVKQSRRKPMQVKTPRALPTMEAHQVIKANALFLLSLSSAAEPSILCYHPAKPFQSQLPSVKEGISEDLPVKMPCLYLQTLARHHHENFVGYQDDNLFQDEMRYLRSTSVPAPYISVTPDASPNVFEEPESNMKSMPPSLETSPITDTDLAKRTVFQRSYSVVASEYDKQHSILPARVKAIPRRRVNSGDTEVGSSLLRHPSPELSRLISAHSSLSKGERNFQWPVLAFVIQHHDLEGLEIAMKQALRKSACRVFAMEAFNWLLCNVIQTTSLHDILWHFVASLTPAPVEPEEEEDEENKTSKENSEQEKDTRVCEHPLSDIVIAGEAAHPLPHTFHRLLQTISDLMMSLPSGSSLQQMALRCWSLKFKQSDHQFLHQSNVFHHINNILSKSDDGDSEESFSISIQSGFEAMSQELCIVMCLKDLTSIVDIKTSSRPAMIGSLTDGSTETFWESGDEDKNKTKNITINCVKGINARYVSVHVDNSRDLGNKVTSMTFLTGKAVEDLCRIKQVDLDSRHIGWVTSELPGGDNHIIKIELKGPENTLRVRQVKVLGWKDGESTKIAGQISASVAQQRNCEAETLRVFRLITSQVFGKLISGDAEPTPEQEEKALLSSPEGEEKVYNATSDADLKEHMVGIIFSRSKLTNLQKQVCAHIVQAIRMEATRVREEWEHAISSKENANSQPNDEDASSDAYCFELLSMVLALSGSNVGRQYLAQQLTLLQDLFSLLHTASPRVQRQVTSLLRRVLPEVTPSRLASIIGVKSLPPADISDIIHSTEKGDWNKLGILDMFLGCIAKALTVQLKAKGTTITGTAGTTVGKGVTTVTLPMIFNSSYLRRGESHWWMKGSTPTQISEIIIKLIKDMAAGHLSEAWSRVTKNAIAETIIALTKMEEEFRSPVRCIATTRLWLALASLCVLDQDHVDRLSSGRWMGKDGQQKQMPMCDNHDDGETAAIILCNVCGNLCTDCDRFLHLHRRTKTHQRQVFKEEEEAIKVDLHEGCGRTKLFWLMALADSKTMKAMVEFREHTGKPTTSSSEACRFCGSRSGTELSAVGSVCSDADCQEYAKIACSKTHPCGHPCGGVKNEEHCLPCLHGCDKSATSLKQDADDMCMICFTEALSAAPAIQLDCSHIFHLQCCRRVLENRWLGPRITFGFISCPICKNKINHIVLKDLLDPIKELYEDVRRKALMRLEYEGLHKSEAITTPGVRFYNDPAGYAMNRYAYYVCYKCRKAYFGGEARCDAEAGRGDDYDPRELICGACSDVSRAQMCPKHGTDFLEYKCRYCCSVAVFFCFGTTHFCNACHDDFQRMTSIPKEELPHCPAGPKGKQLEGTECPLHVVHPPTGEEFALGCGVCRNAHTF

SEQ ID NO: 7194 - protein, 4640 aa, Homo sapiens; identical to SEQ ID NO: 7191

SEQ ID NO: 7195 - protein, 309 aa, Homo sapiens
MRPDRAEAPGPPAMAAGGPGAGSAAPVSSTSSLPLAALNMRVRRRLSLFLNVRTQVAADWTALAEEMDFEYLEIRQLETQADPTGRLLDAWQGRPGASVGRLLELLTKLGRDDVLLELGPSIEEDCQKYILKQQQEEAEKPLQVAAVDSSVPRTAELAGITTLDDPLGHMPERFDAFICYCPSDIQFVQEMIRQLEQTNYRLKLCVSDRDVLPGTCVWSIASELIEKRCRRMVVVVSDDYLQSKECDFQTKFALSLSPGAHQKRLIPIKYKAMKKEFPSILRFITVCDYTNPCTKSWFWTRLAKALSLP

SEQ ID NO: 7196 - protein, 285 aa, Homo sapiens
MAAGGPGAGSAAPVSSTSSLPLAALNMRVRRRLSLFLNVRTQVAADWTALAEEMDFEYLEIRQLETQADPTGASVGRLLELLTKLGRDDVLLELGPSIEEDCQKYILKQQQEEAEKPLQVAAVDSSVPRTAELAGITTLDDPLGHMPERFDAFICYCPSDIQFVQEMIRQLEQTNYRLKLCVSDRDVLPGTCVWSIASELIEKRCRRMVVVVSDDYLQSKECDFQTKFALSLSPGAHQKRLIPIKYKAMKKEFPSILRFITVCDYTNPCTKSWFWTRLAKALSLP

SEQ ID NO: 7197 - protein, 317 aa, Homo sapiens
MRPDRAEAPGPPAMAAGGPGAGSAAPVSSTSSLPLAALNMRVRRRLSLFLNVRTQVAADWTALAEEMDFEYLEIRQLETQADPTGRLLDAWQGRPGASVGRLLELLTKLGRDDVLLELGPSIEEDCQKYILKQQQEEAEKPLQVAAVDSSVPRTAELAGITTLDDPLGHMPERFDAFICYCPSDIQFVQEMIRQLEQTNYRLKLCVSDRDVLPGTCVWSIASELIEKRLARRPRGGCRRMVVVVSDDYLQSKECDFQTKFALSLSPGAHQKRLIPIKYKAMKKEFPSILRFITVCDYTNPCTKSWFWTRLAKALSLP

SEQ ID NO: 7198 - protein, 169 aa, Homo sapiens
MAAGGPGAGSAAPVSSTSSLPLAALNMRVRRRLSLFLNVRTQVAADWTALAEEMDFEYLEIRQLETQADPTGRLLDAWQGRPGASVGRLLELLTKLGRDDVLLELGPSIEEDCQKYILKQQQEEAEKPLQVAAVDSSVPPHLMTPWGICLSVSMPSSAIAPATSSLCRR

SEQ ID NO: 7199 - protein, 320 aa, Homo sapiens
MELLSPPLRDVDLTAPDGSLCSFATTDDFYDDPCFDSPDLRFFEDLDPRLMHVGALLKPEEHSHFPAAVHPAPGAREDEHVRAPSGHHQAGRCLLWACKACKRKTTNADRRKAATMRERRRLSKVNEAFETLKRCTSSNPNQRLPKVEILRNAIRYIEGLQALLRDQDAAPPGAAAAFYAPGPLPPGRGGEHYSGDSDASSPRSNCSDGMMDYSGPPSGARRRNCYEGAYYNEAPSEPRPGKSAAVSSLDCLSSIVERISTESPAAPALLLADVPSESPPRRQEAAAPSEGESSGDPTQSPDAAPQCPAGANPNPIYQVL

SEQ ID NO: 7200 - protein, 1845 aa, Homo sapiens
MGDVKLVASSHISKTSLSVDPSRVDSMPLTEAPAFILPPRNLCIKEGATAKFEGRVRGYPEPQVTWHRNGQPITSGGRFLLDCGIRGTFSLVIHAVHEEDRGKYTCEATNGSGARQVTVELTVEGSFAKQLGQPVVSKTLGDRFSAPAVETRPSIWGECPPKFATKLGRVVVKEGQMGRFSCKITGRPQPQVTWLKGNVPLQPSARVSVSEKNGMQVLEIHGVNQDDVGVYTCLVVNGSGKASMSAELSIQGLDSANRSFVRETKATNSDVRKEVTNVISKESKLDSLEAAAKSKNCSSPQRGGSPPWAANSQPQPPRESKLESCKDSPRTAPQTPVLQKTSSSITLQAARVQPEPRAPGLGVLSPSGEERKRPAPPRPATFPTRQPGLGSQDVVSKAANRRIPMEGQRDSAFPKFESKPQSQEVKENQTVKFRCEGLAVMEVAPSFSSVLKDCAVIEGQDFVLQCSVRGTPVPRITWLLNGQPIQYARSTCEAGVAELHIQDALPEDHGTYTCLAENALGQVSCSAWVTVHEKKSSRKSEYLLPVAPSKPTAPIFLQGLSDLKVMDGSQVTMTVQVSGNPPPEVIWLHNGNEIQESEDFHFEQRGTQHSLCIQEVFPEDTGTYTCEAWNSAGEVRTQAVLTVQEPHDGTQPWFISKPRSVTASLGQSVLISCAIAGDPFPTVHWLRDGKALCKDTGHFEVLQNEDVFTLVLKKVQPWHAGQYEILLKNRVGECSCQVSLMLQNSSARALPRGREPASCEDLCGGGVGADGGGSDRYGSLRPGWPARGQGWLEEEDGEDVRGVLKRRVETRQHTEEAIRQQEVEQLDFRDLLGKKVSTKTLSEDDLKEIPAEQMDFRANLQRQVKPKTVSEEERKVHSPQQVDFRSVLAKKGTSKTPVPEKVPPPKPATPDFRSVLGGKKKLPAENGSSSAETLNAKAVESSKPLSNAQPSGPLKPVGNAKPAETLKPMGNAKPAETLKPMGNAKPDENLKSASKEELKKDVKNDVNCKRGHAGTTDNEKRSESQGTAPAFKQKLQDVHVAEGKKLLLQCQVSSDPPATIIWTLNGKTLKTTKFIILSQEGSLCSVSIEKALPEDRGLYKCVAKNDAGQAECSCQVTVDDAPASENTKAPEMKSRRPKSSLPPVLGTESDATVKKKPAPKTPPKAAMPPQIIQFPEDQKVRAGESVELFGKVTGTQPITCTWMKFRKQIQESEHMKVENSENGSKLTILAARQEHCGCYTLLVENKLGSRQAQVNLTVVDKPDPPAGTPCASDIRSSSLTLSWYGSSYDGGSAVQSYSIEIWDSANKTWKELATCRSTSFNVQDLLPDHEYKFRVRAINVYGTSEPSQESELTTVGEKPEEPKDEVEVSDDDEKEPEVDYRTVTINTEQKVSDFYDIEERLGSGKFGQVFRLVEKKTRKVWAGKFFKAYSAKEKENIRQEISIMNCLHHPKLVQCVDAFEEKANIVMVLEIVSGGELFERIIDEDFELTERECIKYMRQISEGVEYIHKQGIVHLDLKPENIMCVNKTGTRIKLIDFGLARRLENAGSLKVLFGTPEFVAPEVINYEPIGYATDMWSIGVICYILVSGLSPFMGDNDNETLANVTSATWDFDDEAFDEISDDAKDFISNLLKKDMKNRLDCTQCLQHPWLMKDTKNMEAKKLSKDRMKKYMARRKWQKTGNAVRAIGRLSSMAMISGLSGRKSSTGSPTSPLNAEKLESEEDVSQAFLEAVAEEKPHVKPYFSKTIRDLEVVEGSAARFDCKIEGYPDPEVVWFKDDQSIRESRHFQIDYDEDGNCSLIISDVCGDDDAKYTCKAVNSLGEATCTAELIVETMEEGEGEGEEEEE

SEQ ID NO: 7201 - protein, 714 aa, Homo sapiens
MKSRRPKSSLPPVLGTESDATVKKKPAPKTPPKAAMPPQIIQFPEDQKVRAGESVELFGKVTGTQPITCTWMKFRKQIQESEHMKVENSENGSKLTILAARQEHCGCYTLLVENKLGSRQAQVNLTVVDKPDPPAGTPCASDIRSSSLTLSWYGSSYDGGSAVQSYSIEIWDSANKTWKELATCRSTSFNVQDLLPDHEYKFRVRAINVYGTSEPSQESELTTVGEKPEEPKDEVEVSDDDEKEPEVDYRTVTINTEQKVSDFYDIEERLGSGKFGQVFRLVEKKTRKVWAGKFFKAYSAKEKENIRQEISIMNCLHHPKLVQCVDAFEEKANIVMVLEIVSGGELFERIIDEDFELTERECIKYMRQISEGVEYIHKQGIVHLDLKPENIMCVNKTGTRIKLIDFGLARRLENAGSLKVLFGTPEFVAPEVINYEPIGYATDMWSIGVICYILVSGLSPFMGDNDNETLANVTSATWDFDDEAFDEISDDAKDFISNLLKKDMKNRLDCTQCLQHPWLMKDTKNMEAKKLSKDRMKKYMARRKWQKTGNAVRAIGRLSSMAMISGLSGRKSSTGSPTSPLNAEKLESEEDVSQAFLEAVAEEKPHVKPYFSKTIRDLEVVEGSAARFDCKIEGYPDPEVVWFKDDQSIRESRHFQIDYDEDGNCSLIISDVCGDDDAKYTCKAVNSLGEATCTAELIVETMEEGEGEGEEEEE

SEQ ID NO: 7202 - protein, 1863 aa, Homo sapiens
MGDVKLVASSHISKTSLSVDPSRVDSMPLTEAPAFILPPRNLCIKEGATAKFEGRVRGYPEPQVTWHRNGQPITSGGRFLLDCGIRGTFSLVIHAVHEEDRGKYTCEATNGSGARQVTVELTVEGSFAKQLGQPVVSKTLGDRFSAPAVETRPSIWGECPPKFATKLGRVVVKEGQMGRFSCKITGRPQPQVTWLKGNVPLQPSARVSVSEKNGMQVLEIHGVNQDDVGVYTCLVVNGSGKASMSAELSIQGLDSANRSFVRETKATNSDVRKEVTNVISKESKLDSLEAAAKSKNCSSPQRGGSPPWAANSQPQPPRESKLESCKDSPRTAPQTPVLQKTSSSITLQAARVQPEPRAPGLGVLSPSGEERKRPAPPRPATFPTRQPGLGSQDVVSKAANRRIPMEGQRDSAFPKFESKPQSQEVKENQTVKFRCEVSGIPKPEVAWFLEGTPVRRQEGSIEVYEDAGSHYLCLLKARTRDSGTYSCTASNAQGQLSCSWTLQVERLAVMEVAPSFSSVLKDCAVIEGQDFVLQCSVRGTPVPRITWLLNGQPIQYARSTCEAGVAELHIQDALPEDHGTYTCLAENALGQVSCSAWVTVHEKKSSRKSEYLLPVAPSKPTAPIFLQGLSDLKVMDGSQVTMTVQVSGNPPPEVIWLHNGNEIQESEDFHFEQRGTQHSLCIQEVFPEDTGTYTCEAWNSAGEVRTQAVLTVQEPHDGTQPWFISKPRSVTASLGQSVLISCAIAGDPFPTVHWLRDGKALCKDTGHFEVLQNEDVFTLVLKKVQPWHAGQYEILLKNRVGECSCQVSLMLQNSSARALPRGREPASCEDLCGGGVGADGGGSDRYGSLRPGWPARGQGWLEEEDGEDVRGVLKRRVETRQHTEEAIRQQEVEQLDFRDLLGKKVSTKTLSEDDLKEIPAEQMDFRANLQRQVKPKTVSEEERKVHSPQQVDFRSVLAKKGTSKTPVPEKVPPPKPATPDFRSVLGGKKKLPAENGSSSAETLNAKAVESSKPLSNAQPSGPLKPVGNAKPAETLKPMGNAKPAETLKPMGNAKPDENLKSASKEELKKDVKNDVNCKRGHAGTTDNEKRSESQGTAPAFKQKLQDVHVAEGKKLLLQCQVSSDPPATIIWTLNGKTLKTTKFIILSQEGSLCSVSIEKALPEDRGLYKCVAKNDAGQAECSCQVTVDDAPASENTKAPEMKSRRPKSSLPPVLGTESDATVKKKPAPKTPPKAAMPPQIIQFPEDQKVRAGESVELFGKVTGTQPITCTWMKFRKQIQESEHMKVENSENGSKLTILAARQEHCGCYTLLVENKLGSRQAQVNLTVVDKPDPPAGTPCASDIRSSSLTLSWYGSSYDGGSAVQSYSIEIWDSANKTWKELATCRSTSFNVQDLLPDHEYKFRVRAINVYGTSEPSQESELTTVGEKPEEPKDEVEVSDDDEKEPEVDYRTVTINTEQKVSDFYDIEERLGSGKFGQVFRLVEKKTRKVWAGKFFKAYSAKEKENIRQEISIMNCLHHPKLVQCVDAFEEKANIVMVLEIVSGGELFERIIDEDFELTERECIKYMRQISEGVEYIHKQGIVHLDLKPENIMCVNKTGTRIKLIDFGLARRLENAGSLKVLFGTPEFVAPEVINYEPIGYATDMWSIGVICYILNRLDCTQCLQHPWLMKDTKNMEAKKLSKDRMKKYMARRKWQKTGNAVRAIGRLSSMAMISGLSGRKSSTGSPTSPLNAEKLESEEDVSQAFLEAVAEEKPHVKPYFSKTIRDLEVVEGSAARFDCKIEGYPDPEVVWFKDDQSIRESRHFQIDYDEDGNCSLIISDVCGDDDAKYTCKAVNSLGEATCTAELIVETMEEGEGEGEEEEE

SEQ ID NO: 7203 - protein, 1914 aa, Homo sapiens
MGDVKLVASSHISKTSLSVDPSRVDSMPLTEAPAFILPPRNLCIKEGATAKFEGRVRGYPEPQVTWHRNGQPITSGGRFLLDCGIRGTFSLVIHAVHEEDRGKYTCEATNGSGARQVTVELTVEGSFAKQLGQPVVSKTLGDRFSAPAVETRPSIWGECPPKFATKLGRVVVKEGQMGRFSCKITGRPQPQVTWLKGNVPLQPSARVSVSEKNGMQVLEIHGVNQDDVGVYTCLVVNGSGKASMSAELSIQGLDSANRSFVRETKATNSDVRKEVTNVISKESKLDSLEAAAKSKNCSSPQRGGSPPWAANSQPQPPRESKLESCKDSPRTAPQTPVLQKTSSSITLQAARVQPEPRAPGLGVLSPSGEERKRPAPPRPATFPTRQPGLGSQDVVSKAANRRIPMEGQRDSAFPKFESKPQSQEVKENQTVKFRCEVSGIPKPEVAWFLEGTPVRRQEGSIEVYEDAGSHYLCLLKARTRDSGTYSCTASNAQGQLSCSWTLQVERLAVMEVAPSFSSVLKDCAVIEGQDFVLQCSVRGTPVPRITWLLNGQPIQYARSTCEAGVAELHIQDALPEDHGTYTCLAENALGQVSCSAWVTVHEKKSSRKSEYLLPVAPSKPTAPIFLQGLSDLKVMDGSQVTMTVQVSGNPPPEVIWLHNGNEIQESEDFHFEQRGTQHSLCIQEVFPEDTGTYTCEAWNSAGEVRTQAVLTVQEPHDGTQPWFISKPRSVTASLGQSVLISCAIAGDPFPTVHWLRDGKALCKDTGHFEVLQNEDVFTLVLKKVQPWHAGQYEILLKNRVGECSCQVSLMLQNSSARALPRGREPASCEDLCGGGVGADGGGSDRYGSLRPGWPARGQGWLEEEDGEDVRGVLKRRVETRQHTEEAIRQQEVEQLDFRDLLGKKVSTKTLSEDDLKEIPAEQMDFRANLQRQVKPKTVSEEERKVHSPQQVDFRSVLAKKGTSKTPVPEKVPPPKPATPDFRSVLGGKKKLPAENGSSSAETLNAKAVESSKPLSNAQPSGPLKPVGNAKPAETLKPMGNAKPAETLKPMGNAKPDENLKSASKEELKKDVKNDVNCKRGHAGTTDNEKRSESQGTAPAFKQKLQDVHVAEGKKLLLQCQVSSDPPATIIWTLNGKTLKTTKFIILSQEGSLCSVSIEKALPEDRGLYKCVAKNDAGQAECSCQVTVDDAPASENTKAPEMKSRRPKSSLPPVLGTESDATVKKKPAPKTPPKAAMPPQIIQFPEDQKVRAGESVELFGKVTGTQPITCTWMKFRKQIQESEHMKVENSENGSKLTILAARQEHCGCYTLLVENKLGSRQAQVNLTVVDKPDPPAGTPCASDIRSSSLTLSWYGSSYDGGSAVQSYSIEIWDSANKTWKELATCRSTSFNVQDLLPDHEYKFRVRAINVYGTSEPSQESELTTVGEKPEEPKDEVEVSDDDEKEPEVDYRTVTINTEQKVSDFYDIEERLGSGKFGQVFRLVEKKTRKVWAGKFFKAYSAKEKENIRQEISIMNCLHHPKLVQCVDAFEEKANIVMVLEIVSGGELFERIIDEDFELTERECIKYMRQISEGVEYIHKQGIVHLDLKPENIMCVNKTGTRIKLIDFGLARRLENAGSLKVLFGTPEFVAPEVINYEPIGYATDMWSIGVICYILVSGLSPFMGDNDNETLANVTSATWDFDDEAFDEISDDAKDFISNLLKKDMKNRLDCTQCLQHPWLMKDTKNMEAKKLSKDRMKKYMARRKWQKTGNAVRAIGRLSSMAMISGLSGRKSSTGSPTSPLNAEKLESEEDVSQAFLEAVAEEKPHVKPYFSKTIRDLEVVEGSAARFDCKIEGYPDPEVVWFKDDQSIRESRHFQIDYDEDGNCSLIISDVCGDDDAKYTCKAVNSLGEATCTAELIVETMEEGEGEGEEEEE

SEQ ID NO: 7204 - protein, 76 aa, Homo sapiens
MGDVKLVASSHISKTSLSVDPSRVDSMPLTEAPAFILPPRNLCIKEGATAKFEGRVRGYPEPQVTWHRNGQPITSG

SEQ ID NO: 7205 - protein, 1863 aa, Homo sapiens; identical to SEQ ID NO: 7202

SEQ ID NO: 7206 - protein, 154 aa, Homo sapiens
MAMISGLSGRKSSTGSPTSPLNAEKLESEEDVSQAFLEAVAEEKPHVKPYFSKTIRDLEVVEGSAARFDCKIEGYPDPEVVWFKDDQSIRESRHFQIDYDEDGNCSLIISDVCGDDDAKYTCKAVNSLGEATCTAELIVETMEEGEGEGEEEEE

SEQ ID NO: 7207 - protein, 1914 aa, Homo sapiens; identical to SEQ ID NO: 7203

SEQ ID NO: 7208 - protein, 1976 aa, Homo sapiens
MAQRTGLEDPERYLFVDRAVIYNPATQADWTAKKLVWIPSERHGFEAASIKEERGDEVMVELAENGKKAMVNKDDIQKMNPPKFSKVEDMAELTCLNEASVLHNLKDRYYSGLIYTYSGLFCVVINPYKNLPIYSENIIEMYRGKKRHEMPPHIYAISESAYRCMLQDREDQSILCTGESGAGKTENTKKVIQYLAHVASSHKGRKDHNIPGELERQLLQANPILESFGNAKTVKNDNSSRFGKFIRINFDVTGYIVGANIETYLLEKSRAVRQAKDERTFHIFYQLLSGAGEHLKSDLLLEGFNNYRFLSNGYIPIPGQQDKDNFQETMEAMHIMGFSHEEILSMLKVVSSVLQFGNISFKKERNTDQASMPENTVAQKLCHLLGMNVMEFTRAILTPRIKVGRDYVQKAQTKEQADFAVEALAKATYERLFRWLVHRINKALDRTKRQGASFIGILDIAGFEIFELNSFEQLCINYTNEKLQQLFNHTMFILEQEEYQREGIEWNFIDFGLDLQPCIDLIERPANPPGVLALLDEECWFPKATDKTFVEKLVQEQGSHSKFQKPRQLKDKADFCIIHYAGKVDYKADEWLMKNMDPLNDNVATLLHQSSDRFVAELWKDVDRIVGLDQVTGMTETAFGSAYKTKKGMFRTVGQLYKESLTKLMATLRNTNPNFVRCIIPNHEKRAGKLDPHLVLDQLRCNGVLEGIRICRQGFPNRIVFQEFRQRYEILTPNAIPKGFMDGKQACERMIRALELDPNLYRIGQSKIFFRAGVLAHLEEERDLKITDIIIFFQAVCRGYLARKAFAKKQQQLSALKVLQRNCAAYLKLRHWQWWRVFTKVKPLLQVTRQEEELQAKDEELLKVKEKQTKVEGELEEMERKHQQLLEEKNILAEQLQAETELFAEAEEMRARLAAKKQELEEILHDLESRVEEEEERNQILQNEKKKMQAHIQDLEEQLDEEEGARQKLQLEKVTAEAKIKKMEEEILLLEDQNSKFIKEKKLMEDRIAECSSQLAEEEEKAKNLAKIRNKQEVMISDLEERLKKEEKTRQELEKAKRKLDGETTDLQDQIAELQAQIDELKLQLAKKEEELQGALARGDDETLHKNNALKVVRELQAQIAELQEDFESEKASRNKAEKQKRDLSEELEALKTELEDTLDTTAAQQELRTKREQEVAELKKALEEETKNHEAQIQDMRQRHATALEELSEQLEQAKRFKANLEKNKQGLETDNKELACEVKVLQQVKAESEHKRKKLDAQVQELHAKVSEGDRLRVELAEKASKLQNELDNVSTLLEEAEKKGIKFAKDAASLESQLQDTQELLQEETRQKLNLSSRIRQLEEEKNSLQEQQEEEEEARKNLEKQVLALQSQLADTKKKVDDDLGTIESLEEAKKKLLKDAEALSQRLEEKALAYDKLEKTKNRLQQELDDLTVDLDHQRQVASNLEKKQKKFDQLLAEEKSISARYAEERDRAEAEAREKETKALSLARALEEALEAKEEFERQNKQLRADMEDLMSSKDDVGKNVHELEKSKRALEQQVEEMRTQLEELEDELQATEDAKLRLEVNMQAMKAQFERDLQTRDEQNEEKKRLLIKQVRELEAELEDERKQRALAVASKKKMEIDLKDLEAQIEAANKARDEVIKQLRKLQAQMKDYQRELEEARASRDEIFAQSKESEKKLKSLEAEILQLQEELASSERARRHAEQERDELADEITNSASGKSALLDEKRRLEARIAQLEEELEEEQSNMELLNDRFRKTTLQVDTLNAELAAERSAAQKSDNARQQLERQNKELKAKLQELEGAVKSKFKATISALEAKIGQLEEQLEQEAKERAAANKLVRRTEKKLKEIFMQVEDERRHADQYKEQMEKANARMKQLKRQLEEAEEEATRANASRRKLQRELDDATEANEGLSREVSTLKNRLRRGGPISFSSSRSGRRQLHLEGASLELSDDDTESKTSDVNETQPPQSE

SEQ ID NO: 7209 - protein, 2007 aa, Homo sapiens
MAQRTGLEDPERYLFVDRAVIYNPATQADWTAKKLVWIPSERHGFEAASIKEERGDEVMVELAENGKKAMVNKDDIQKMNPPKFSKVEDMAELTCLNEASVLHNLKDRYYSGLIYTYSGLFCVVINPYKNLPIYSENIIEMYRGKKRHEMPPHIYAISESAYRCMLQDREDQSILCTGESGAGKTENTKKVIQYLAHVASSHKGRKDHNIPQESPKPVKHQGELERQLLQANPILESFGNAKTVKNDNSSRFGKFIRINFDVTGYIVGANIETYLLEKSRAVRQAKDERTFHIFYQLLSGAGEHLKSDLLLEGFNNYRFLSNGYIPIPGQQDKDNFQETMEAMHIMGFSHEEILSMLKVVSSVLQFGNISFKKERNTDQASMPENTVAQKLCHLLGMNVMEFTRAILTPRIKVGRDYVQKAQTKEQADFAVEALAKATYERLFRWLVHRINKALDRTKRQGASFIGILDIAGFEIFELNSFEQLCINYTNEKLQQLFNHTMFILEQEEYQREGIEWNFIDFGLDLQPCIDLIERPANPPGVLALLDEECWFPKATDKTFVEKLVQEQGSHSKFQKPRQLKDKADFCIIHYAGKVDYKADEWLMKNMDPLNDNVATLLHQSSDRFVAELWKDEIQNIQRASFYDSVSGLHEPPVDRIVGLDQVTGMTETAFGSAYKTKKGMFRTVGQLYKESLTKLMATLRNTNPNFVRCIIPNHEKRAGKLDPHLVLDQLRCNGVLEGIRICRQGFPNRIVFQEFRQRYEILTPNAIPKGFMDGKQACERMIRALELDPNLYRIGQSKIFFRAGVLAHLEEERDLKITDIIIFFQAVCRGYLARKAFAKKQQQLSALKVLQRNCAAYLKLRHWQWWRVFTKVKPLLQVTRQEEELQAKDEELLKVKEKQTKVEGELEEMERKHQQLLEEKNILAEQLQAETELFAEAEEMRARLAAKKQELEEILHDLESRVEEEEERNQILQNEKKKMQAHIQDLEEQLDEEEGARQKLQLEKVTAEAKIKKMEEEILLLEDQNSKFIKEKKLMEDRIAECSSQLAEEEEKAKNLAKIRNKQEVMISDLEERLKKEEKTRQELEKAKRKLDGETTDLQDQIAELQAQIDELKLQLAKKEEELQGALARGDDETLHKNNALKVVRELQAQIAELQEDFESEKASRNKAEKQKRDLSEELEALKTELEDTLDTTAAQQELRTKREQEVAELKKALEEETKNHEAQIQDMRQRHATALEELSEQLEQAKRFKANLEKNKQGLETDNKELACEVKVLQQVKAESEHKRKKLDAQVQELHAKVSEGDRLRVELAEKASKLQNELDNVSTLLEEAEKKGIKFAKDAASLESQLQDTQELLQEETRQKLNLSSRIRQLEEEKNSLQEQQEEEEEARKNLEKQVLALQSQLADTKKKVDDDLGTIESLEEAKKKLLKDAEALSQRLEEKALAYDKLEKTKNRLQQELDDLTVDLDHQRQVASNLEKKQKKFDQLLAEEKSISARYAEERDRAEAEAREKETKALSLARALEEALEAKEEFERQNKQLRADMEDLMSSKDDVGKNVHELEKSKRALEQQVEEMRTQLEELEDELQATEDAKLRLEVNMQAMKAQFERDLQTRDEQNEEKKRLLIKQVRELEAELEDERKQRALAVASKKKMEIDLKDLEAQIEAANKARDEVIKQLRKLQAQMKDYQRELEEARASRDEIFAQSKESEKKLKSLEAEILQLQEELASSERARRHAEQERDELADEITNSASGKSALLDEKRRLEARIAQLEEELEEEQSNMELLNDRFRKTTLQVDTLNAELAAERSAAQKSDNARQQLERQNKELKAKLQELEGAVKSKFKATISALEAKIGQLEEQLEQEAKERAAANKLVRRTEKKLKEIFMQVEDERRHADQYKEQMEKANARMKQLKRQLEEAEEEATRANASRRKLQRELDDATEANEGLSREVSTLKNRLRRGGPISFSSSRSGRRQLHLEGASLELSDDDTESKTSDVNETQPPQSE

SEQ ID NO: 7210 - protein, 1992 aa, Homo sapiens
MAQRTGLEDPERYLFVDRAVIYNPATQADWTAKKLVWIPSERHGFEAASIKEERGDEVMVELAENGKKAMVNKDDIQKMNPPKFSKVEDMAELTCLNEASVLHNLKDRYYSGLIYTYSGLFCVVINPYKNLPIYSENIIEMYRGKKRHEMPPHIYAISESAYRCMLQDREDQSILCTGESGAGKTENTKKVIQYLAHVASSHKGRKDHNIPQESPKPVKHQASALLYGELERQLLQANPILESFGNAKTVKNDNSSRFGKFIRINFDVTGYIVGANIETYLLEKSRAVRQAKDERTFHIFYQLLSGAGEHLKSDLLLEGFNNYRFLSNGYIPIPGQQDKDNFQETMEAMHIMGFSHEEILSMLKVVSSVLQFGNISFKKERNTDQASMPENTVAQKLCHLLGMNVMEFTRAILTPRIKVGRDYVQKAQTKEQADFAVEALAKATYERLFRWLVHRINKALDRTKRQGASFIGILDIAGFEIFELNSFEQLCINYTNEKLQQLFNHTMFILEQEEYQREGIEWNFIDFGLDLQPCIDLIERPANPPGVLALLDEECWFPKATDKTFVEKLVQEQGSHSKFQKPRQLKDKADFCIIHYAGKVDYKADEWLMKNMDPLNDNVATLLHQSSDRFVAELWKDVDRIVGLDQVTGMTETAFGSAYKTKKGMFRTVGQLYKESLTKLMATLRNTNPNFVRCIIPNHEKRAGKLDPHLVLDQLRCNGVLEGIRICRQGFPNRIVFQEFRQRYEILTPNAIPKGFMDGKQACERMIRALELDPNLYRIGQSKIFFRAGVLAHLEEERDLKITDIIIFFQAVCRGYLARKAFAKKQQQLSALKVLQRNCAAYLKLRHWQWWRVFTKVKPLLQVTRQEEELQAKDEELLKVKEKQTKVEGELEEMERKHQQLLEEKNILAEQLQAETELFAEAEEMRARLAAKKQELEEILHDLESRVEEEEERNQILQNEKKKMQAHIQDLEEQLDEEEGARQKLQLEKVTAEAKIKKMEEEILLLEDQNSKFIKEKKLMEDRIAECSSQLAEEEEKAKNLAKIRNKQEVMISDLEERLKKEEKTRQELEKAKRKLDGETTDLQDQIAELQAQIDELKLQLAKKEEELQGALARGDDETLHKNNALKVVRELQAQIAELQEDFESEKASRNKAEKQKRDLSEELEALKTELEDTLDTTAAQQELRTKREQEVAELKKALEEETKNHEAQIQDMRQRHATALEELSEQLEQAKRFKANLEKNKQGLETDNKELACEVKVLQQVKAESEHKRKKLDAQVQELHAKVSEGDRLRVELAEKASKLQNELDNVSTLLEEAEKKGIKFAKDAASLESQLQDTQELLQEETRQKLNLSSRIRQLEEEKNSLQEQQEEEEEARKNLEKQVLALQSQLADTKKKVDDDLGTIESLEEAKKKLLKDAEALSQRLEEKALAYDKLEKTKNRLQQELDDLTVDLDHQRQVASNLEKKQKKFDQLLAEEKSISARYAEERDRAEAEAREKETKALSLARALEEALEAKEEFERQNKQLRADMEDLMSSKDDVGKNVHELEKSKRALEQQVEEMRTQLEELEDELQATEDAKLRLEVNMQAMKAQFERDLQTRDEQNEEKKRLLIKQVRELEAELEDERKQRALAVASKKKMEIDLKDLEAQIEAANKARDEVIKQLRKLQAQMKDYQRELEEARASRDEIFAQSKESEKKLKSLEAEILQLQEELASSERARRHAEQERDELADEITNSASGKSALLDEKRRLEARIAQLEEELEEEQSNMELLNDRFRKTTLQVDTLNAELAAERSAAQKSDNARQQLERQNKELKAKLQELEGAVKSKFKATISALEAKIGQLEEQLEQEAKERAAANKLVRRTEKKLKEIFMQVEDERRHADQYKEQMEKANARMKQLKRQLEEAEEEATRANASRRKLQRELDDATEANEGLSREVSTLKNRLRRGGPISFSSSRSGRRQLHLEGASLELSDDDTESKTSDVNETQPPQSE
